United States Patent Application Publication US 2023/0212319 A1 - sequence listing, part 4

SEQ ID NO: 4783 - DNA, 1914 bp, Artificial Sequence
  Synthetic Polynucloetide
atggccttaccagtgaccgccttgctcctgccgctggccttgctgctccacgccgccaggccgggcatgcggactgaagacctcccaaaggctgtggtgttcctggagcctcaatggtacagggtgctggagaaggacagtgtgactctgaagtgccagggagcctactcccctgaggacaattccacacagtggtttcacaatgagagcctcatctcaagccaggcctccagctacttcattgacgctgccacagtggacgacagtggagagtacaggtgccagacaaacctctccaccctcagtgacccggtgcagctagaagtccatatcggctggctgttgctccaggcccctcggtgggtgttcaaggaggaagaccctattcacctgaggtgtcacagctggaagaacactgctctgcataaggtcacatatttacagaatggcaaaggcaggaagtattttcatcataattctgacttctacattccaaaagccacactcaaagacagcggctcctacttctgcagggggcttgttgggagtaaaaatgtgtcttcagagactgtgaacatcaccatcactcaaggtttggcagtgtcaaccatctcatcattctttccacctggctaccaaggtaccggcggaggcggatctggcggcggaggtagcggtggcggaggatctgaattcgacatccagatgacacagagccctagcagcctgtctgccagcgtgggagacagagtgaccatcacatgcaaggccagcgaccacatcaacaactggctggcctggtatcagcagaagcctggacaggcccctaagctgctgatctacggcgctaccacactggaaacaggcgtgcccagcagattttctggcagcggctctggcaccgactacaccctgacaatatccagcctccagcctgaggacttcgccacctactactgtcagcagagctggaacaccccttggacattcggccagggcaccaagctggaaatcaagagaggcggaggcggaagtggaggcggaggatctggcggcggaggctctcaagttcagcttcaacagcctggcgctgagctggtcaaacctggcgcttctgtgaagatgagctgcaaagccagcggctacgccttcagcagctactggatcaactggatgaagcagaaacccggccagggactcgaatggatcggccaaatctatcccggcgacggcgacaccaactacaacggcaagttcaagggcagagccacactgaccgccgatacctctagcagcacagcctacatgcagctgagcagcctgaccagcgaagatagcgccgtgtacttctgtgcccggtccatcacaacagtcgtgggctgcgctatggactattggggccagggaacaagcgtgaccgtgtctagtacgcgtcagagcatcaagggcaaccacctggtcaaggtgtacgactaccaagaggacggcagcgtgctgctgacatgtgatgccgaggccaagaacatcacctggtttaaggacggcaagatgatcggcttcctgaccgaggacaagaagaagtggaacctgggcagcaacgctaaggaccccagaggcatgtatcagtgcaagggcagccagaacaagagcaagcccctccaggtgtactaccggatgtgccagaactgcatcgagctgaacgccgctaccatcagcggctttctgttcgccgagatcgtgtccatcttcgtgctggccgtgggcgtgtactttatcgctggacaggatggcgtgcggcagagcagagcttccgataagcaaaccctgctgcctaacgaccagctgtaccagcctctgaaggacagagaggacgaccagtacagccacctccagggcaatcagctgagaagaaac

SEQ ID NO: 4784 - DNA, 1863 bp, Artificial Sequence
  Synthetic Polynucloetide
atggccttaccagtgaccgccttgctcctgccgctggccttgctgctccacgccgccaggccgggcatgcggactgaagacctcccaaaggctgtggtgttcctggagcctcaatggtacagggtgctggagaaggacagtgtgactctgaagtgccagggagcctactcccctgaggacaattccacacagtggtttcacaatgagagcctcatctcaagccaggcctccagctacttcattgacgctgccacagtggacgacagtggagagtacaggtgccagacaaacctctccaccctcagtgacccggtgcagctagaagtccatatcggctggctgttgctccaggcccctcggtgggtgttcaaggaggaagaccctattcacctgaggtgtcacagctggaagaacactgctctgcataaggtcacatatttacagaatggcaaaggcaggaagtattttcatcataattctgacttctacattccaaaagccacactcaaagacagcggctcctacttctgcagggggcttgttgggagtaaaaatgtgtcttcagagactgtgaacatcaccatcactcaaggtttggcagtgtcaaccatctcatcattctttccacctggctaccaaggtaccggcggaggcggatctggcggcggaggtagcggtggcggaggatctgaattcgacatccagatgacacagagccctagcagcctgtctgccagcgtgggagacagagtgaccatcacatgcaaggccagcgaccacatcaacaactggctggcctggtatcagcagaagcctggacaggcccctaagctgctgatctacggcgctaccacactggaaacaggcgtgcccagcagattttctggcagcggctctggcaccgactacaccctgacaatatccagcctccagcctgaggacttcgccacctactactgtcagcagagctggaacaccccttggacattcggccagggcaccaagctggaaatcaagagaggcggaggcggaagtggaggcggaggatctggcggcggaggctctcaagttcagcttcaacagcctggcgctgagctggtcaaacctggcgcttctgtgaagatgagctgcaaagccagcggctacgccttcagcagctactggatcaactggatgaagcagaaacccggccagggactcgaatggatcggccaaatctatcccggcgacggcgacaccaactacaacggcaagttcaagggcagagccacactgaccgccgatacctctagcagcacagcctacatgcagctgagcagcctgaccagcgaagatagcgccgtgtacttctgtgcccggtccatcacaacagtcgtgggctgcgctatggactattggggccagggaacaagcgtgaccgtgtctagtacgcgtcagagttttgggttgttggaccctaaattgtgctatctgttggacggaatcctgttcatttacggagtgatcctgaccgcattgttcctgcgggttaagttttccagatccgcagacgcacccgcttaccaacaagggcagaaccaactctacaatgaacttaatttggggcggagggaagagtacgacgttctggacaaaaggaggggacgagatcccgagatgggcggaaagcctcagcgaaggaagaatccgcaagaggggctttataacgaactccagaaagataaaatggcagaagcctatagtgagattgggatgaagggagaaaggaggaggggtaaaggtcacgatgggttgtaccaaggattgagcacagccactaaagatacctatgatgcgctccacatgcaggccctgccgccaaga

SEQ ID NO: 4785 - DNA, 2565 bp, Artificial Sequence
  Synthetic Polynucloetide
atggccttaccagtgaccgccttgctcctgccgctggccttgctgctccacgccgccaggccgggcatgcggactgaagacctcccaaaggctgtggtgttcctggagcctcaatggtacagggtgctggagaaggacagtgtgactctgaagtgccagggagcctactcccctgaggacaattccacacagtggtttcacaatgagagcctcatctcaagccaggcctccagctacttcattgacgctgccacagtggacgacagtggagagtacaggtgccagacaaacctctccaccctcagtgacccggtgcagctagaagtccatatcggctggctgttgctccaggcccctcggtgggtgttcaaggaggaagaccctattcacctgaggtgtcacagctggaagaacactgctctgcataaggtcacatatttacagaatggcaaaggcaggaagtattttcatcataattctgacttctacattccaaaagccacactcaaagacagcggctcctacttctgcagggggcttgttgggagtaaaaatgtgtcttcagagactgtgaacatcaccatcactcaaggtttggcagtgtcaaccatctcatcattctttccacctggctaccaaggtaccggcggaggcggatctggcggcggaggtagcggtggcggaggatctgaattcgacatccagatgacacagagccctagcagcctgtctgccagcgtgggagacagagtgaccatcacatgcaaggccagcgaccacatcaacaactggctggcctggtatcagcagaagcctggacaggcccctaagctgctgatctacggcgctaccacactggaaacaggcgtgcccagcagattttctggcagcggctctggcaccgactacaccctgacaatatccagcctccagcctgaggacttcgccacctactactgtcagcagagctggaacaccccttggacattcggccagggcaccaagctggaaatcaagagaggcggaggcggaagtggaggcggaggatctggcggcggaggctctcaagttcagcttcaacagcctggcgctgagctggtcaaacctggcgcttctgtgaagatgagctgcaaagccagcggctacgccttcagcagctactggatcaactggatgaagcagaaacccggccagggactcgaatggatcggccaaatctatcccggcgacggcgacaccaactacaacggcaagttcaagggcagagccacactgaccgccgatacctctagcagcacagcctacatgcagctgagcagcctgaccagcgaagatagcgccgtgtacttctgtgcccggtccatcacaacagtcgtgggctgcgctatggactattggggccagggaacaagcgtgaccgtgtctagtacgcgtgggagcggcatccagaaccctgatcctgccgtgtaccagctgcgggatagcaagagcagcgacaagagcgtgtgtctgttcaccgacttcgacagccagaccaacgtgtcccagagcaaggactccgacgtgtacatcaccgataagaccgtgctggacatgcggagcatggacttcaagagcaactccgccgtggcctggtccaacaagtccgatttcgcctgcgccaacgccttcaacaacagcattatccccgaggacacattcttcccaagccccgagagcagctgcgacgtgaagctggtggaaaagagcttcgagacagacaccaacctgaacttccagaacctgagcgtgatcggcttcagaatcctgctgctgaaagtggccggctttaacctgctgatgaccctgcggctgtggtccagccgcgccaagagaagcggatctggcgtgaagcagaccctgaatttcgacctgctgaagctggctggcgacgtggaatccaacccaggcccttctagaggccatatgaccgagtacaagcccacggtgcgcctcgccacccgcgacgacgtccccagggccgtacgcaccctcgccgccgcgttcgccgactaccccgccacgcgccacaccgtcgatccggaccgccacatcgagcgggtcaccgagctgcaagaactcttcctcacgcgcgtcgggctcgacatcggcaaggtgtgggtcgcggacgacggcgccgcggtggcggtctggaccacgccggagagcgtcgaagcgggggcggtgttcgccgagatcggcccgcgcatggccgagttgagcggttcccggctggccgcgcagcaacagatggaaggcctcctggcgccgcaccggcccaaggagcccgcgtggttcctggccaccgtcggcgtctcgcccgaccaccagggcaagggtctgggcagcgccgtcgtgctccccggagtggaggcggccgagcgcgccggggtgcccgccttcctggagacctccgcgccccgcaacctccccttctacgagcggctcggcttcaccgtcaccgccgacgtcgaggtgcccgaaggaccgcgcacctggtgcatgacccgcaagcccggtgcctga

SEQ ID NO: 4786 - DNA, 2661 bp, Artificial Sequence
  Synthetic Polynucloetide
atggccttaccagtgaccgccttgctcctgccgctggccttgctgctccacgccgccaggccgggcatgcggactgaagacctcccaaaggctgtggtgttcctggagcctcaatggtacagggtgctggagaaggacagtgtgactctgaagtgccagggagcctactcccctgaggacaattccacacagtggtttcacaatgagagcctcatctcaagccaggcctccagctacttcattgacgctgccacagtggacgacagtggagagtacaggtgccagacaaacctctccaccctcagtgacccggtgcagctagaagtccatatcggctggctgttgctccaggcccctcggtgggtgttcaaggaggaagaccctattcacctgaggtgtcacagctggaagaacactgctctgcataaggtcacatatttacagaatggcaaaggcaggaagtattttcatcataattctgacttctacattccaaaagccacactcaaagacagcggctcctacttctgcagggggcttgttgggagtaaaaatgtgtcttcagagactgtgaacatcaccatcactcaaggtttggcagtgtcaaccatctcatcattctttccacctggctaccaaggtaccggcggaggcggatctggcggcggaggtagcggtggcggaggatctgaattcgacatccagatgacacagagccctagcagcctgtctgccagcgtgggagacagagtgaccatcacatgcaaggccagcgaccacatcaacaactggctggcctggtatcagcagaagcctggacaggcccctaagctgctgatctacggcgctaccacactggaaacaggcgtgcccagcagattttctggcagcggctctggcaccgactacaccctgacaatatccagcctccagcctgaggacttcgccacctactactgtcagcagagctggaacaccccttggacattcggccagggcaccaagctggaaatcaagagaggcggaggcggaagtggaggcggaggatctggcggcggaggctctcaagttcagcttcaacagcctggcgctgagctggtcaaacctggcgcttctgtgaagatgagctgcaaagccagcggctacgccttcagcagctactggatcaactggatgaagcagaaacccggccagggactcgaatggatcggccaaatctatcccggcgacggcgacaccaactacaacggcaagttcaagggcagagccacactgaccgccgatacctctagcagcacagcctacatgcagctgagcagcctgaccagcgaagatagcgccgtgtacttctgtgcccggtccatcacaacagtcgtgggctgcgctatggactattggggccagggaacaagcgtgaccgtgtctagtctcgaggacctgaagaacgtgttcccacctgaggtggccgtgttcgagcctagcgaggccgagatcagccacacccagaaagccaccctcgtgtgcctggctaccggcttctaccccgaccatgtggaactgtcttggtgggtcaacggcaaagaggtgcacagcggcgtgtctaccgacccccagccactgaaagaacagcccgccctgaacgacagccggtactgcctgagcagcagactgagagtgtccgccaccttctggcagaacccccggaaccacttcagatgccaggtgcagttctacggcctgagcgagaacgacgagtggacccaggacagagccaagcccgtgacccagatcgtgtctgccgaagcctggggcagagccgattgcggctttaccagcgagagctaccagcagggcgtgctgagcgccaccatcctgtacgagatcctgctgggcaaggccaccctgtacgccgtgctggtgtctgccctggtgctgatggctatggtcaagcggaaggacagccggggaagggccaagcgatctggatctggagcaacaaacttctcactactcaaacaagcaggtgacgtggaggagaatcccgggcctactagaggccatatgaccgagtacaagcccacggtgcgcctcgccacccgcgacgacgtccccagggccgtacgcaccctcgccgccgcgttcgccgactaccccgccacgcgccacaccgtcgatccggaccgccacatcgagcgggtcaccgagctgcaagaactcttcctcacgcgcgtcgggctcgacatcggcaaggtgtgggtcgcggacgacggcgccgcggtggcggtctggaccacgccggagagcgtcgaagcgggggcggtgttcgccgagatcggcccgcgcatggccgagttgagcggttcccggctggccgcgcagcaacagatggaaggcctcctggcgccgcaccggcccaaggagcccgcgtggttcctggccaccgtcggcgtctcgcccgaccaccagggcaagggtctgggcagcgccgtcgtgctccccggagtggaggcggccgagcgcgccggggtgcccgccttcctggagacctccgcgccccgcaacctccccttctacgagcggctcggcttcaccgtcaccgccgacgtcgaggtgcccgaaggaccgcgcacctggtgcatgacccgcaagcccggtgcctga

SEQ ID NO: 4787 - DNA, 2811 bp, Artificial Sequence
  Synthetic Polynucloetide
atggccttaccagtgaccgccttgctcctgccgctggccttgctgctccacgccgccaggccgggcatgcggactgaagacctcccaaaggctgtggtgttcctggagcctcaatggtacagggtgctggagaaggacagtgtgactctgaagtgccagggagcctactcccctgaggacaattccacacagtggtttcacaatgagagcctcatctcaagccaggcctccagctacttcattgacgctgccacagtggacgacagtggagagtacaggtgccagacaaacctctccaccctcagtgacccggtgcagctagaagtccatatcggctggctgttgctccaggcccctcggtgggtgttcaaggaggaagaccctattcacctgaggtgtcacagctggaagaacactgctctgcataaggtcacatatttacagaatggcaaaggcaggaagtattttcatcataattctgacttctacattccaaaagccacactcaaagacagcggctcctacttctgcagggggcttgttgggagtaaaaatgtgtcttcagagactgtgaacatcaccatcactcaaggtttggcagtgtcaaccatctcatcattctttccacctggctaccaaggtaccggcggaggcggatctggcggcggaggtagcggtggcggaggatctgaattcgacatccagatgacacagagccctagcagcctgtctgccagcgtgggagacagagtgaccatcacatgcaaggccagcgaccacatcaacaactggctggcctggtatcagcagaagcctggacaggcccctaagctgctgatctacggcgctaccacactggaaacaggcgtgcccagcagattttctggcagcggctctggcaccgactacaccctgacaatatccagcctccagcctgaggacttcgccacctactactgtcagcagagctggaacaccccttggacattcggccagggcaccaagctggaaatcaagagaggcggaggcggaagtggaggcggaggatctggcggcggaggctctcaagttcagcttcaacagcctggcgctgagctggtcaaacctggcgcttctgtgaagatgagctgcaaagccagcggctacgccttcagcagctactggatcaactggatgaagcagaaacccggccagggactcgaatggatcggccaaatctatcccggcgacggcgacaccaactacaacggcaagttcaagggcagagccacactgaccgccgatacctctagcagcacagcctacatgcagctgagcagcctgaccagcgaagatagcgccgtgtacttctgtgcccggtccatcacaacagtcgtgggctgcgctatggactattggggccagggaacaagcgtgaccgtgtctagtacgcgtgagcagaaactgatctcggaagaggatctggggagcggcaccccattcccttctctggcccctcccatcatgctgctggtggacggcaagcagcagatggtggtcgtgtgcctggtgctggatgtggccccacctggactggacagccccatctggtttagcgccggcaatggctctgccctggacgcctttacctacggcccaagccctgccaccgatggcacctggacaaatctggcccacctgagcctgcccagcgaggaactggcttcttgggagcctctcgtgtgccacacaggacctggcgctgagggacacagcagatccacccagcctatgcacctgtctggcgaggccagcaccgccagaacctgtcctcaggaacctctgagaggcacccctggcggagcactgtggctgggagtgctgagactgctgctgttcaagctgctgctgtttgacctgctgctgacctgctcctgtctgtgcgatcctgccggccctctgccttctcctgccaccaccacaagactgagagccctgggcagccacagactgcaccctgccacagagacaggcggcagagaggccacaagcagccctagaccccagcccagagacagaagatggggcgataccccccctggcagaaagcctggatctccagtccgcgccaagagaagcggatctggcgtgaagcagaccctgaatttcgacctgctgaagctggctggcgacgtggaatccaacccaggcccttctagatctagaggccatatgaccgagtacaagcccacggtgcgcctcgccacccgcgacgacgtccccagggccgtacgcaccctcgccgccgcgttcgccgactaccccgccacgcgccacaccgtcgatccggaccgccacatcgagcgggtcaccgagctgcaagaactcttcctcacgcgcgtcgggctcgacatcggcaaggtgtgggtcgcggacgacggcgccgcggtggcggtctggaccacgccggagagcgtcgaagcgggggcggtgttcgccgagatcggcccgcgcatggccgagttgagcggttcccggctggccgcgcagcaacagatggaaggcctcctggcgccgcaccggcccaaggagcccgcgtggttcctggccaccgtcggcgtctcgcccgaccaccagggcaagggtctgggcagcgccgtcgtgctccccggagtggaggcggccgagcgcgccggggtgcccgccttcctggagacctccgcgccccgcaacctccccttctacgagcggctcggcttcaccgtcaccgccgacgtcgaggtgcccgaaggaccgcgcacctggtgcatgacccgcaagcccggtgcctga

SEQ ID NO: 4788 - DNA, 2253 bp, Artificial Sequence
  Synthetic Polynucloetide
atggccttaccagtgaccgccttgctcctgccgctggccttgctgctccacgccgccaggccgggcatgcggactgaagacctcccaaaggctgtggtgttcctggagcctcaatggtacagggtgctggagaaggacagtgtgactctgaagtgccagggagcctactcccctgaggacaattccacacagtggtttcacaatgagagcctcatctcaagccaggcctccagctacttcattgacgctgccacagtggacgacagtggagagtacaggtgccagacaaacctctccaccctcagtgacccggtgcagctagaagtccatatcggctggctgttgctccaggcccctcggtgggtgttcaaggaggaagaccctattcacctgaggtgtcacagctggaagaacactgctctgcataaggtcacatatttacagaatggcaaaggcaggaagtattttcatcataattctgacttctacattccaaaagccacactcaaagacagcggctcctacttctgcagggggcttgttgggagtaaaaatgtgtcttcagagactgtgaacatcaccatcactcaaggtttggcagtgtcaaccatctcatcattctttccacctggctaccaaggtaccggcggaggcggatctggcggcggaggtagcggtggcggaggatctgaattcgacatccagatgacacagagccctagcagcctgtctgccagcgtgggagacagagtgaccatcacatgcaaggccagcgaccacatcaacaactggctggcctggtatcagcagaagcctggacaggcccctaagctgctgatctacggcgctaccacactggaaacaggcgtgcccagcagattttctggcagcggctctggcaccgactacaccctgacaatatccagcctccagcctgaggacttcgccacctactactgtcagcagagctggaacaccccttggacattcggccagggcaccaagctggaaatcaagagactcgaggacctgaagaacgtgttcccacctgaggtggccgtgttcgagcctagcgaggccgagatcagccacacccagaaagccaccctcgtgtgcctggctaccggcttctaccccgaccatgtggaactgtcttggtgggtcaacggcaaagaggtgcacagcggcgtgtctaccgacccccagccactgaaagaacagcccgccctgaacgacagccggtactgcctgagcagcagactgagagtgtccgccaccttctggcagaacccccggaaccacttcagatgccaggtgcagttctacggcctgagcgagaacgacgagtggacccaggacagagccaagcccgtgacccagatcgtgtctgccgaagcctggggcagagccgattgcggctttaccagcgagagctaccagcagggcgtgctgagcgccaccatcctgtacgagatcctgctgggcaaggccaccctgtacgccgtgctggtgtctgccctggtgctgatggctatggtcaagcggaaggacagccggggaagggccaagcgatctggatctggagcaacaaacttctcactactcaaacaagcaggtgacgtggaggagaatcccgggcctactagaggccatatgaccgagtacaagcccacggtgcgcctcgccacccgcgacgacgtccccagggccgtacgcaccctcgccgccgcgttcgccgactaccccgccacgcgccacaccgtcgatccggaccgccacatcgagcgggtcaccgagctgcaagaactcttcctcacgcgcgtcgggctcgacatcggcaaggtgtgggtcgcggacgacggcgccgcggtggcggtctggaccacgccggagagcgtcgaagcgggggcggtgttcgccgagatcggcccgcgcatggccgagttgagcggttcccggctggccgcgcagcaacagatggaaggcctcctggcgccgcaccggcccaaggagcccgcgtggttcctggccaccgtcggcgtctcgcccgaccaccagggcaagggtctgggcagcgccgtcgtgctccccggagtggaggcggccgagcgcgccggggtgcccgccttcctggagacctccgcgccccgcaacctccccttctacgagcggctcggcttcaccgtcaccgccgacgtcgaggtgcccgaaggaccgcgcacctggtgcatgacccgcaagcccggtgcctga

SEQ ID NO: 4789 - DNA, 1560 bp, Artificial Sequence
  Synthetic Polynucloetide
atggccttaccagtgaccgccttgctcctgccgctggccttgctgctccacgccgccaggccgggcatgcggactgaagacctcccaaaggctgtggtgttcctggagcctcaatggtacagggtgctggagaaggacagtgtgactctgaagtgccagggagcctactcccctgaggacaattccacacagtggtttcacaatgagagcctcatctcaagccaggcctccagctacttcattgacgctgccacagtggacgacagtggagagtacaggtgccagacaaacctctccaccctcagtgacccggtgcagctagaagtccatatcggctggctgttgctccaggcccctcggtgggtgttcaaggaggaagaccctattcacctgaggtgtcacagctggaagaacactgctctgcataaggtcacatatttacagaatggcaaaggcaggaagtattttcatcataattctgacttctacattccaaaagccacactcaaagacagcggctcctacttctgcagggggcttgttgggagtaaaaatgtgtcttcagagactgtgaacatcaccatcactcaaggtttggcagtgtcaaccatctcatcattctttccacctggctaccaaggtaccggcggaggcggatctggcggcggaggtagcggtggcggaggatctgaattcgacatccagatgacacagagccctagcagcctgtctgccagcgtgggagacagagtgaccatcacatgcaaggccagcgaccacatcaacaactggctggcctggtatcagcagaagcctggacaggcccctaagctgctgatctacggcgctaccacactggaaacaggcgtgcccagcagattttctggcagcggctctggcaccgactacaccctgacaatatccagcctccagcctgaggacttcgccacctactactgtcagcagagctggaacaccccttggacattcggccagggcaccaagctggaaatcaagagactcgaggacctgaagaacgtgttcccacctgaggtggccgtgttcgagcctagcgaggccgagatcagccacacccagaaagccaccctcgtgtgcctggctaccggcttctaccccgaccatgtggaactgtcttggtgggtcaacggcaaagaggtgcacagcggcgtgtctaccgacccccagccactgaaagaacagcccgccctgaacgacagccggtactgcctgagcagcagactgagagtgtccgccaccttctggcagaacccccggaaccacttcagatgccaggtgcagttctacggcctgagcgagaacgacgagtggacccaggacagagccaagcccgtgacccagatcgtgtctgccgaagcctggggcagagccgattgcggctttaccagcgagagctaccagcagggcgtgctgagcgccaccatcctgtacgagatcctgctgggcaaggccaccctgtacgccgtgctggtgtctgccctggtgctgatggctatggtcaagcggaaggacagccgggga

SEQ ID NO: 4790 - DNA, 1353 bp, Artificial Sequence; identical to SEQ ID NO: 4155
  Synthetic Polynucloetide

SEQ ID NO: 4791 - DNA, 852 bp, Artificial Sequence; identical to SEQ ID NO: 4156
  Synthetic Polynucloetide

SEQ ID NO: 4792 - DNA, 2307 bp, Artificial Sequence
  Synthetic Polynucloetide
atggccttaccagtgaccgccttgctcctgccgctggccttgctgctccacgccgccaggccgggcatgcggactgaagacctcccaaaggctgtggtgttcctggagcctcaatggtacagggtgctggagaaggacagtgtgactctgaagtgccagggagcctactcccctgaggacaattccacacagtggtttcacaatgagagcctcatctcaagccaggcctccagctacttcattgacgctgccacagtggacgacagtggagagtacaggtgccagacaaacctctccaccctcagtgacccggtgcagctagaagtccatatcggctggctgttgctccaggcccctcggtgggtgttcaaggaggaagaccctattcacctgaggtgtcacagctggaagaacactgctctgcataaggtcacatatttacagaatggcaaaggcaggaagtattttcatcataattctgacttctacattccaaaagccacactcaaagacagcggctcctacttctgcagggggcttgttgggagtaaaaatgtgtcttcagagactgtgaacatcaccatcactcaaggtttggcagtgtcaaccatctcatcattctttccacctggctaccaaggtaccggcggaggcggatctggcggcggaggtagcggtggcggaggatctgaattcgacatccagatgacacagagccctagcagcctgtctgccagcgtgggagacagagtgaccatcacatgcaaggccagcgaccacatcaacaactggctggcctggtatcagcagaagcctggacaggcccctaagctgctgatctacggcgctaccacactggaaacaggcgtgcccagcagattttctggcagcggctctggcaccgactacaccctgacaatatccagcctccagcctgaggacttcgccacctactactgtcagcagagctggaacaccccttggacattcggccagggcaccaagctggaaatcaagagactcgaggggaaaccaattcccaaccctcttctgggactggattcaaccggcagcggcgaggacctgaagaacgtgttcccacctgaggtggccgtgttcgagcctagcgaggccgagatcagccacacccagaaagccaccctcgtgtgcctggctaccggcttctaccccgaccatgtggaactgtcttggtgggtcaacggcaaagaggtgcacagcggcgtgtgtaccgacccccagccactgaaagaacagcccgccctgaacgacagccggtactgcctgagcagcagactgagagtgtccgccaccttctggcagaacccccggaaccacttcagatgccaggtgcagttctacggcctgagcgagaacgacgagtggacccaggacagagccaagcccgtgacccagatcgtgtctgccgaagcctggggcagagccgattgcggctttaccagcgagagctaccagcagggcgtgctgagcgccaccatcctgtacgagatcctgctgggcaaggccaccctgtacgccgtgctggtgtctgccctggtgctgatggctatggtcaagcggaaggacagccggggaagggccaagcgatctggatctggagcaacaaacttctcactactcaaacaagcaggtgacgtggaggagaatcccgggcctactagaggccatatgaccgagtacaagcccacggtgcgcctcgccacccgcgacgacgtccccagggccgtacgcaccctcgccgccgcgttcgccgactaccccgccacgcgccacaccgtcgatccggaccgccacatcgagcgggtcaccgagctgcaagaactcttcctcacgcgcgtcgggctcgacatcggcaaggtgtgggtcgcggacgacggcgccgcggtggcggtctggaccacgccggagagcgtcgaagcgggggcggtgttcgccgagatcggcccgcgcatggccgagttgagcggttcccggctggccgcgcagcaacagatggaaggcctcctggcgccgcaccggcccaaggagcccgcgtggttcctggccaccgtcggcgtctcgcccgaccaccagggcaagggtctgggcagcgccgtcgtgctccccggagtggaggcggccgagcgcgccggggtgcccgccttcctggagacctccgcgccccgcaacctccccttctacgagcggctcggcttcaccgtcaccgccgacgtcgaggtgcccgaaggaccgcgcacctggtgcatgacccgcaagcccggtgcctga

SEQ ID NO: 4793 - DNA, 1617 bp, Artificial Sequence
  Synthetic Polynucloetide
atggccttaccagtgaccgccttgctcctgccgctggccttgctgctccacgccgccaggccgggcatgcggactgaagacctcccaaaggctgtggtgttcctggagcctcaatggtacagggtgctggagaaggacagtgtgactctgaagtgccagggagcctactcccctgaggacaattccacacagtggtttcacaatgagagcctcatctcaagccaggcctccagctacttcattgacgctgccacagtggacgacagtggagagtacaggtgccagacaaacctctccaccctcagtgacccggtgcagctagaagtccatatcggctggctgttgctccaggcccctcggtgggtgttcaaggaggaagaccctattcacctgaggtgtcacagctggaagaacactgctctgcataaggtcacatatttacagaatggcaaaggcaggaagtattttcatcataattctgacttctacattccaaaagccacactcaaagacagcggctcctacttctgcagggggcttgttgggagtaaaaatgtgtcttcagagactgtgaacatcaccatcactcaaggtttggcagtgtcaaccatctcatcattctttccacctggctaccaaggtaccggcggaggcggatctggcggcggaggtagcggtggcggaggatctgaattcgacatccagatgacacagagccctagcagcctgtctgccagcgtgggagacagagtgaccatcacatgcaaggccagcgaccacatcaacaactggctggcctggtatcagcagaagcctggacaggcccctaagctgctgatctacggcgctaccacactggaaacaggcgtgcccagcagattttctggcagcggctctggcaccgactacaccctgacaatatccagcctccagcctgaggacttcgccacctactactgtcagcagagctggaacaccccttggacattcggccagggcaccaagctggaaatcaagagactcgaggggaaaccaattcccaaccctcttctgggactggattcaaccggcagcggcgaggacctgaagaacgtgttcccacctgaggtggccgtgttcgagcctagcgaggccgagatcagccacacccagaaagccaccctcgtgtgcctggctaccggcttctaccccgaccatgtggaactgtcttggtgggtcaacggcaaagaggtgcacagcggcgtgtgtaccgacccccagccactgaaagaacagcccgccctgaacgacagccggtactgcctgagcagcagactgagagtgtccgccaccttctggcagaacccccggaaccacttcagatgccaggtgcagttctacggcctgagcgagaacgacgagtggacccaggacagagccaagcccgtgacccagatcgtgtctgccgaagcctggggcagagccgattgcggctttaccagcgagagctaccagcagggcgtgctgagcgccaccatcctgtacgagatcctgctgggcaaggccaccctgtacgccgtgctggtgtctgccctggtgctgatggctatggtcaagcggaaggacagccggggatga

SEQ ID NO: 4794 - DNA, 1389 bp, Artificial Sequence; identical to SEQ ID NO: 4159
  Synthetic Polynucloetide

SEQ ID NO: 4795 - DNA, 891 bp, Artificial Sequence; identical to SEQ ID NO: 4160
  Synthetic Polynucloetide

SEQ ID NO: 4796 - DNA, 2565 bp, Artificial Sequence
  Synthetic Polynucloetide
atggccttaccagtgaccgccttgctcctgccgctggccttgctgctccacgccgccaggccgggcatgcggactgaagacctcccaaaggctgtggtgttcctggagcctcaatggtacagggtgctggagaaggacagtgtgactctgaagtgccagggagcctactcccctgaggacaattccacacagtggtttcacaatgagagcctcatctcaagccaggcctccagctacttcattgacgctgccacagtggacgacagtggagagtacaggtgccagacaaacctctccaccctcagtgacccggtgcagctagaagtccatatcggctggctgttgctccaggcccctcggtgggtgttcaaggaggaagaccctattcacctgaggtgtcacagctggaagaacactgctctgcataaggtcacatatttacagaatggcaaaggcaggaagtattttcatcataattctgacttctacattccaaaagccacactcaaagacagcggctcctacttctgcagggggcttgttgggagtaaaaatgtgtcttcagagactgtgaacatcaccatcactcaaggtttggcagtgtcaaccatctcatcattctttccacctggctaccaaggtaccggcggaggcggatctggcggcggaggtagcggtggcggaggatctgaattcgacatccagatgacacagagccctagcagcctgtctgccagcgtgggagacagagtgaccatcacatgcaaggccagcgaccacatcaacaactggctggcctggtatcagcagaagcctggacaggcccctaagctgctgatctacggcgctaccacactggaaacaggcgtgcccagcagattttctggcagcggctctggcaccgactacaccctgacaatatccagcctccagcctgaggacttcgccacctactactgtcagcagagctggaacaccccttggacattcggccagggcaccaagctggaaatcaagagaggcggaggcggaagtggaggcggaggatctggcggcggaggctctcaagttcagcttcaacagcctggcgctgagctggtcaaacctggcgcttctgtgaagatgagctgcaaagccagcggctacgccttcagcagctactggatcaactggatgaagcagaaacccggccagggactcgaatggatcggccaaatctatcccggcgacggcgacaccaactacaacggcaagttcaagggcagagccacactgaccgccgatacctctagcagcacagcctacatgcagctgagcagcctgaccagcgaagatagcgccgtgtacttctgtgcccggtccatcacaacagtcgtgggctgcgctatggactattggggccagggaacaagcgtgaccgtgtctagtacgcgtgggagcggcatccagaaccctgatcctgccgtgtaccagctgcgggatagcaagagcagcgacaagagcgtgtgtctgttcaccgacttcgacagccagaccaacgtgtcccagagcaaggactccgacgtgtacatcaccgataagaccgtgctggacatgcggagcatggacttcaagagcaactccgccgtggcctggtccaacaagtccgatttcgcctgcgccaacgccttcaacaacagcattatccccgaggacacattcttcccaagcagcgacgtgccctgcgacgtgaagctggtggaaaagagcttcgagacagacaccaacctgaacttccagaacctgagcgtgatcggcttcagaatcctgctgctgaaagtggccggctttaacctgctgatgaccctgcggctgtggtccagccgcgccaagagaagcggatctggcgtgaagcagaccctgaatttcgacctgctgaagctggctggcgacgtggaatccaacccaggcccttctagaggccatatgaccgagtacaagcccacggtgcgcctcgccacccgcgacgacgtccccagggccgtacgcaccctcgccgccgcgttcgccgactaccccgccacgcgccacaccgtcgatccggaccgccacatcgagcgggtcaccgagctgcaagaactcttcctcacgcgcgtcgggctcgacatcggcaaggtgtgggtcgcggacgacggcgccgcggtggcggtctggaccacgccggagagcgtcgaagcgggggcggtgttcgccgagatcggcccgcgcatggccgagttgagcggttcccggctggccgcgcagcaacagatggaaggcctcctggcgccgcaccggcccaaggagcccgcgtggttcctggccaccgtcggcgtctcgcccgaccaccagggcaagggtctgggcagcgccgtcgtgctccccggagtggaggcggccgagcgcgccggggtgcccgccttcctggagacctccgcgccccgcaacctccccttctacgagcggctcggcttcaccgtcaccgccgacgtcgaggtgcccgaaggaccgcgcacctggtgcatgacccgcaagcccggtgcctga

SEQ ID NO: 4797 - DNA, 2661 bp, Artificial Sequence
  Synthetic Polynucloetide
atggccttaccagtgaccgccttgctcctgccgctggccttgctgctccacgccgccaggccgggcatgcggactgaagacctcccaaaggctgtggtgttcctggagcctcaatggtacagggtgctggagaaggacagtgtgactctgaagtgccagggagcctactcccctgaggacaattccacacagtggtttcacaatgagagcctcatctcaagccaggcctccagctacttcattgacgctgccacagtggacgacagtggagagtacaggtgccagacaaacctctccaccctcagtgacccggtgcagctagaagtccatatcggctggctgttgctccaggcccctcggtgggtgttcaaggaggaagaccctattcacctgaggtgtcacagctggaagaacactgctctgcataaggtcacatatttacagaatggcaaaggcaggaagtattttcatcataattctgacttctacattccaaaagccacactcaaagacagcggctcctacttctgcagggggcttgttgggagtaaaaatgtgtcttcagagactgtgaacatcaccatcactcaaggtttggcagtgtcaaccatctcatcattctttccacctggctaccaaggtaccggcggaggcggatctggcggcggaggtagcggtggcggaggatctgaattcgacatccagatgacacagagccctagcagcctgtctgccagcgtgggagacagagtgaccatcacatgcaaggccagcgaccacatcaacaactggctggcctggtatcagcagaagcctggacaggcccctaagctgctgatctacggcgctaccacactggaaacaggcgtgcccagcagattttctggcagcggctctggcaccgactacaccctgacaatatccagcctccagcctgaggacttcgccacctactactgtcagcagagctggaacaccccttggacattcggccagggcaccaagctggaaatcaagagaggcggaggcggaagtggaggcggaggatctggcggcggaggctctcaagttcagcttcaacagcctggcgctgagctggtcaaacctggcgcttctgtgaagatgagctgcaaagccagcggctacgccttcagcagctactggatcaactggatgaagcagaaacccggccagggactcgaatggatcggccaaatctatcccggcgacggcgacaccaactacaacggcaagttcaagggcagagccacactgaccgccgatacctctagcagcacagcctacatgcagctgagcagcctgaccagcgaagatagcgccgtgtacttctgtgcccggtccatcacaacagtcgtgggctgcgctatggactattggggccagggaacaagcgtgaccgtgtctagtctcgaggacctgaagaacgtgttcccacctgaggtggccgtgttcgagcctagcaaggccgagatcgcccacacccagaaagccaccctcgtgtgcctggctaccggcttctaccccgaccatgtggaactgtcttggtgggtcaacggcaaagaggtgcacagcggcgtgtctaccgacccccagccactgaaagaacagcccgccctgaacgacagccggtactgcctgagcagcagactgagagtgtccgccaccttctggcagaacccccggaaccacttcagatgccaggtgcagttctacggcctgagcgagaacgacgagtggacccaggacagagccaagcccgtgacccagatcgtgtctgccgaagcctggggcagagccgattgcggcatcaccagcgccagctaccaccagggcgtgctgagcgccaccatcctgtacgagatcctgctgggcaaggccaccctgtacgccgtgctggtgtctgccctggtgctgatggctatggtcaagcggaaggacagccggggaagggccaagcgatctggatctggagcaacaaacttctcactactcaaacaagcaggtgacgtggaggagaatcccgggcctactagaggccatatgaccgagtacaagcccacggtgcgcctcgccacccgcgacgacgtccccagggccgtacgcaccctcgccgccgcgttcgccgactaccccgccacgcgccacaccgtcgatccggaccgccacatcgagcgggtcaccgagctgcaagaactcttcctcacgcgcgtcgggctcgacatcggcaaggtgtgggtcgcggacgacggcgccgcggtggcggtctggaccacgccggagagcgtcgaagcgggggcggtgttcgccgagatcggcccgcgcatggccgagttgagcggttcccggctggccgcgcagcaacagatggaaggcctcctggcgccgcaccggcccaaggagcccgcgtggttcctggccaccgtcggcgtctcgcccgaccaccagggcaagggtctgggcagcgccgtcgtgctccccggagtggaggcggccgagcgcgccggggtgcccgccttcctggagacctccgcgccccgcaacctccccttctacgagcggctcggcttcaccgtcaccgccgacgtcgaggtgcccgaaggaccgcgcacctggtgcatgacccgcaagcccggtgcctga

SEQ ID NO: 4798 - DNA, 3615 bp, Artificial Sequence
  Synthetic Polynucloetide
atggccttaccagtgaccgccttgctcctgccgctggccttgctgctccacgccgccaggccgggcatgcggactgaagacctcccaaaggctgtggtgttcctggagcctcaatggtacagggtgctggagaaggacagtgtgactctgaagtgccagggagcctactcccctgaggacaattccacacagtggtttcacaatgagagcctcatctcaagccaggcctccagctacttcattgacgctgccacagtggacgacagtggagagtacaggtgccagacaaacctctccaccctcagtgacccggtgcagctagaagtccatatcggctggctgttgctccaggcccctcggtgggtgttcaaggaggaagaccctattcacctgaggtgtcacagctggaagaacactgctctgcataaggtcacatatttacagaatggcaaaggcaggaagtattttcatcataattctgacttctacattccaaaagccacactcaaagacagcggctcctacttctgcagggggcttgttgggagtaaaaatgtgtcttcagagactgtgaacatcaccatcactcaaggtttggcagtgtcaaccatctcatcattctttccacctggctaccaaggtaccggcggaggcggatctggcggcggaggtagcggtggcggaggatctgaattcgacatccagatgacacagagccctagcagcctgtctgccagcgtgggagacagagtgaccatcacatgcaaggccagcgaccacatcaacaactggctggcctggtatcagcagaagcctggacaggcccctaagctgctgatctacggcgctaccacactggaaacaggcgtgcccagcagattttctggcagcggctctggcaccgactacaccctgacaatatccagcctccagcctgaggacttcgccacctactactgtcagcagagctggaacaccccttggacattcggccagggcaccaagctggaaatcaagagactcgagatccagaaccctgatcctgccgtgtaccagctgcgggatagcaagagcagcgacaagagcgtgtgtctgttcaccgacttcgacagccagaccaacgtgtcccagagcaaggactccgacgtgtacatcaccgataagtgcgtgctggacatgcggagcatggacttcaagagcaactccgccgtggcctggtccaacaagtccgatttcgcctgcgccaacgccttcaacaacagcattatccccgaggacacattcttcccaagcagcgacgtgccctgcgacgtgaagctggtggaaaagagcttcgagacagacaccaacctgaacttccagaacctgagcgtgatcggcttcagaatcctgctgctgaaagtggccggctttaacctgctgatgaccctgcggctgtggtccagccgcgccaagagaagcggatctggcgtgaagcagaccctgaatttcgacctgctgaagctggctggcgacgtggaatccaacccaggccctactagtatggactggatttggcgcatccttttccttgtcggcgctgctaccggcgcccattccgggccccaggttcagctgcaagagtctggcggaggacttgctcaagctggcggaagcctgagactgtcttgtgccgcctctggcagaaccttcagcatgggctggtttagacaggcccctggcaaagagagagagttcgtcgccgccatcacatacagcggcggcagcccttactacgcctcttctgtcagaggccggttcaccatcagccgggacaacgccaagaacaccgtgtacctccagatgaacagcctgaagccagaggacaccgccgtgtactactgtgccgccaatccaacctacggcagcgactggaatgccgagaattggggccagggcacccaagtgacagtgtctagtggatccggcggcggaggatctggcggaggcggatctgggggcggaggctctttcgaacaagttcagcttcaacagcctggcgctgagctggtcaaacctggcgcttctgtgaagatgagctgcaaagccagcggctacgccttcagcagctactggatcaactggatgaagcagaaacccggccagggactcgaatggatcggccaaatctatcccggcgacggcgacaccaactacaacggcaagttcaagggcagagccacactgaccgccgatacctctagcagcacagcctacatgcagctgagcagcctgaccagcgaagatagcgccgtgtacttctgtgcccggtccatcacaacagtcgtgggctgcgctatggactattggggccagggaacaagcgtgaccgtgtctagtacgcgtgaggacctgaagaacgtgttcccacctgaggtggccgtgttcgagcctagcaaggccgagatcgcccacacccagaaagccaccctcgtgtgcctggctaccggcttctaccccgaccatgtggaactgtcttggtgggtcaacggcaaagaggtgcacagcggcgtgtgtaccgacccccagccactgaaagaacagcccgccctgaacgacagccggtactgcctgagcagcagactgagagtgtccgccaccttctggcagaacccccggaaccacttcagatgccaggtgcagttctacggcctgagcgagaacgacgagtggacccaggacagagccaagcccgtgacccagatcgtgtctgccgaagcctggggcagagccgattgcggcatcaccagcgccagctaccaccagggcgtgctgagcgccaccatcctgtacgagatcctgctgggcaaggccaccctgtacgccgtgctggtgtctgccctggtgctgatggctatggtcaagcggaaggacagccggggaagggccaagcgatctggatctggagcaacaaacttctcactactcaaacaagcaggtgacgtggaggagaatcccgggccttctagaggccatatgaccgagtacaagcccacggtgcgcctcgccacccgcgacgacgtccccagggccgtacgcaccctcgccgccgcgttcgccgactaccccgccacgcgccacaccgtcgatccggaccgccacatcgagcgggtcaccgagctgcaagaactcttcctcacgcgcgtcgggctcgacatcggcaaggtgtgggtcgcggacgacggcgccgcggtggcggtctggaccacgccggagagcgtcgaagcgggggcggtgttcgccgagatcggcccgcgcatggccgagttgagcggttcccggctggccgcgcagcaacagatggaaggcctcctggcgccgcaccggcccaaggagcccgcgtggttcctggccaccgtcggcgtctcgcccgaccaccagggcaagggtctgggcagcgccgtcgtgctccccggagtggaggcggccgagcgcgccggggtgcccgccttcctggagacctccgcgccccgcaacctccccttctacgagcggctcggcttcaccgtcaccgccgacgtcgaggtgcccgaaggaccgcgcacctggtgcatgacccgcaagcccggtgcctga

SEQ ID NO: 4799 - DNA, 3612 bp, Artificial Sequence
  Synthetic Polynucloetide
atggccttaccagtgaccgccttgctcctgccgctggccttgctgctccacgccgccaggccgggcatgcggactgaagacctcccaaaggctgtggtgttcctggagcctcaatggtacagggtgctggagaaggacagtgtgactctgaagtgccagggagcctactcccctgaggacaattccacacagtggtttcacaatgagagcctcatctcaagccaggcctccagctacttcattgacgctgccacagtggacgacagtggagagtacaggtgccagacaaacctctccaccctcagtgacccggtgcagctagaagtccatatcggctggctgttgctccaggcccctcggtgggtgttcaaggaggaagaccctattcacctgaggtgtcacagctggaagaacactgctctgcataaggtcacatatttacagaatggcaaaggcaggaagtattttcatcataattctgacttctacattccaaaagccacactcaaagacagcggctcctacttctgcagggggcttgttgggagtaaaaatgtgtcttcagagactgtgaacatcaccatcactcaaggtttggcagtgtcaaccatctcatcattctttccacctggctaccaaggtaccggcggaggcggatctggcggcggaggtagcggtggcggaggatctgaattcgacatccagatgacacagagccctagcagcctgtctgccagcgtgggagacagagtgaccatcacatgcaaggccagcgaccacatcaacaactggctggcctggtatcagcagaagcctggacaggcccctaagctgctgatctacggcgctaccacactggaaacaggcgtgcccagcagattttctggcagcggctctggcaccgactacaccctgacaatatccagcctccagcctgaggacttcgccacctactactgtcagcagagctggaacaccccttggacattcggccagggcaccaagctggaaatcaagagactcgaggacctgaagaacgtgttcccacctgaggtggccgtgttcgagcctagcaaggccgagatcgcccacacccagaaagccaccctcgtgtgcctggctaccggcttctaccccgaccatgtggaactgtcttggtgggtcaacggcaaagaggtgcacagcggcgtgtgtaccgacccccagccactgaaagaacagcccgccctgaacgacagccggtactgcctgagcagcagactgagagtgtccgccaccttctggcagaacccccggaaccacttcagatgccaggtgcagttctacggcctgagcgagaacgacgagtggacccaggacagagccaagcccgtgacccagatcgtgtctgccgaagcctggggcagagccgattgcggcatcaccagcgccagctaccaccagggcgtgctgagcgccaccatcctgtacgagatcctgctgggcaaggccaccctgtacgccgtgctggtgtctgccctggtgctgatggctatggtcaagcggaaggacagccggggaagggccaagcgatctggatctggagcaacaaacttctcactactcaaacaagcaggtgacgtggaggagaatcccgggcctactagtatggactggatttggcgcatccttttccttgtcggcgctgctaccggcgcccattccgggccccaggttcagctgcaagagtctggcggaggacttgctcaagctggcggaagcctgagactgtcttgtgccgcctctggcagaaccttcagcatgggctggtttagacaggcccctggcaaagagagagagttcgtcgccgccatcacatacagcggcggcagcccttactacgcctcttctgtcagaggccggttcaccatcagccgggacaacgccaagaacaccgtgtacctccagatgaacagcctgaagccagaggacaccgccgtgtactactgtgccgccaatccaacctacggcagcgactggaatgccgagaattggggccagggcacccaagtgacagtgtctagtggatccggcggcggaggatctggcggaggcggatctgggggcggaggctctttcgaacaagttcagcttcaacagcctggcgctgagctggtcaaacctggcgcttctgtgaagatgagctgcaaagccagcggctacgccttcagcagctactggatcaactggatgaagcagaaacccggccagggactcgaatggatcggccaaatctatcccggcgacggcgacaccaactacaacggcaagttcaagggcagagccacactgaccgccgatacctctagcagcacagcctacatgcagctgagcagcctgaccagcgaagatagcgccgtgtacttctgtgcccggtccatcacaacagtcgtgggctgcgctatggactattggggccagggaacaagcgtgaccgtgtctagtacgcgtatccagaaccctgatcctgccgtgtaccagctgcgggatagcaagagcagcgacaagagcgtgtgtctgttcaccgacttcgacagccagaccaacgtgtcccagagcaaggactccgacgtgtacatcaccgataagtgcgtgctggacatgcggagcatggacttcaagagcaactccgccgtggcctggtccaacaagtccgatttcgcctgcgccaacgccttcaacaacagcattatccccgaggacacattcttcccaagcagcgacgtgccctgcgacgtgaagctggtggaaaagagcttcgagacagacaccaacctgaacttccagaacctgagcgtgatcggcttcagaatcctgctgctgaaagtggccggctttaacctgctgatgaccctgcggctgtggtccagccgcgccaagagaagcggatctggcgtgaagcagaccctgaatttcgacctgctgaagctggctggcgacgtggaatccaacccaggcccttctagaggccatatgaccgagtacaagcccacggtgcgcctcgccacccgcgacgacgtccccagggccgtacgcaccctcgccgccgcgttcgccgactaccccgccacgcgccacaccgtcgatccggaccgccacatcgagcgggtcaccgagctgcaagaactcttcctcacgcgcgtcgggctcgacatcggcaaggtgtgggtcgcggacgacggcgccgcggtggcggtctggaccacgccggagagcgtcgaagcgggggcggtgttcgccgagatcggcccgcgcatggccgagttgagcggttcccggctggccgcgcagcaacagatggaaggcctcctggcgccgcaccggcccaaggagcccgcgtggttcctggccaccgtcggcgtctcgcccgaccaccagggcaagggtctgggcagcgccgtcgtgctccccggagtggaggcggccgagcgcgccggggtgcccgccttcctggagacctccgcgccccgcaacctccccttctacgagcggctcggcttcaccgtcaccgccgacgtcgaggtgcccgaaggaccgcgcacctggtgcatgacccgcaagcccggtgcctga

SEQ ID NO: 4800 - DNA, 3612 bp, Artificial Sequence
  Synthetic Polynucloetide
atggccttaccagtgaccgccttgctcctgccgctggccttgctgctccacgccgccaggccgggcatgcggactgaagacctcccaaaggctgtggtgttcctggagcctcaatggtacagggtgctggagaaggacagtgtgactctgaagtgccagggagcctactcccctgaggacaattccacacagtggtttcacaatgagagcctcatctcaagccaggcctccagctacttcattgacgctgccacagtggacgacagtggagagtacaggtgccagacaaacctctccaccctcagtgacccggtgcagctagaagtccatatcggctggctgttgctccaggcccctcggtgggtgttcaaggaggaagaccctattcacctgaggtgtcacagctggaagaacactgctctgcataaggtcacatatttacagaatggcaaaggcaggaagtattttcatcataattctgacttctacattccaaaagccacactcaaagacagcggctcctacttctgcagggggcttgttgggagtaaaaatgtgtcttcagagactgtgaacatcaccatcactcaaggtttggcagtgtcaaccatctcatcattctttccacctggctaccaaggtaccggcggaggcggatctggcggcggaggtagcggtggcggaggatctgaattcgacatccagatgacacagagccctagcagcctgtctgccagcgtgggagacagagtgaccatcacatgcaaggccagcgaccacatcaacaactggctggcctggtatcagcagaagcctggacaggcccctaagctgctgatctacggcgctaccacactggaaacaggcgtgcccagcagattttctggcagcggctctggcaccgactacaccctgacaatatccagcctccagcctgaggacttcgccacctactactgtcagcagagctggaacaccccttggacattcggccagggcaccaagctggaaatcaagagactcgaggacctgaagaacgtgttcccacctgaggtggccgtgttcgagcctagcgaggccgagatcagccacacccagaaagccaccctcgtgtgcctggctaccggcttctaccccgaccatgtggaactgtcttggtgggtcaacggcaaagaggtgcacagcggcgtgtgtaccgacccccagccactgaaagaacagcccgccctgaacgacagccggtactgcctgagcagcagactgagagtgtccgccaccttctggcagaacccccggaaccacttcagatgccaggtgcagttctacggcctgagcgagaacgacgagtggacccaggacagagccaagcccgtgacccagatcgtgtctgccgaagcctggggcagagccgattgcggctttaccagcgagagctaccagcagggcgtgctgagcgccaccatcctgtacgagatcctgctgggcaaggccaccctgtacgccgtgctggtgtctgccctggtgctgatggctatggtcaagcggaaggacagccggggaagggccaagcgatctggatctggagcaacaaacttctcactactcaaacaagcaggtgacgtggaggagaatcccgggcctactagtatggactggatttggcgcatccttttccttgtcggcgctgctaccggcgcccattccgggccccaggttcagctgcaagagtctggcggaggacttgctcaagctggcggaagcctgagactgtcttgtgccgcctctggcagaaccttcagcatgggctggtttagacaggcccctggcaaagagagagagttcgtcgccgccatcacatacagcggcggcagcccttactacgcctcttctgtcagaggccggttcaccatcagccgggacaacgccaagaacaccgtgtacctccagatgaacagcctgaagccagaggacaccgccgtgtactactgtgccgccaatccaacctacggcagcgactggaatgccgagaattggggccagggcacccaagtgacagtgtctagtggatccggcggcggaggatctggcggaggcggatctgggggcggaggctctttcgaacaagttcagcttcaacagcctggcgctgagctggtcaaacctggcgcttctgtgaagatgagctgcaaagccagcggctacgccttcagcagctactggatcaactggatgaagcagaaacccggccagggactcgaatggatcggccaaatctatcccggcgacggcgacaccaactacaacggcaagttcaagggcagagccacactgaccgccgatacctctagcagcacagcctacatgcagctgagcagcctgaccagcgaagatagcgccgtgtacttctgtgcccggtccatcacaacagtcgtgggctgcgctatggactattggggccagggaacaagcgtgaccgtgtctagtacgcgtatccagaaccctgatcctgccgtgtaccagctgcgggatagcaagagcagcgacaagagcgtgtgtctgttcaccgacttcgacagccagaccaacgtgtcccagagcaaggactccgacgtgtacatcaccgataagtgcgtgctggacatgcggagcatggacttcaagagcaactccgccgtggcctggtccaacaagtccgatttcgcctgcgccaacgccttcaacaacagcattatccccgaggacacattcttcccaagccccgagagcagctgcgacgtgaagctggtggaaaagagcttcgagacagacaccaacctgaacttccagaacctgagcgtgatcggcttcagaatcctgctgctgaaagtggccggctttaacctgctgatgaccctgcggctgtggtccagccgcgccaagagaagcggatctggcgtgaagcagaccctgaatttcgacctgctgaagctggctggcgacgtggaatccaacccaggcccttctagaggccatatgaccgagtacaagcccacggtgcgcctcgccacccgcgacgacgtccccagggccgtacgcaccctcgccgccgcgttcgccgactaccccgccacgcgccacaccgtcgatccggaccgccacatcgagcgggtcaccgagctgcaagaactcttcctcacgcgcgtcgggctcgacatcggcaaggtgtgggtcgcggacgacggcgccgcggtggcggtctggaccacgccggagagcgtcgaagcgggggcggtgttcgccgagatcggcccgcgcatggccgagttgagcggttcccggctggccgcgcagcaacagatggaaggcctcctggcgccgcaccggcccaaggagcccgcgtggttcctggccaccgtcggcgtctcgcccgaccaccagggcaagggtctgggcagcgccgtcgtgctccccggagtggaggcggccgagcgcgccggggtgcccgccttcctggagacctccgcgccccgcaacctccccttctacgagcggctcggcttcaccgtcaccgccgacgtcgaggtgcccgaaggaccgcgcacctggtgcatgacccgcaagcccggtgcctga

SEQ ID NO: 4801 - DNA, 2910 bp, Artificial Sequence
  Synthetic Polynucloetide
atggccttaccagtgaccgccttgctcctgccgctggccttgctgctccacgccgccaggccgggcatgcggactgaagacctcccaaaggctgtggtgttcctggagcctcaatggtacagggtgctggagaaggacagtgtgactctgaagtgccagggagcctactcccctgaggacaattccacacagtggtttcacaatgagagcctcatctcaagccaggcctccagctacttcattgacgctgccacagtggacgacagtggagagtacaggtgccagacaaacctctccaccctcagtgacccggtgcagctagaagtccatatcggctggctgttgctccaggcccctcggtgggtgttcaaggaggaagaccctattcacctgaggtgtcacagctggaagaacactgctctgcataaggtcacatatttacagaatggcaaaggcaggaagtattttcatcataattctgacttctacattccaaaagccacactcaaagacagcggctcctacttctgcagggggcttgttgggagtaaaaatgtgtcttcagagactgtgaacatcaccatcactcaaggtttggcagtgtcaaccatctcatcattctttccacctggctaccaaggtaccggcggaggcggatctggcggcggaggtagcggtggcggaggatctgaattcgacatccagatgacacagagccctagcagcctgtctgccagcgtgggagacagagtgaccatcacatgcaaggccagcgaccacatcaacaactggctggcctggtatcagcagaagcctggacaggcccctaagctgctgatctacggcgctaccacactggaaacaggcgtgcccagcagattttctggcagcggctctggcaccgactacaccctgacaatatccagcctccagcctgaggacttcgccacctactactgtcagcagagctggaacaccccttggacattcggccagggcaccaagctggaaatcaagagactcgaggacctgaagaacgtgttcccacctgaggtggccgtgttcgagcctagcgaggccgagatcagccacacccagaaagccaccctcgtgtgcctggctaccggcttctaccccgaccatgtggaactgtcttggtgggtcaacggcaaagaggtgcacagcggcgtgtgtaccgacccccagccactgaaagaacagcccgccctgaacgacagccggtactgcctgagcagcagactgagagtgtccgccaccttctggcagaacccccggaaccacttcagatgccaggtgcagttctacggcctgagcgagaacgacgagtggacccaggacagagccaagcccgtgacccagatcgtgtctgccgaagcctggggcagagccgattgcggctttaccagcgagagctaccagcagggcgtgctgagcgccaccatcctgtacgagatcctgctgggcaaggccaccctgtacgccgtgctggtgtctgccctggtgctgatggctatggtcaagcggaaggacagccggggaagggccaagcgatctggatctggagcaacaaacttctcactactcaaacaagcaggtgacgtggaggagaatcccgggcctactagtatggactggatttggcgcatccttttccttgtcggcgctgctaccggcgcccattccgggccccaggttcagctgcaagagtctggcggaggacttgctcaagctggcggaagcctgagactgtcttgtgccgcctctggcagaaccttcagcatgggctggtttagacaggcccctggcaaagagagagagttcgtcgccgccatcacatacagcggcggcagcccttactacgcctcttctgtcagaggccggttcaccatcagccgggacaacgccaagaacaccgtgtacctccagatgaacagcctgaagccagaggacaccgccgtgtactactgtgccgccaatccaacctacggcagcgactggaatgccgagaattggggccagggcacccaagtgacagtgtctagtggatccggcggcggaggatctggcggaggcggatctgggggcggaggctctttcgaacaagttcagcttcaacagcctggcgctgagctggtcaaacctggcgcttctgtgaagatgagctgcaaagccagcggctacgccttcagcagctactggatcaactggatgaagcagaaacccggccagggactcgaatggatcggccaaatctatcccggcgacggcgacaccaactacaacggcaagttcaagggcagagccacactgaccgccgatacctctagcagcacagcctacatgcagctgagcagcctgaccagcgaagatagcgccgtgtacttctgtgcccggtccatcacaacagtcgtgggctgcgctatggactattggggccagggaacaagcgtgaccgtgtctagtacgcgtatccagaaccctgatcctgccgtgtaccagctgcgggatagcaagagcagcgacaagagcgtgtgtctgttcaccgacttcgacagccagaccaacgtgtcccagagcaaggactccgacgtgtacatcaccgataagtgcgtgctggacatgcggagcatggacttcaagagcaactccgccgtggcctggtccaacaagtccgatttcgcctgcgccaacgccttcaacaacagcattatccccgaggacacattcttcccaagccccgagagcagctgcgacgtgaagctggtggaaaagagcttcgagacagacaccaacctgaacttccagaacctgagcgtgatcggcttcagaatcctgctgctgaaagtggccggctttaacctgctgatgaccctgcggctgtggtccagc

SEQ ID NO: 4802 - DNA, 3585 bp, Artificial Sequence
  Synthetic Polynucloetide
atggccttaccagtgaccgccttgctcctgccgctggccttgctgctccacgccgccaggccgggcatgcggactgaagacctcccaaaggctgtggtgttcctggagcctcaatggtacagggtgctggagaaggacagtgtgactctgaagtgccagggagcctactcccctgaggacaattccacacagtggtttcacaatgagagcctcatctcaagccaggcctccagctacttcattgacgctgccacagtggacgacagtggagagtacaggtgccagacaaacctctccaccctcagtgacccggtgcagctagaagtccatatcggctggctgttgctccaggcccctcggtgggtgttcaaggaggaagaccctattcacctgaggtgtcacagctggaagaacactgctctgcataaggtcacatatttacagaatggcaaaggcaggaagtattttcatcataattctgacttctacattccaaaagccacactcaaagacagcggctcctacttctgcagggggcttgttgggagtaaaaatgtgtcttcagagactgtgaacatcaccatcactcaaggtttggcagtgtcaaccatctcatcattctttccacctggctaccaaggtaccggcggaggcggatctggcggcggaggtagcggtggcggaggatctgaattcgacatccagatgacacagagccctagcagcctgtctgccagcgtgggagacagagtgaccatcacatgcaaggccagcgaccacatcaacaactggctggcctggtatcagcagaagcctggacaggcccctaagctgctgatctacggcgctaccacactggaaacaggcgtgcccagcagattttctggcagcggctctggcaccgactacaccctgacaatatccagcctccagcctgaggacttcgccacctactactgtcagcagagctggaacaccccttggacattcggccagggcaccaagctggaaatcaagagactcgaggacctgaagaacgtgttcccacctgaggtggccgtgttcgagcctagcgaggccgagatcagccacacccagaaagccaccctcgtgtgcctggctaccggcttctaccccgaccatgtggaactgtcttggtgggtcaacggcaaagaggtgcacagcggcgtgtgtaccgacccccagccactgaaagaacagcccgccctgaacgacagccggtactgcctgagcagcagactgagagtgtccgccaccttctggcagaacccccggaaccacttcagatgccaggtgcagttctacggcctgagcgagaacgacgagtggacccaggacagagccaagcccgtgacccagatcgtgtctgccgaagcctggggcagagccgattgcggctttaccagcgagagctaccagcagggcgtgctgagcgccaccatcctgtacgagatcctgctgggcaaggccaccctgtacgccgtgctggtgtctgccctggtgctgatggctatggtcaagcggaaggacagccggggaagggccaagcgatctggatctggagcaacaaacttctcactactcaaacaagcaggtgacgtggaggagaatcccgggcctactagtatggactggatttggcgcatccttttccttgtcggcgctgctaccggcgcccattccgggccccaggttcagctgcaagagtctggcggaggacttgctcaagctggcggaagcctgagactgtcttgtgccgcctctggcagaaccttcagcatgggctggtttagacaggcccctggcaaagagagagagttcgtcgccgccatcacatacagcggcggcagcccttactacgcctcttctgtcagaggccggttcaccatcagccgggacaacgccaagaacaccgtgtacctccagatgaacagcctgaagccagaggacaccgccgtgtactactgtgccgccaatccaacctacggcagcgactggaatgccgagaattggggccagggcacccaagtgacagtgtctagtggatccggcggcggaggatctggcggaggcggatctgggggcggaggctctttcgaacaagttcagcttcaacagcctggcgctgagctggtcaaacctggcgcttctgtgaagatgagctgcaaagccagcggctacgccttcagcagctactggatcaactggatgaagcagaaacccggccagggactcgaatggatcggccaaatctatcccggcgacggcgacaccaactacaacggcaagttcaagggcagagccacactgaccgccgatacctctagcagcacagcctacatgcagctgagcagcctgaccagcgaagatagcgccgtgtacttctgtgcccggtccatcacaacagtcgtgggctgcgctatggactattggggccagggaacaagcgtgaccgtgtctagtacgcgtatccagaaccctgatcctgccgtgtaccagctgcgggatagcaagagcagcgacaagagcgtgtgtctgttcaccgacttcgacagccagaccaacgtgtcccagagcaaggactccgacgtgtacatcaccgataagtgcgtgctggacatgcggagcatggacttcaagagcaactccgccgtggcctggtccaacaagtccgatttcgcctgcgccaacgccttcaacaacagcattatccccgaggacacattcttcccaagccccgagagcagctgcgacgtgaagctggtggaaaagagcttcgagacagacaccaacctgaacttccagaacctgagcgtgatcggcttcagaatcctgctgctgaaagtggccggctttaacctgctgatgaccctgcggctgtggtccagccgcgccaagagaagcggatctggcgtgaagcagaccctgaatttcgacctgctgaagctggctggcgacgtggaatccaacccaggcccttctagaggcgggatccacaccatggctacctacgaggtgctgtgcgaggtggcaagaaagctgggcaccgacgacagagaagtggtgctgttcctgctgaacgtgttcatccctcagcctacactggcccagctgatcggtgcactgagagccctgaaagaggaaggccggctgacctttcctctgctggccgaatgcctgttcagagccggaagaagggatctgctgcgggacctgctgcatctggaccccagatttctggaaagacacctggccggcaccatgagctacttcagcccttaccagctgaccgtgctgcacgttgacggcgaactgtgcgccagagatattcggagcctgatcttcctgagcaaggacaccatcggcagccggtctacccctcagacatttctgcactgggtgtactgcatggaaaacctggacctgctcggccccacagatgtggatgccctgatgtccatgctgagaagcctgagcagagtggacctccagagacaggtgcagacactgatgggactgcacctgagcggacctagccacagccagcactacagacacacccct

SEQ ID NO: 4803 - DNA, 2922 bp, Artificial Sequence
  Synthetic Polynucloetide
atggccttaccagtgaccgccttgctcctgccgctggccttgctgctccacgccgccaggccgggcatgcggactgaagacctcccaaaggctgtggtgttcctggagcctcaatggtacagggtgctggagaaggacagtgtgactctgaagtgccagggagcctactcccctgaggacaattccacacagtggtttcacaatgagagcctcatctcaagccaggcctccagctacttcattgacgctgccacagtggacgacagtggagagtacaggtgccagacaaacctctccaccctcagtgacccggtgcagctagaagtccatatcggctggctgttgctccaggcccctcggtgggtgttcaaggaggaagaccctattcacctgaggtgtcacagctggaagaacactgctctgcataaggtcacatatttacagaatggcaaaggcaggaagtattttcatcataattctgacttctacattccaaaagccacactcaaagacagcggctcctacttctgcagggggcttgttgggagtaaaaatgtgtcttcagagactgtgaacatcaccatcactcaaggtttggcagtgtcaaccatctcatcattctttccacctggctaccaaggtaccggcggaggcggatctggcggcggaggtagcggtggcggaggatctgaattcgacatccagatgacacagagccctagcagcctgtctgccagcgtgggagacagagtgaccatcacatgcaaggccagcgaccacatcaacaactggctggcctggtatcagcagaagcctggacaggcccctaagctgctgatctacggcgctaccacactggaaacaggcgtgcccagcagattttctggcagcggctctggcaccgactacaccctgacaatatccagcctccagcctgaggacttcgccacctactactgtcagcagagctggaacaccccttggacattcggccagggcaccaagctggaaatcaagagactcgagatccagaaccctgatcctgccgtgtaccagctgcgggatagcaagagcagcgacaagagcgtgtgtctgttcaccgacttcgacagccagaccaacgtgtcccagagcaaggactccgacgtgtacatcaccgataagtgcgtgctggacatgcggagcatggacttcaagagcaactccgccgtggcctggtccaacaagtccgatttcgcctgcgccaacgccttcaacaacagcattatccccgaggacacattcttcccaagccccgagagcagctgcgacgtgaagctggtggaaaagagcttcgagacagacaccaacctgaacttccagaacctgagcgtgatcggcttcagaatcctgctgctgaaagtggccggctttaacctgctgatgaccctgcggctgtggtccagccgcgccaagagaagcggatctggcgtgaagcagaccctgaatttcgacctgctgaagctggctggcgacgtggaatccaacccaggccctactagtatggactggatttggcgcatccttttccttgtcggcgctgctaccggcgcccattccgggccccaggttcagctgcaagagtctggcggaggacttgctcaagctggcggaagcctgagactgtcttgtgccgcctctggcagaaccttcagcatgggctggtttagacaggcccctggcaaagagagagagttcgtcgccgccatcacatacagcggcggcagcccttactacgcctcttctgtcagaggccggttcaccatcagccgggacaacgccaagaacaccgtgtacctccagatgaacagcctgaagccagaggacaccgccgtgtactactgtgccgccaatccaacctacggcagcgactggaatgccgagaattggggccagggcacccaagtgacagtgtctagtggatccggcggcggaggatctggcggaggcggatctgggggcggaggctctttcgaacaagttcagcttcaacagcctggcgctgagctggtcaaacctggcgcttctgtgaagatgagctgcaaagccagcggctacgccttcagcagctactggatcaactggatgaagcagaaacccggccagggactcgaatggatcggccaaatctatcccggcgacggcgacaccaactacaacggcaagttcaagggcagagccacactgaccgccgatacctctagcagcacagcctacatgcagctgagcagcctgaccagcgaagatagcgccgtgtacttctgtgcccggtccatcacaacagtcgtgggctgcgctatggactattggggccagggaacaagcgtgaccgtgtctagtacgcgtgaggacctgaagaacgtgttcccacctgaggtggccgtgttcgagcctagcgaggccgagatcagccacacccagaaagccaccctcgtgtgcctggctaccggcttctaccccgaccatgtggaactgtcttggtgggtcaacggcaaagaggtgcacagcggcgtgtgtaccgacccccagccactgaaagaacagcccgccctgaacgacagccggtactgcctgagcagcagactgagagtgtccgccaccttctggcagaacccccggaaccacttcagatgccaggtgcagttctacggcctgagcgagaacgacgagtggacccaggacagagccaagcccgtgacccagatcgtgtctgccgaagcctggggcagagccgattgcggctttaccagcgagagctaccagcagggcgtgctgagcgccaccatcctgtacgagatcctgctgggcaaggccaccctgtacgccgtgctggtgtctgccctggtgctgatggctatggtcaagcggaaggacagccgggga

SEQ ID NO: 4804 - DNA, 3588 bp, Artificial Sequence
  Synthetic Polynucloetide
atggccttaccagtgaccgccttgctcctgccgctggccttgctgctccacgccgccaggccgggcatgcggactgaagacctcccaaaggctgtggtgttcctggagcctcaatggtacagggtgctggagaaggacagtgtgactctgaagtgccagggagcctactcccctgaggacaattccacacagtggtttcacaatgagagcctcatctcaagccaggcctccagctacttcattgacgctgccacagtggacgacagtggagagtacaggtgccagacaaacctctccaccctcagtgacccggtgcagctagaagtccatatcggctggctgttgctccaggcccctcggtgggtgttcaaggaggaagaccctattcacctgaggtgtcacagctggaagaacactgctctgcataaggtcacatatttacagaatggcaaaggcaggaagtattttcatcataattctgacttctacattccaaaagccacactcaaagacagcggctcctacttctgcagggggcttgttgggagtaaaaatgtgtcttcagagactgtgaacatcaccatcactcaaggtttggcagtgtcaaccatctcatcattctttccacctggctaccaaggtaccggcggaggcggatctggcggcggaggtagcggtggcggaggatctgaattcgacatccagatgacacagagccctagcagcctgtctgccagcgtgggagacagagtgaccatcacatgcaaggccagcgaccacatcaacaactggctggcctggtatcagcagaagcctggacaggcccctaagctgctgatctacggcgctaccacactggaaacaggcgtgcccagcagattttctggcagcggctctggcaccgactacaccctgacaatatccagcctccagcctgaggacttcgccacctactactgtcagcagagctggaacaccccttggacattcggccagggcaccaagctggaaatcaagagactcgagatccagaaccctgatcctgccgtgtaccagctgcgggatagcaagagcagcgacaagagcgtgtgtctgttcaccgacttcgacagccagaccaacgtgtcccagagcaaggactccgacgtgtacatcaccgataagtgcgtgctggacatgcggagcatggacttcaagagcaactccgccgtggcctggtccaacaagtccgatttcgcctgcgccaacgccttcaacaacagcattatccccgaggacacattcttcccaagccccgagagcagctgcgacgtgaagctggtggaaaagagcttcgagacagacaccaacctgaacttccagaacctgagcgtgatcggcttcagaatcctgctgctgaaagtggccggctttaacctgctgatgaccctgcggctgtggtccagccgcgccaagagaagcggatctggcgtgaagcagaccctgaatttcgacctgctgaagctggctggcgacgtggaatccaacccaggccctactagtatggactggatttggcgcatccttttccttgtcggcgctgctaccggcgcccattccgggccccaggttcagctgcaagagtctggcggaggacttgctcaagctggcggaagcctgagactgtcttgtgccgcctctggcagaaccttcagcatgggctggtttagacaggcccctggcaaagagagagagttcgtcgccgccatcacatacagcggcggcagcccttactacgcctcttctgtcagaggccggttcaccatcagccgggacaacgccaagaacaccgtgtacctccagatgaacagcctgaagccagaggacaccgccgtgtactactgtgccgccaatccaacctacggcagcgactggaatgccgagaattggggccagggcacccaagtgacagtgtctagtggatccggcggcggaggatctggcggaggcggatctgggggcggaggctctttcgaacaagttcagcttcaacagcctggcgctgagctggtcaaacctggcgcttctgtgaagatgagctgcaaagccagcggctacgccttcagcagctactggatcaactggatgaagcagaaacccggccagggactcgaatggatcggccaaatctatcccggcgacggcgacaccaactacaacggcaagttcaagggcagagccacactgaccgccgatacctctagcagcacagcctacatgcagctgagcagcctgaccagcgaagatagcgccgtgtacttctgtgcccggtccatcacaacagtcgtgggctgcgctatggactattggggccagggaacaagcgtgaccgtgtctagtacgcgtgaggacctgaagaacgtgttcccacctgaggtggccgtgttcgagcctagcgaggccgagatcagccacacccagaaagccaccctcgtgtgcctggctaccggcttctaccccgaccatgtggaactgtcttggtgggtcaacggcaaagaggtgcacagcggcgtgtgtaccgacccccagccactgaaagaacagcccgccctgaacgacagccggtactgcctgagcagcagactgagagtgtccgccaccttctggcagaacccccggaaccacttcagatgccaggtgcagttctacggcctgagcgagaacgacgagtggacccaggacagagccaagcccgtgacccagatcgtgtctgccgaagcctggggcagagccgattgcggctttaccagcgagagctaccagcagggcgtgctgagcgccaccatcctgtacgagatcctgctgggcaaggccaccctgtacgccgtgctggtgtctgccctggtgctgatggctatggtcaagcggaaggacagccggggaagggccaagcgatctggatctggagcaacaaacttctcactactcaaacaagcaggtgacgtggaggagaatcccgggccttctagaggcgggatccacaccatggctacctacgaggtgctgtgcgaggtggcaagaaagctgggcaccgacgacagagaagtggtgctgttcctgctgaacgtgttcatccctcagcctacactggcccagctgatcggtgcactgagagccctgaaagaggaaggccggctgacctttcctctgctggccgaatgcctgttcagagccggaagaagggatctgctgcgggacctgctgcatctggaccccagatttctggaaagacacctggccggcaccatgagctacttcagcccttaccagctgaccgtgctgcacgttgacggcgaactgtgcgccagagatattcggagcctgatcttcctgagcaaggacaccatcggcagccggtctacccctcagacatttctgcactgggtgtactgcatggaaaacctggacctgctcggccccacagatgtggatgccctgatgtccatgctgagaagcctgagcagagtggacctccagagacaggtgcagacactgatgggactgcacctgagcggacctagccacagccagcactacagacacacccct

SEQ ID NO: 4805 - DNA, 3612 bp, Artificial Sequence
  Synthetic Polynucloetide
atggccttaccagtgaccgccttgctcctgccgctggccttgctgctccacgccgccaggccgggcatgcggactgaagacctcccaaaggctgtggtgttcctggagcctcaatggtacagggtgctggagaaggacagtgtgactctgaagtgccagggagcctactcccctgaggacaattccacacagtggtttcacaatgagagcctcatctcaagccaggcctccagctacttcattgacgctgccacagtggacgacagtggagagtacaggtgccagacaaacctctccaccctcagtgacccggtgcagctagaagtccatatcggctggctgttgctccaggcccctcggtgggtgttcaaggaggaagaccctattcacctgaggtgtcacagctggaagaacactgctctgcataaggtcacatatttacagaatggcaaaggcaggaagtattttcatcataattctgacttctacattccaaaagccacactcaaagacagcggctcctacttctgcagggggcttgttgggagtaaaaatgtgtcttcagagactgtgaacatcaccatcactcaaggtttggcagtgtcaaccatctcatcattctttccacctggctaccaaggtaccggcggaggcggatctggcggcggaggtagcggtggcggaggatctgaattcgacatccagatgacacagagccctagcagcctgtctgccagcgtgggagacagagtgaccatcacatgcaaggccagcgaccacatcaacaactggctggcctggtatcagcagaagcctggacaggcccctaagctgctgatctacggcgctaccacactggaaacaggcgtgcccagcagattttctggcagcggctctggcaccgactacaccctgacaatatccagcctccagcctgaggacttcgccacctactactgtcagcagagctggaacaccccttggacattcggccagggcaccaagctggaaatcaagagactcgaggacctgaagaacgtgttcccacctgaggtggccgtgttcgagcctagcgaggccgagatcagccacacccagaaagccaccctcgtgtgcctggctaccggcttctaccccgaccatgtggaactgtcttggtgggtcaacggcaaagaggtgcacagcggcgtgtctaccgacccccagccactgaaagaacagcccgccctgaacgacagccggtactgcctgagcagcagactgagagtgtccgccaccttctggcagaacccccggaaccacttcagatgccaggtgcagttctacggcctgagcgagaacgacgagtggacccaggacagagccaagcccgtgacccagatcgtgtctgccgaagcctggggcagagccgattgcggctttaccagcgagagctaccagcagggcgtgctgagcgccaccatcctgtacgagatcctgctgggcaaggccaccctgtacgccgtgctggtgtctgccctggtgctgatggctatggtcaagcggaaggacagccggggaagggccaagcgatctggatctggagcaacaaacttctcactactcaaacaagcaggtgacgtggaggagaatcccgggcctactagtatggactggatttggcgcatccttttccttgtcggcgctgctaccggcgcccattccgggccccaggttcagctgcaagagtctggcggaggacttgctcaagctggcggaagcctgagactgtcttgtgccgcctctggcagaaccttcagcatgggctggtttagacaggcccctggcaaagagagagagttcgtcgccgccatcacatacagcggcggcagcccttactacgcctcttctgtcagaggccggttcaccatcagccgggacaacgccaagaacaccgtgtacctccagatgaacagcctgaagccagaggacaccgccgtgtactactgtgccgccaatccaacctacggcagcgactggaatgccgagaattggggccagggcacccaagtgacagtgtctagtggatccggcggcggaggatctggcggaggcggatctgggggcggaggctctttcgaacaagttcagcttcaacagcctggcgctgagctggtcaaacctggcgcttctgtgaagatgagctgcaaagccagcggctacgccttcagcagctactggatcaactggatgaagcagaaacccggccagggactcgaatggatcggccaaatctatcccggcgacggcgacaccaactacaacggcaagttcaagggcagagccacactgaccgccgatacctctagcagcacagcctacatgcagctgagcagcctgaccagcgaagatagcgccgtgtacttctgtgcccggtccatcacaacagtcgtgggctgcgctatggactattggggccagggaacaagcgtgaccgtgtctagtacgcgtatccagaaccctgatcctgccgtgtaccagctgcgggatagcaagagcagcgacaagagcgtgtgtctgttcaccgacttcgacagccagaccaacgtgtcccagagcaaggactccgacgtgtacatcaccgataagaccgtgctggacatgcggagcatggacttcaagagcaactccgccgtggcctggtccaacaagtccgatttcgcctgcgccaacgccttcaacaacagcattatccccgaggacacattcttcccaagccccgagagcagctgcgacgtgaagctggtggaaaagagcttcgagacagacaccaacctgaacttccagaacctgagcgtgatcggcttcagaatcctgctgctgaaagtggccggctttaacctgctgatgaccctgcggctgtggtccagccgcgccaagagaagcggatctggcgtgaagcagaccctgaatttcgacctgctgaagctggctggcgacgtggaatccaacccaggcccttctagaggccatatgaccgagtacaagcccacggtgcgcctcgccacccgcgacgacgtccccagggccgtacgcaccctcgccgccgcgttcgccgactaccccgccacgcgccacaccgtcgatccggaccgccacatcgagcgggtcaccgagctgcaagaactcttcctcacgcgcgtcgggctcgacatcggcaaggtgtgggtcgcggacgacggcgccgcggtggcggtctggaccacgccggagagcgtcgaagcgggggcggtgttcgccgagatcggcccgcgcatggccgagttgagcggttcccggctggccgcgcagcaacagatggaaggcctcctggcgccgcaccggcccaaggagcccgcgtggttcctggccaccgtcggcgtctcgcccgaccaccagggcaagggtctgggcagcgccgtcgtgctccccggagtggaggcggccgagcgcgccggggtgcccgccttcctggagacctccgcgccccgcaacctccccttctacgagcggctcggcttcaccgtcaccgccgacgtcgaggtgcccgaaggaccgcgcacctggtgcatgacccgcaagcccggtgcctga

SEQ ID NO: 4806 - DNA, 3858 bp, Artificial Sequence
  Synthetic Polynucloetide
atggccttaccagtgaccgccttgctcctgccgctggccttgctgctccacgccgccaggccgggcatgcggactgaagacctcccaaaggctgtggtgttcctggagcctcaatggtacagggtgctggagaaggacagtgtgactctgaagtgccagggagcctactcccctgaggacaattccacacagtggtttcacaatgagagcctcatctcaagccaggcctccagctacttcattgacgctgccacagtggacgacagtggagagtacaggtgccagacaaacctctccaccctcagtgacccggtgcagctagaagtccatatcggctggctgttgctccaggcccctcggtgggtgttcaaggaggaagaccctattcacctgaggtgtcacagctggaagaacactgctctgcataaggtcacatatttacagaatggcaaaggcaggaagtattttcatcataattctgacttctacattccaaaagccacactcaaagacagcggctcctacttctgcagggggcttgttgggagtaaaaatgtgtcttcagagactgtgaacatcaccatcactcaaggtttggcagtgtcaaccatctcatcattctttccacctggctaccaaggtaccggcggaggcggatctggcggcggaggtagcggtggcggaggatctgaattcgacatccagatgacacagagccctagcagcctgtctgccagcgtgggagacagagtgaccatcacatgcaaggccagcgaccacatcaacaactggctggcctggtatcagcagaagcctggacaggcccctaagctgctgatctacggcgctaccacactggaaacaggcgtgcccagcagattttctggcagcggctctggcaccgactacaccctgacaatatccagcctccagcctgaggacttcgccacctactactgtcagcagagctggaacaccccttggacattcggccagggcaccaagctggaaatcaagagactcgaggacctgaagaacgtgttcccacctgaggtggccgtgttcgagcctagcgaggccgagatcagccacacccagaaagccaccctcgtgtgcctggctaccggcttctaccccgaccatgtggaactgtcttggtgggtcaacggcaaagaggtgcacagcggcgtgtctaccgacccccagccactgaaagaacagcccgccctgaacgacagccggtactgcctgagcagcagactgagagtgtccgccaccttctggcagaacccccggaaccacttcagatgccaggtgcagttctacggcctgagcgagaacgacgagtggacccaggacagagccaagcccgtgacccagatcgtgtctgccgaagcctggggcagagccgattgcggctttaccagcgagagctaccagcagggcgtgctgagcgccaccatcctgtacgagatcctgctgggcaaggccaccctgtacgccgtgctggtgtctgccctggtgctgatggctatggtcaagcggaaggacagccggggaagggccaagcgatctggatctggagcaacaaacttctcactactcaaacaagcaggtgacgtggaggagaatcccgggcctactagtatggactggatttggcgcatccttttccttgtcggcgctgctaccggcgcccattccgggccccaggttcagctgcaagagtctggcggaggacttgctcaagctggcggaagcctgagactgtcttgtgccgcctctggcagaaccttcagcatgggctggtttagacaggcccctggcaaagagagagagttcgtcgccgccatcacatacagcggcggcagcccttactacgcctcttctgtcagaggccggttcaccatcagccgggacaacgccaagaacaccgtgtacctccagatgaacagcctgaagccagaggacaccgccgtgtactactgtgccgccaatccaacctacggcagcgactggaatgccgagaattggggccagggcacccaagtgacagtgtctagtggatccggcggcggaggatctggcggaggcggatctgggggcggaggctctttcgaacaagttcagcttcaacagcctggcgctgagctggtcaaacctggcgcttctgtgaagatgagctgcaaagccagcggctacgccttcagcagctactggatcaactggatgaagcagaaacccggccagggactcgaatggatcggccaaatctatcccggcgacggcgacaccaactacaacggcaagttcaagggcagagccacactgaccgccgatacctctagcagcacagcctacatgcagctgagcagcctgaccagcgaagatagcgccgtgtacttctgtgcccggtccatcacaacagtcgtgggctgcgctatggactattggggccagggaacaagcgtgaccgtgtctagtacgcgtgagcagaaactgatctcggaagaggatgggagcggcaccccattcccttctctggcccctcccatcatgctgctggtggacggcaagcagcagatggtggtcgtgtgcctggtgctggatgtggccccacctggactggacagccccatctggtttagcgccggcaatggctctgccctggacgcctttacctacggcccaagccctgccaccgatggcacctggacaaatctggcccacctgagcctgcccagcgaggaactggcttcttgggagcctctcgtgtgccacacaggacctggcgctgagggacacagcagatccacccagcctatgcacctgtctggcgaggccagcaccgccagaacctgtcctcaggaacctctgagaggcacccctggcggagcactgtggctgggagtgctgagactgctgctgttcaagctgctgctgtttgacctgctgctgacctgctcctgtctgtgcgatcctgccggccctctgccttctcctgccaccaccacaagactgagagccctgggcagccacagactgcaccctgccacagagacaggcggcagagaggccacaagcagccctagaccccagcccagagacagaagatggggcgataccccccctggcagaaagcctggatctccagtccgcgccaagagaagcggatctggcgtgaagcagaccctgaatttcgacctgctgaagctggctggcgacgtggaatccaacccaggcccttctagaggccatatgaccgagtacaagcccacggtgcgcctcgccacccgcgacgacgtccccagggccgtacgcaccctcgccgccgcgttcgccgactaccccgccacgcgccacaccgtcgatccggaccgccacatcgagcgggtcaccgagctgcaagaactcttcctcacgcgcgtcgggctcgacatcggcaaggtgtgggtcgcggacgacggcgccgcggtggcggtctggaccacgccggagagcgtcgaagcgggggcggtgttcgccgagatcggcccgcgcatggccgagttgagcggttcccggctggccgcgcagcaacagatggaaggcctcctggcgccgcaccggcccaaggagcccgcgtggttcctggccaccgtcggcgtctcgcccgaccaccagggcaagggtctgggcagcgccgtcgtgctccccggagtggaggcggccgagcgcgccggggtgcccgccttcctggagacctccgcgccccgcaacctccccttctacgagcggctcggcttcaccgtcaccgccgacgtcgaggtgcccgaaggaccgcgcacctggtgcatgacccgcaagcccggtgcctga

SEQ ID NO: 4807 - DNA, 3723 bp, Artificial Sequence
  Synthetic Polynucloetide
atggccttaccagtgaccgccttgctcctgccgctggccttgctgctccacgccgccaggccgggcatgcggactgaagacctcccaaaggctgtggtgttcctggagcctcaatggtacagggtgctggagaaggacagtgtgactctgaagtgccagggagcctactcccctgaggacaattccacacagtggtttcacaatgagagcctcatctcaagccaggcctccagctacttcattgacgctgccacagtggacgacagtggagagtacaggtgccagacaaacctctccaccctcagtgacccggtgcagctagaagtccatatcggctggctgttgctccaggcccctcggtgggtgttcaaggaggaagaccctattcacctgaggtgtcacagctggaagaacactgctctgcataaggtcacatatttacagaatggcaaaggcaggaagtattttcatcataattctgacttctacattccaaaagccacactcaaagacagcggctcctacttctgcagggggcttgttgggagtaaaaatgtgtcttcagagactgtgaacatcaccatcactcaaggtttggcagtgtcaaccatctcatcattctttccacctggctaccaaggtaccggcggaggcggatctggcggcggaggtagcggtggcggaggatctgaattcgacatccagatgacacagagccctagcagcctgtctgccagcgtgggagacagagtgaccatcacatgcaaggccagcgaccacatcaacaactggctggcctggtatcagcagaagcctggacaggcccctaagctgctgatctacggcgctaccacactggaaacaggcgtgcccagcagattttctggcagcggctctggcaccgactacaccctgacaatatccagcctccagcctgaggacttcgccacctactactgtcagcagagctggaacaccccttggacattcggccagggcaccaagctggaaatcaagagactcgaggggaaaccaattcccaaccctcttctgggactggattcaaccggcagcggcgacaagcagctggacgccgacgtgtcccccaagcctaccatcttcctgccctctatcgccgagacaaagctccagaaggccggcacctacctgtgcctgctggaaaagttcttcccagatgtgattaagatccactggcaggaaaagaagtccaacaccatcctgggcagccaggaaggcaacaccatgaagaccaacgacacctacatgaagttcagctggctgaccgtgcccgagaagtccctggacaaagaacacagatgcatcgtgcggcacgaaaacaacaagaacggcgtggaccaggaaatcatcttcccacccatcaagaccgatgtgattacaatggaccccaaggacaactgctccaaggacgccaacgataccctgctgctccagctgaccaacaccagcgcctactacatgtacttgttgctgctgctgaagtccgtggtgtacttcgccatcatcacatgctgcctgctgcggagaaccgccttctgctgcaacggcgagaagtctagggccaagcgatctggatctggagcaacaaacttctcactactcaaacaagcaggtgacgtggaggagaatcccgggcctactagtatggactggatttggcgcatccttttccttgtcggcgctgctaccggcgcccattccgggccccaggttcagctgcaagagtctggcggaggacttgctcaagctggcggaagcctgagactgtcttgtgccgcctctggcagaaccttcagcatgggctggtttagacaggcccctggcaaagagagagagttcgtcgccgccatcacatacagcggcggcagcccttactacgcctcttctgtcagaggccggttcaccatcagccgggacaacgccaagaacaccgtgtacctccagatgaacagcctgaagccagaggacaccgccgtgtactactgtgccgccaatccaacctacggcagcgactggaatgccgagaattggggccagggcacccaagtgacagtgtctagtggatccggcggcggaggatctggcggaggcggatctgggggcggaggctctttcgaacaagttcagcttcaacagcctggcgctgagctggtcaaacctggcgcttctgtgaagatgagctgcaaagccagcggctacgccttcagcagctactggatcaactggatgaagcagaaacccggccagggactcgaatggatcggccaaatctatcccggcgacggcgacaccaactacaacggcaagttcaagggcagagccacactgaccgccgatacctctagcagcacagcctacatgcagctgagcagcctgaccagcgaagatagcgccgtgtacttctgtgcccggtccatcacaacagtcgtgggctgcgctatggactattggggccagggaacaagcgtgaccgtgtctagtacgcgtgagcagaaactgatctcggaagaggatgggagcggcagccagcctcacaccaagcccagcgtgttcgtgatgaagaacggcaccaacgtggcctgcctcgtgaaagagttctaccccaaggacatcaggatcaacctggtgtccagcaagaagatcaccgagttcgaccccgccatcgtgatctcccccagcggcaagtacaacgccgtgaagctggggaagtacgaggacagcaacagcgtgacctgctccgtgcagcacgacaacaagaccgtgcacagcaccgactttgaagtgaaaaccgactccaccgaccacgtgaagcccaaagagacagagaacaccaagcagcccagcaagagctgccacaagcccaaggccatcgtgcacaccgagaaagtgaacatgatgagcctgaccgtgctgggcctgcggatgctgttcgccaaaaccgtggccgtgaacttcctgctgaccgccaagctgttcttcctccgcgccaagagaagcggatctggcgtgaagcagaccctgaatttcgacctgctgaagctggctggcgacgtggaatccaacccaggcccttctagaggccatatgaccgagtacaagcccacggtgcgcctcgccacccgcgacgacgtccccagggccgtacgcaccctcgccgccgcgttcgccgactaccccgccacgcgccacaccgtcgatccggaccgccacatcgagcgggtcaccgagctgcaagaactcttcctcacgcgcgtcgggctcgacatcggcaaggtgtgggtcgcggacgacggcgccgcggtggcggtctggaccacgccggagagcgtcgaagcgggggcggtgttcgccgagatcggcccgcgcatggccgagttgagcggttcccggctggccgcgcagcaacagatggaaggcctcctggcgccgcaccggcccaaggagcccgcgtggttcctggccaccgtcggcgtctcgcccgaccaccagggcaagggtctgggcagcgccgtcgtgctccccggagtggaggcggccgagcgcgccggggtgcccgccttcctggagacctccgcgccccgcaacctccccttctacgagcggctcggcttcaccgtcaccgccgacgtcgaggtgcccgaaggaccgcgcacctggtgcatgacccgcaagcccggtgcctga

SEQ ID NO: 4808 - DNA, 2934 bp, Artificial Sequence
  Synthetic Polynucloetide
atggccttaccagtgaccgccttgctcctgccgctggccttgctgctccacgccgccaggccgggcatgcggactgaagacctcccaaaggctgtggtgttcctggagcctcaatggtacagggtgctggagaaggacagtgtgactctgaagtgccagggagcctactcccctgaggacaattccacacagtggtttcacaatgagagcctcatctcaagccaggcctccagctacttcattgacgctgccacagtggacgacagtggagagtacaggtgccagacaaacctctccaccctcagtgacccggtgcagctagaagtccatatcggctggctgttgctccaggcccctcggtgggtgttcaaggaggaagaccctattcacctgaggtgtcacagctggaagaacactgctctgcataaggtcacatatttacagaatggcaaaggcaggaagtattttcatcataattctgacttctacattccaaaagccacactcaaagacagcggctcctacttctgcagggggcttgttgggagtaaaaatgtgtcttcagagactgtgaacatcaccatcactcaaggtttggcagtgtcaaccatctcatcattctttccacctggctaccaaggtaccggcggaggcggatctggcggcggaggtagcggtggcggaggatctgaattcgacatccagatgacacagagccctagcagcctgtctgccagcgtgggagacagagtgaccatcacatgcaaggccagcgaccacatcaacaactggctggcctggtatcagcagaagcctggacaggcccctaagctgctgatctacggcgctaccacactggaaacaggcgtgcccagcagattttctggcagcggctctggcaccgactacaccctgacaatatccagcctccagcctgaggacttcgccacctactactgtcagcagagctggaacaccccttggacattcggccagggcaccaagctggaaatcaagagactcgagagccagcctcacaccaagcccagcgtgttcgtgatgaagaacggcaccaacgtggcctgcctcgtgaaagagttctaccccaaggacatcaggatcaacctggtgtccagcaagaagatcaccgagttcgaccccgccatcgtgatctcccccagcggcaagtacaacgccgtgaagctggggaagtacgaggacagcaacagcgtgacctgctccgtgcagcacgacaacaagaccgtgcacagcaccgactttgaagtgaaaaccgactccaccgaccacgtgaagcccaaagagacagagaacaccaagcagcccagcaagagctgccacaagcccaaggccatcgtgcacaccgagaaagtgaacatgatgagcctgaccgtgctgggcctgcggatgctgttcgccaaaaccgtggccgtgaacttcctgctgaccgccaagctgttcttcctcagggccaagcgatctggatctggagcaacaaacttctcactactcaaacaagcaggtgacgtggaggagaatcccgggcctactagtatggactggatttggcgcatccttttccttgtcggcgctgctaccggcgcccattccgggccccaggttcagctgcaagagtctggcggaggacttgctcaagctggcggaagcctgagactgtcttgtgccgcctctggcagaaccttcagcatgggctggtttagacaggcccctggcaaagagagagagttcgtcgccgccatcacatacagcggcggcagcccttactacgcctcttctgtcagaggccggttcaccatcagccgggacaacgccaagaacaccgtgtacctccagatgaacagcctgaagccagaggacaccgccgtgtactactgtgccgccaatccaacctacggcagcgactggaatgccgagaattggggccagggcacccaagtgacagtgtctagtggatccggcggcggaggatctggcggaggcggatctgggggcggaggctctttcgaacaagttcagcttcaacagcctggcgctgagctggtcaaacctggcgcttctgtgaagatgagctgcaaagccagcggctacgccttcagcagctactggatcaactggatgaagcagaaacccggccagggactcgaatggatcggccaaatctatcccggcgacggcgacaccaactacaacggcaagttcaagggcagagccacactgaccgccgatacctctagcagcacagcctacatgcagctgagcagcctgaccagcgaagatagcgccgtgtacttctgtgcccggtccatcacaacagtcgtgggctgcgctatggactattggggccagggaacaagcgtgaccgtgtctagtacgcgtgacaagcagctggacgccgacgtgtcccccaagcctaccatcttcctgccctctatcgccgagacaaagctccagaaggccggcacctacctgtgcctgctggaaaagttcttcccagatgtgattaagatccactggcaggaaaagaagtccaacaccatcctgggcagccaggaaggcaacaccatgaagaccaacgacacctacatgaagttcagctggctgaccgtgcccgagaagtccctggacaaagaacacagatgcatcgtgcggcacgaaaacaacaagaacggcgtggaccaggaaatcatcttcccacccatcaagaccgatgtgattacaatggaccccaaggacaactgctccaaggacgccaacgataccctgctgctccagctgaccaacaccagcgcctactacatgtacttgttgctgctgctgaagtccgtggtgtacttcgccatcatcacatgctgcctgctgcggagaaccgccttctgctgcaacggcgagaagtct

SEQ ID NO: 4809 - DNA, 4143 bp, Artificial Sequence
  Synthetic Polynucloetide
atggccttaccagtgaccgccttgctcctgccgctggccttgctgctccacgccgccaggccgggcatgcggactgaagacctcccaaaggctgtggtgttcctggagcctcaatggtacagggtgctggagaaggacagtgtgactctgaagtgccagggagcctactcccctgaggacaattccacacagtggtttcacaatgagagcctcatctcaagccaggcctccagctacttcattgacgctgccacagtggacgacagtggagagtacaggtgccagacaaacctctccaccctcagtgacccggtgcagctagaagtccatatcggctggctgttgctccaggcccctcggtgggtgttcaaggaggaagaccctattcacctgaggtgtcacagctggaagaacactgctctgcataaggtcacatatttacagaatggcaaaggcaggaagtattttcatcataattctgacttctacattccaaaagccacactcaaagacagcggctcctacttctgcagggggcttgttgggagtaaaaatgtgtcttcagagactgtgaacatcaccatcactcaaggtttggcagtgtcaaccatctcatcattctttccacctggctaccaaggtaccggcggaggcggatctggcggcggaggtagcggtggcggaggatctgaattcgacatccagatgacacagagccctagcagcctgtctgccagcgtgggagacagagtgaccatcacatgcaaggccagcgaccacatcaacaactggctggcctggtatcagcagaagcctggacaggcccctaagctgctgatctacggcgctaccacactggaaacaggcgtgcccagcagattttctggcagcggctctggcaccgactacaccctgacaatatccagcctccagcctgaggacttcgccacctactactgtcagcagagctggaacaccccttggacattcggccagggcaccaagctggaaatcaagagaggacagcctaaggccaatcctaccgtgacactgttccctccaagcagcgaagaactccaggccaacaaggccacacttgtgtgcctgatctccgacttctaccctggggctgtgacagtggcttggaaggccgatggatctcctgtgaaagccggcgtggaaaccaccaagccatccaagcagagcaacaacaaatacgccgccagctcctacctgagcctgacacctgagcagtggaagtcccacagatcctacagctgccaagtgacccacgaaggcagcaccgtggaaaagacagtggcccctacagagtgcagcggatcccagagcttcggcctgctggaccccaagctgtgctacctgctggatggcatcctgttcatctacggcgtgatcctgaccgccctgttcctgagagtgaagttcagcagaagcgccgacgcccctgcctaccagcagggacagaaccaactgtacaacgagctgaacctgggcagacgggaagagtacgacgtgctggacaagcggagaggcagggaccctgagatgggcggaaagccccagcggagaaagaacccccaggaaggactgtataacgaactccagaaagacaagatggccgaagcctacagcgagatcggcatgaagggcgagcggagaagaggcaagggccacgatggcctgtaccagggcctgagcaccgccaccaaggacacctatgacgccctgcacatgcaggccctgcctccaagaagggccaagcgatctggatctggagcaacaaacttctcactactcaaacaagcaggtgacgtggaggagaatcccgggcctactagtatggactggatttggcgcatccttttccttgtcggcgctgctaccggcgcccattccgggccccaggttcagctgcaagagtctggcggaggacttgctcaagctggcggaagcctgagactgtcttgtgccgcctctggcagaaccttcagcatgggctggtttagacaggcccctggcaaagagagagagttcgtcgccgccatcacatacagcggcggcagcccttactacgcctcttctgtcagaggccggttcaccatcagccgggacaacgccaagaacaccgtgtacctccagatgaacagcctgaagccagaggacaccgccgtgtactactgtgccgccaatccaacctacggcagcgactggaatgccgagaattggggccagggcacccaagtgacagtgtctagtggatccggcggcggaggatctggcggaggcggatctgggggcggaggctctttcgaacaagttcagcttcaacagcctggcgctgagctggtcaaacctggcgcttctgtgaagatgagctgcaaagccagcggctacgccttcagcagctactggatcaactggatgaagcagaaacccggccagggactcgaatggatcggccaaatctatcccggcgacggcgacaccaactacaacggcaagttcaagggcagagccacactgaccgccgatacctctagcagcacagcctacatgcagctgagcagcctgaccagcgaagatagcgccgtgtacttctgtgcccggtccatcacaacagtcgtgggctgcgctatggactattggggccagggaacaagcgtgaccgtgtctagtgcctctacaaagggaccctccgtgtttcctctggctcccagcagcaagtctacaagcggaggaacagccgctctgggctgcctggtcaaggattactttcccgagcctgtgaccgtgtcctggaatagcggagcactgacaagcggcgtgcacacctttccagccgtgctgcaaagcagcggcctgtactctctgagcagcgtggtcacagtgcctagctctagcctgggcacccagacctacatctgcaatgtgaaccacaagcctagcaacaccaaggtggacaagagagtggaacccaagagctgtggtacccagagttttgggttgttggaccctaaattgtgctatctgttggacggaatcctgttcatttacggagtgatcctgaccgcattgttcctgcgggttaagttttccagatccgcagacgcacccgcttaccaacaagggcagaaccaactctacaatgaacttaatttggggcggagggaagagtacgacgttctggacaaaaggaggggacgagatcccgagatgggcggaaagcctcagcgaaggaagaatccgcaagaggggctttataacgaactccagaaagataaaatggcagaagcctatagtgagattgggatgaagggagaaaggaggaggggtaaaggtcacgatgggttgtaccaaggattgagcacagccactaaagatacctatgatgcgctccacatgcaggccctgccgccaagacgcgccaagagaagcggatctggcgtgaagcagaccctgaatttcgacctgctgaagctggctggcgacgtggaatccaacccaggcccttctagaggccatatgaccgagtacaagcccacggtgcgcctcgccacccgcgacgacgtccccagggccgtacgcaccctcgccgccgcgttcgccgactaccccgccacgcgccacaccgtcgatccggaccgccacatcgagcgggtcaccgagctgcaagaactcttcctcacgcgcgtcgggctcgacatcggcaaggtgtgggtcgcggacgacggcgccgcggtggcggtctggaccacgccggagagcgtcgaagcgggggcggtgttcgccgagatcggcccgcgcatggccgagttgagcggttcccggctggccgcgcagcaacagatggaaggcctcctggcgccgcaccggcccaaggagcccgcgtggttcctggccaccgtcggcgtctcgcccgaccaccagggcaagggtctgggcagcgccgtcgtgctccccggagtggaggcggccgagcgcgccggggtgcccgccttcctggagacctccgcgccccgcaacctccccttctacgagcggctcggcttcaccgtcaccgccgacgtcgaggtgcccgaaggaccgcgcacctggtgcatgacccgcaagcccggtgcctga

SEQ ID NO: 4810 - DNA, 3498 bp, Artificial Sequence
  Synthetic Polynucloetide
atggccttaccagtgaccgccttgctcctgccgctggccttgctgctccacgccgccaggccgggcatgcggactgaagacctcccaaaggctgtggtgttcctggagcctcaatggtacagggtgctggagaaggacagtgtgactctgaagtgccagggagcctactcccctgaggacaattccacacagtggtttcacaatgagagcctcatctcaagccaggcctccagctacttcattgacgctgccacagtggacgacagtggagagtacaggtgccagacaaacctctccaccctcagtgacccggtgcagctagaagtccatatcggctggctgttgctccaggcccctcggtgggtgttcaaggaggaagaccctattcacctgaggtgtcacagctggaagaacactgctctgcataaggtcacatatttacagaatggcaaaggcaggaagtattttcatcataattctgacttctacattccaaaagccacactcaaagacagcggctcctacttctgcagggggcttgttgggagtaaaaatgtgtcttcagagactgtgaacatcaccatcactcaaggtttggcagtgtcaaccatctcatcattctttccacctggctaccaaggtaccggcggaggcggatctggcggcggaggtagcggtggcggaggatctgaattcgacatccagatgacacagagccctagcagcctgtctgccagcgtgggagacagagtgaccatcacatgcaaggccagcgaccacatcaacaactggctggcctggtatcagcagaagcctggacaggcccctaagctgctgatctacggcgctaccacactggaaacaggcgtgcccagcagattttctggcagcggctctggcaccgactacaccctgacaatatccagcctccagcctgaggacttcgccacctactactgtcagcagagctggaacaccccttggacattcggccagggcaccaagctggaaatcaagagactcgaggacctgaagaacgtgttcccacctgaggtggccgtgttcgagcctagcgaggccgagatcagccacacccagaaagccaccctcgtgtgcctggctaccggcttctaccccgaccatgtggaactgtcttggtgggtcaacggcaaagaggtgcacagcggcgtgtctaccgacccccagccactgaaagaacagcccgccctgaacgacagccggtactgcctgagcagcagactgagagtgtccgccaccttctggcagaacccccggaaccacttcagatgccaggtgcagttctacggcctgagcgagaacgacgagtggacccaggacagagccaagcccgtgacccagatcgtgtctgccgaagcctggggcagagccgattgcggatcccagagcttcggcctgctggaccccaagctgtgctacctgctggatggcatcctgttcatctacggcgtgatcctgaccgccctgttcctgagagtgaagttcagcagaagcgccgacgcccctgcctaccagcagggacagaaccaactgtacaacgagctgaacctgggcagacgggaagagtacgacgtgctggacaagcggagaggcagggaccctgagatgggcggaaagccccagcggagaaagaacccccaggaaggactgtataacgaactccagaaagacaagatggccgaagcctacagcgagatcggcatgaagggcgagcggagaagaggcaagggccacgatggcctgtaccagggcctgagcaccgccaccaaggacacctatgacgccctgcacatgcaggccctgcctccaagaagggccaagcgatctggatctggagcaacaaacttctcactactcaaacaagcaggtgacgtggaggagaatcccgggcctactagtatggactggatttggcgcatccttttccttgtcggcgctgctaccggcgcccattccgggccccaggttcagctgcaagagtctggcggaggacttgctcaagctggcggaagcctgagactgtcttgtgccgcctctggcagaaccttcagcatgggctggtttagacaggcccctggcaaagagagagagttcgtcgccgccatcacatacagcggcggcagcccttactacgcctcttctgtcagaggccggttcaccatcagccgggacaacgccaagaacaccgtgtacctccagatgaacagcctgaagccagaggacaccgccgtgtactactgtgccgccaatccaacctacggcagcgactggaatgccgagaattggggccagggcacccaagtgacagtgtctagtggatccggcggcggaggatctggcggaggcggatctgggggcggaggctctttcgaacaagttcagcttcaacagcctggcgctgagctggtcaaacctggcgcttctgtgaagatgagctgcaaagccagcggctacgccttcagcagctactggatcaactggatgaagcagaaacccggccagggactcgaatggatcggccaaatctatcccggcgacggcgacaccaactacaacggcaagttcaagggcagagccacactgaccgccgatacctctagcagcacagcctacatgcagctgagcagcctgaccagcgaagatagcgccgtgtacttctgtgcccggtccatcacaacagtcgtgggctgcgctatggactattggggccagggaacaagcgtgaccgtgtctagtacgcgtatccagaaccctgatcctgccgtgtaccagctgcgggatagcaagagcagcgacaagagcgtgtgtctgttcaccgacttcgacagccagaccaacgtgtcccagagcaaggactccgacgtgtacatcaccgataagaccgtgctggacatgcggagcatggacttcaagagcaactccgccgtggcctggtccaacaagtccgatttcgcctgcgccaacgccttcaacaacagcattatccccgaggacacattcttcccaagccccgagagcagctgcggtacccagagttttgggttgttggaccctaaattgtgctatctgttggacggaatcctgttcatttacggagtgatcctgaccgcattgttcctgcgggttaagttttccagatccgcagacgcacccgcttaccaacaagggcagaaccaactctacaatgaacttaatttggggcggagggaagagtacgacgttctggacaaaaggaggggacgagatcccgagatgggcggaaagcctcagcgaaggaagaatccgcaagaggggctttataacgaactccagaaagataaaatggcagaagcctatagtgagattgggatgaagggagaaaggaggaggggtaaaggtcacgatgggttgtaccaaggattgagcacagccactaaagatacctatgatgcgctccacatgcaggccctgccgccaaga

SEQ ID NO: 4811 - DNA, 3498 bp, Artificial Sequence
  Synthetic Polynucloetide
atggccttaccagtgaccgccttgctcctgccgctggccttgctgctccacgccgccaggccgggcatgcggactgaagacctcccaaaggctgtggtgttcctggagcctcaatggtacagggtgctggagaaggacagtgtgactctgaagtgccagggagcctactcccctgaggacaattccacacagtggtttcacaatgagagcctcatctcaagccaggcctccagctacttcattgacgctgccacagtggacgacagtggagagtacaggtgccagacaaacctctccaccctcagtgacccggtgcagctagaagtccatatcggctggctgttgctccaggcccctcggtgggtgttcaaggaggaagaccctattcacctgaggtgtcacagctggaagaacactgctctgcataaggtcacatatttacagaatggcaaaggcaggaagtattttcatcataattctgacttctacattccaaaagccacactcaaagacagcggctcctacttctgcagggggcttgttgggagtaaaaatgtgtcttcagagactgtgaacatcaccatcactcaaggtttggcagtgtcaaccatctcatcattctttccacctggctaccaaggtaccggcggaggcggatctggcggcggaggtagcggtggcggaggatctgaattcgacatccagatgacacagagccctagcagcctgtctgccagcgtgggagacagagtgaccatcacatgcaaggccagcgaccacatcaacaactggctggcctggtatcagcagaagcctggacaggcccctaagctgctgatctacggcgctaccacactggaaacaggcgtgcccagcagattttctggcagcggctctggcaccgactacaccctgacaatatccagcctccagcctgaggacttcgccacctactactgtcagcagagctggaacaccccttggacattcggccagggcaccaagctggaaatcaagagactcgaggacctgaagaacgtgttcccacctgaggtggccgtgttcgagcctagcaaggccgagatcgcccacacccagaaagccaccctcgtgtgcctggctaccggcttctaccccgaccatgtggaactgtcttggtgggtcaacggcaaagaggtgcacagcggcgtgtgtaccgacccccagccactgaaagaacagcccgccctgaacgacagccggtactgcctgagcagcagactgagagtgtccgccaccttctggcagaacccccggaaccacttcagatgccaggtgcagttctacggcctgagcgagaacgacgagtggacccaggacagagccaagcccgtgacccagatcgtgtctgccgaagcctggggcagagccgattgcggatcccagagcttcggcctgctggaccccaagctgtgctacctgctggatggcatcctgttcatctacggcgtgatcctgaccgccctgttcctgagagtgaagttcagcagaagcgccgacgcccctgcctaccagcagggacagaaccaactgtacaacgagctgaacctgggcagacgggaagagtacgacgtgctggacaagcggagaggcagggaccctgagatgggcggaaagccccagcggagaaagaacccccaggaaggactgtataacgaactccagaaagacaagatggccgaagcctacagcgagatcggcatgaagggcgagcggagaagaggcaagggccacgatggcctgtaccagggcctgagcaccgccaccaaggacacctatgacgccctgcacatgcaggccctgcctccaagaagggccaagcgatctggatctggagcaacaaacttctcactactcaaacaagcaggtgacgtggaggagaatcccgggcctactagtatggactggatttggcgcatccttttccttgtcggcgctgctaccggcgcccattccgggccccaggttcagctgcaagagtctggcggaggacttgctcaagctggcggaagcctgagactgtcttgtgccgcctctggcagaaccttcagcatgggctggtttagacaggcccctggcaaagagagagagttcgtcgccgccatcacatacagcggcggcagcccttactacgcctcttctgtcagaggccggttcaccatcagccgggacaacgccaagaacaccgtgtacctccagatgaacagcctgaagccagaggacaccgccgtgtactactgtgccgccaatccaacctacggcagcgactggaatgccgagaattggggccagggcacccaagtgacagtgtctagtggatccggcggcggaggatctggcggaggcggatctgggggcggaggctctttcgaacaagttcagcttcaacagcctggcgctgagctggtcaaacctggcgcttctgtgaagatgagctgcaaagccagcggctacgccttcagcagctactggatcaactggatgaagcagaaacccggccagggactcgaatggatcggccaaatctatcccggcgacggcgacaccaactacaacggcaagttcaagggcagagccacactgaccgccgatacctctagcagcacagcctacatgcagctgagcagcctgaccagcgaagatagcgccgtgtacttctgtgcccggtccatcacaacagtcgtgggctgcgctatggactattggggccagggaacaagcgtgaccgtgtctagtacgcgtatccagaaccctgatcctgccgtgtaccagctgcgggatagcaagagcagcgacaagagcgtgtgtctgttcaccgacttcgacagccagaccaacgtgtcccagagcaaggactccgacgtgtacatcaccgataagtgcgtgctggacatgcggagcatggacttcaagagcaactccgccgtggcctggtccaacaagtccgatttcgcctgcgccaacgccttcaacaacagcattatccccgaggacacattcttcccaagcagcgacgtgccctgcggtacccagagttttgggttgttggaccctaaattgtgctatctgttggacggaatcctgttcatttacggagtgatcctgaccgcattgttcctgcgggttaagttttccagatccgcagacgcacccgcttaccaacaagggcagaaccaactctacaatgaacttaatttggggcggagggaagagtacgacgttctggacaaaaggaggggacgagatcccgagatgggcggaaagcctcagcgaaggaagaatccgcaagaggggctttataacgaactccagaaagataaaatggcagaagcctatagtgagattgggatgaagggagaaaggaggaggggtaaaggtcacgatgggttgtaccaaggattgagcacagccactaaagatacctatgatgcgctccacatgcaggccctgccgccaaga

SEQ ID NO: 4812 - DNA, 3711 bp, Artificial Sequence
  Synthetic Polynucloetide
atggccttaccagtgaccgccttgctcctgccgctggccttgctgctccacgccgccaggccgggcatgcggactgaagacctcccaaaggctgtggtgttcctggagcctcaatggtacagggtgctggagaaggacagtgtgactctgaagtgccagggagcctactcccctgaggacaattccacacagtggtttcacaatgagagcctcatctcaagccaggcctccagctacttcattgacgctgccacagtggacgacagtggagagtacaggtgccagacaaacctctccaccctcagtgacccggtgcagctagaagtccatatcggctggctgttgctccaggcccctcggtgggtgttcaaggaggaagaccctattcacctgaggtgtcacagctggaagaacactgctctgcataaggtcacatatttacagaatggcaaaggcaggaagtattttcatcataattctgacttctacattccaaaagccacactcaaagacagcggctcctacttctgcagggggcttgttgggagtaaaaatgtgtcttcagagactgtgaacatcaccatcactcaaggtttggcagtgtcaaccatctcatcattctttccacctggctaccaaggtaccggcggaggcggatctggcggcggaggtagcggtggcggaggatctgaattcgacatccagatgacacagagccctagcagcctgtctgccagcgtgggagacagagtgaccatcacatgcaaggccagcgaccacatcaacaactggctggcctggtatcagcagaagcctggacaggcccctaagctgctgatctacggcgctaccacactggaaacaggcgtgcccagcagattttctggcagcggctctggcaccgactacaccctgacaatatccagcctccagcctgaggacttcgccacctactactgtcagcagagctggaacaccccttggacattcggccagggcaccaagctggaaatcaagagactcgaggggaaaccaattcccaaccctcttctgggactggattcaaccggcagcggcgaggacctgaagaacgtgttcccacctgaggtggccgtgttcgagcctagcgaggccgagatcagccacacccagaaagccaccctcgtgtgcctggctaccggcttctaccccgaccatgtggaactgtcttggtgggtcaacggcaaagaggtgcacagcggcgtgtctaccgacccccagccactgaaagaacagcccgccctgaacgacagccggtactgcctgagcagcagactgagagtgtccgccaccttctggcagaacccccggaaccacttcagatgccaggtgcagttctacggcctgagcgagaacgacgagtggacccaggacagagccaagcccgtgacccagatcgtgtctgccgaagcctggggcagagccgattgcggatcccagagcttcggcctgctggaccccaagctgtgctacctgctggatggcatcctgttcatctacggcgtgatcctgaccgccctgttcctgagagtgaagttcagcagaagcgccgacgcccctgcctaccagcagggacagaaccaactgtacaacgagctgaacctgggcagacgggaagagtacgacgtgctggacaagcggagaggcagggaccctgagatgggcggaaagccccagcggagaaagaacccccaggaaggactgtataacgaactccagaaagacaagatggccgaagcctacagcgagatcggcatgaagggcgagcggagaagaggcaagggccacgatggcctgtaccagggcctgagcaccgccaccaaggacacctatgacgccctgcacatgcaggccctgcctccaagaagggccaagcgatctggatctggagcaacaaacttctcactactcaaacaagcaggtgacgtggaggagaatcccgggcctactagtatggactggatttggcgcatccttttccttgtcggcgctgctaccggcgcccattccgggccccaggttcagctgcaagagtctggcggaggacttgctcaagctggcggaagcctgagactgtcttgtgccgcctctggcagaaccttcagcatgggctggtttagacaggcccctggcaaagagagagagttcgtcgccgccatcacatacagcggcggcagcccttactacgcctcttctgtcagaggccggttcaccatcagccgggacaacgccaagaacaccgtgtacctccagatgaacagcctgaagccagaggacaccgccgtgtactactgtgccgccaatccaacctacggcagcgactggaatgccgagaattggggccagggcacccaagtgacagtgtctagtggatccggcggcggaggatctggcggaggcggatctgggggcggaggctctttcgaacaagttcagcttcaacagcctggcgctgagctggtcaaacctggcgcttctgtgaagatgagctgcaaagccagcggctacgccttcagcagctactggatcaactggatgaagcagaaacccggccagggactcgaatggatcggccaaatctatcccggcgacggcgacaccaactacaacggcaagttcaagggcagagccacactgaccgccgatacctctagcagcacagcctacatgcagctgagcagcctgaccagcgaagatagcgccgtgtacttctgtgcccggtccatcacaacagtcgtgggctgcgctatggactattggggccagggaacaagcgtgaccgtgtctagtacgcgtgagcagaaactgatctcggaagaggatgggagcggcatccagaaccctgatcctgccgtgtaccagctgcgggatagcaagagcagcgacaagagcgtgtgtctgttcaccgacttcgacagccagaccaacgtgtcccagagcaaggactccgacgtgtacatcaccgataagaccgtgctggacatgcggagcatggacttcaagagcaactccgccgtggcctggtccaacaagtccgatttcgcctgcgccaacgccttcaacaacagcattatccccgaggacacattcttcccaagccccgagagcagctgcggtacccagagttttgggttgttggaccctaaattgtgctatctgttggacggaatcctgttcatttacggagtgatcctgaccgcattgttcctgaggagcaagcggtcacggctgctccacagcgattacatgaatatgacaccacgaagaccgggtcctactcgcaaacactaccaaccctacgcacctccccgcgactttgcagcgtaccgatctcgggttaagttttccagatccgcagacgcacccgcttaccaacaagggcagaaccaactctacaatgaacttaatttggggcggagggaagagtacgacgttctggacaaaaggaggggacgagatcccgagatgggcggaaagcctcagcgaaggaagaatccgcaagaggggctttataacgaactccagaaagataaaatggcagaagcctatagtgagattgggatgaagggagaaaggaggaggggtaaaggtcacgatgggttgtaccaaggattgagcacagccactaaagatacctatgatgcgctccacatgcaggccctgccgccaaga

SEQ ID NO: 4813 - DNA, 3834 bp, Artificial Sequence
  Synthetic Polynucloetide
atggccttaccagtgaccgccttgctcctgccgctggccttgctgctccacgccgccaggccgggcatgcggactgaagacctcccaaaggctgtggtgttcctggagcctcaatggtacagggtgctggagaaggacagtgtgactctgaagtgccagggagcctactcccctgaggacaattccacacagtggtttcacaatgagagcctcatctcaagccaggcctccagctacttcattgacgctgccacagtggacgacagtggagagtacaggtgccagacaaacctctccaccctcagtgacccggtgcagctagaagtccatatcggctggctgttgctccaggcccctcggtgggtgttcaaggaggaagaccctattcacctgaggtgtcacagctggaagaacactgctctgcataaggtcacatatttacagaatggcaaaggcaggaagtattttcatcataattctgacttctacattccaaaagccacactcaaagacagcggctcctacttctgcagggggcttgttgggagtaaaaatgtgtcttcagagactgtgaacatcaccatcactcaaggtttggcagtgtcaaccatctcatcattctttccacctggctaccaaggtaccggcggaggcggatctggcggcggaggtagcggtggcggaggatctgaattcgacatccagatgacacagagccctagcagcctgtctgccagcgtgggagacagagtgaccatcacatgcaaggccagcgaccacatcaacaactggctggcctggtatcagcagaagcctggacaggcccctaagctgctgatctacggcgctaccacactggaaacaggcgtgcccagcagattttctggcagcggctctggcaccgactacaccctgacaatatccagcctccagcctgaggacttcgccacctactactgtcagcagagctggaacaccccttggacattcggccagggcaccaagctggaaatcaagagactcgaggggaaaccaattcccaaccctcttctgggactggattcaaccggcagcggcgaggacctgaagaacgtgttcccacctgaggtggccgtgttcgagcctagcgaggccgagatcagccacacccagaaagccaccctcgtgtgcctggctaccggcttctaccccgaccatgtggaactgtcttggtgggtcaacggcaaagaggtgcacagcggcgtgtctaccgacccccagccactgaaagaacagcccgccctgaacgacagccggtactgcctgagcagcagactgagagtgtccgccaccttctggcagaacccccggaaccacttcagatgccaggtgcagttctacggcctgagcgagaacgacgagtggacccaggacagagccaagcccgtgacccagatcgtgtctgccgaagcctggggcagagccgattgcggatcccagagcttcggcctgctggaccccaagctgtgctacctgctggatggcatcctgttcatctacggcgtgatcctgaccgccctgttcctgaggagtaagaggagcaggctcctgcacagtgactacatgaacatgactccacgccgccccggacccacccgcaagcattaccagccctatgccccaccacgcgacttcgcagcctatcgctccagagtgaagttcagcagaagcgccgacgcccctgcctaccagcagggacagaaccaactgtacaacgagctgaacctgggcagacgggaagagtacgacgtgctggacaagcggagaggcagggaccctgagatgggcggaaagccccagcggagaaagaacccccaggaaggactgtataacgaactccagaaagacaagatggccgaagcctacagcgagatcggcatgaagggcgagcggagaagaggcaagggccacgatggcctgtaccagggcctgagcaccgccaccaaggacacctatgacgccctgcacatgcaggccctgcctccaagaagggccaagcgatctggatctggagcaacaaacttctcactactcaaacaagcaggtgacgtggaggagaatcccgggcctactagtatggactggatttggcgcatccttttccttgtcggcgctgctaccggcgcccattccgggccccaggttcagctgcaagagtctggcggaggacttgctcaagctggcggaagcctgagactgtcttgtgccgcctctggcagaaccttcagcatgggctggtttagacaggcccctggcaaagagagagagttcgtcgccgccatcacatacagcggcggcagcccttactacgcctcttctgtcagaggccggttcaccatcagccgggacaacgccaagaacaccgtgtacctccagatgaacagcctgaagccagaggacaccgccgtgtactactgtgccgccaatccaacctacggcagcgactggaatgccgagaattggggccagggcacccaagtgacagtgtctagtggatccggcggcggaggatctggcggaggcggatctgggggcggaggctctttcgaacaagttcagcttcaacagcctggcgctgagctggtcaaacctggcgcttctgtgaagatgagctgcaaagccagcggctacgccttcagcagctactggatcaactggatgaagcagaaacccggccagggactcgaatggatcggccaaatctatcccggcgacggcgacaccaactacaacggcaagttcaagggcagagccacactgaccgccgatacctctagcagcacagcctacatgcagctgagcagcctgaccagcgaagatagcgccgtgtacttctgtgcccggtccatcacaacagtcgtgggctgcgctatggactattggggccagggaacaagcgtgaccgtgtctagtacgcgtgagcagaaactgatctcggaagaggatgggagcggcatccagaaccctgatcctgccgtgtaccagctgcgggatagcaagagcagcgacaagagcgtgtgtctgttcaccgacttcgacagccagaccaacgtgtcccagagcaaggactccgacgtgtacatcaccgataagaccgtgctggacatgcggagcatggacttcaagagcaactccgccgtggcctggtccaacaagtccgatttcgcctgcgccaacgccttcaacaacagcattatccccgaggacacattcttcccaagccccgagagcagctgcggtacccagagttttgggttgttggaccctaaattgtgctatctgttggacggaatcctgttcatttacggagtgatcctgaccgcattgttcctgaggagcaagcggtcacggctgctccacagcgattacatgaatatgacaccacgaagaccgggtcctactcgcaaacactaccaaccctacgcacctccccgcgactttgcagcgtaccgatctcgggttaagttttccagatccgcagacgcacccgcttaccaacaagggcagaaccaactctacaatgaacttaatttggggcggagggaagagtacgacgttctggacaaaaggaggggacgagatcccgagatgggcggaaagcctcagcgaaggaagaatccgcaagaggggctttataacgaactccagaaagataaaatggcagaagcctatagtgagattgggatgaagggagaaaggaggaggggtaaaggtcacgatgggttgtaccaaggattgagcacagccactaaagatacctatgatgcgctccacatgcaggccctgccgccaaga

SEQ ID NO: 4814 - DNA, 3717 bp, Artificial Sequence
  Synthetic Polynucloetide
atggccttaccagtgaccgccttgctcctgccgctggccttgctgctccacgccgccaggccgggcatgcggactgaagacctcccaaaggctgtggtgttcctggagcctcaatggtacagggtgctggagaaggacagtgtgactctgaagtgccagggagcctactcccctgaggacaattccacacagtggtttcacaatgagagcctcatctcaagccaggcctccagctacttcattgacgctgccacagtggacgacagtggagagtacaggtgccagacaaacctctccaccctcagtgacccggtgcagctagaagtccatatcggctggctgttgctccaggcccctcggtgggtgttcaaggaggaagaccctattcacctgaggtgtcacagctggaagaacactgctctgcataaggtcacatatttacagaatggcaaaggcaggaagtattttcatcataattctgacttctacattccaaaagccacactcaaagacagcggctcctacttctgcagggggcttgttgggagtaaaaatgtgtcttcagagactgtgaacatcaccatcactcaaggtttggcagtgtcaaccatctcatcattctttccacctggctaccaaggtaccggcggaggcggatctggcggcggaggtagcggtggcggaggatctgaattcgacatccagatgacacagagccctagcagcctgtctgccagcgtgggagacagagtgaccatcacatgcaaggccagcgaccacatcaacaactggctggcctggtatcagcagaagcctggacaggcccctaagctgctgatctacggcgctaccacactggaaacaggcgtgcccagcagattttctggcagcggctctggcaccgactacaccctgacaatatccagcctccagcctgaggacttcgccacctactactgtcagcagagctggaacaccccttggacattcggccagggcaccaagctggaaatcaagagactcgaggggaaaccaattcccaaccctcttctgggactggattcaaccggcagcggcgaggacctgaagaacgtgttcccacctgaggtggccgtgttcgagcctagcgaggccgagatcagccacacccagaaagccaccctcgtgtgcctggctaccggcttctaccccgaccatgtggaactgtcttggtgggtcaacggcaaagaggtgcacagcggcgtgtctaccgacccccagccactgaaagaacagcccgccctgaacgacagccggtactgcctgagcagcagactgagagtgtccgccaccttctggcagaacccccggaaccacttcagatgccaggtgcagttctacggcctgagcgagaacgacgagtggacccaggacagagccaagcccgtgacccagatcgtgtctgccgaagcctggggcagagccgattgcggatcccagagcttcggcctgctggaccccaagctgtgctacctgctggatggcatcctgttcatctacggcgtgatcctgaccgccctgttcctgagagtgaagttcagcagaagcgccgacgcccctgcctaccagcagggacagaaccaactgtacaacgagctgaacctgggcagacgggaagagtacgacgtgctggacaagcggagaggcagggaccctgagatgggcggaaagccccagcggagaaagaacccccaggaaggactgtataacgaactccagaaagacaagatggccgaagcctacagcgagatcggcatgaagggcgagcggagaagaggcaagggccacgatggcctgtaccagggcctgagcaccgccaccaaggacacctatgacgccctgcacatgcaggccctgcctccaagaagggccaagcgatctggatctggagcaacaaacttctcactactcaaacaagcaggtgacgtggaggagaatcccgggcctactagtatggactggatttggcgcatccttttccttgtcggcgctgctaccggcgcccattccgggccccaggttcagctgcaagagtctggcggaggacttgctcaagctggcggaagcctgagactgtcttgtgccgcctctggcagaaccttcagcatgggctggtttagacaggcccctggcaaagagagagagttcgtcgccgccatcacatacagcggcggcagcccttactacgcctcttctgtcagaggccggttcaccatcagccgggacaacgccaagaacaccgtgtacctccagatgaacagcctgaagccagaggacaccgccgtgtactactgtgccgccaatccaacctacggcagcgactggaatgccgagaattggggccagggcacccaagtgacagtgtctagtggatccggcggcggaggatctggcggaggcggatctgggggcggaggctctttcgaacaagttcagcttcaacagcctggcgctgagctggtcaaacctggcgcttctgtgaagatgagctgcaaagccagcggctacgccttcagcagctactggatcaactggatgaagcagaaacccggccagggactcgaatggatcggccaaatctatcccggcgacggcgacaccaactacaacggcaagttcaagggcagagccacactgaccgccgatacctctagcagcacagcctacatgcagctgagcagcctgaccagcgaagatagcgccgtgtacttctgtgcccggtccatcacaacagtcgtgggctgcgctatggactattggggccagggaacaagcgtgaccgtgtctagtacgcgtgagcagaaactgatctcggaagaggatctggggagcggcatccagaaccctgatcctgccgtgtaccagctgcgggatagcaagagcagcgacaagagcgtgtgtctgttcaccgacttcgacagccagaccaacgtgtcccagagcaaggactccgacgtgtacatcaccgataagaccgtgctggacatgcggagcatggacttcaagagcaactccgccgtggcctggtccaacaagtccgatttcgcctgcgccaacgccttcaacaacagcattatccccgaggacacattcttcccaagccccgagagcagctgcggtacccagagttttgggttgttggaccctaaattgtgctatctgttggacggaatcctgttcatttacggagtgatcctgaccgcattgttcctgaagagaggccggaagaagctgctgtacatcttcaagcagcctttcatgcggcccgtgcagaccacccaggaagaggacggctgctcctgccggttccccgaggaagaagaaggcggctgcgagctgcgggttaagttttccagatccgcagacgcacccgcttaccaacaagggcagaaccaactctacaatgaacttaatttggggcggagggaagagtacgacgttctggacaaaaggaggggacgagatcccgagatgggcggaaagcctcagcgaaggaagaatccgcaagaggggctttataacgaactccagaaagataaaatggcagaagcctatagtgagattgggatgaagggagaaaggaggaggggtaaaggtcacgatgggttgtaccaaggattgagcacagccactaaagatacctatgatgcgctccacatgcaggccctgccgccaaga

SEQ ID NO: 4815 - DNA, 3843 bp, Artificial Sequence
  Synthetic Polynucloetide
atggccttaccagtgaccgccttgctcctgccgctggccttgctgctccacgccgccaggccgggcatgcggactgaagacctcccaaaggctgtggtgttcctggagcctcaatggtacagggtgctggagaaggacagtgtgactctgaagtgccagggagcctactcccctgaggacaattccacacagtggtttcacaatgagagcctcatctcaagccaggcctccagctacttcattgacgctgccacagtggacgacagtggagagtacaggtgccagacaaacctctccaccctcagtgacccggtgcagctagaagtccatatcggctggctgttgctccaggcccctcggtgggtgttcaaggaggaagaccctattcacctgaggtgtcacagctggaagaacactgctctgcataaggtcacatatttacagaatggcaaaggcaggaagtattttcatcataattctgacttctacattccaaaagccacactcaaagacagcggctcctacttctgcagggggcttgttgggagtaaaaatgtgtcttcagagactgtgaacatcaccatcactcaaggtttggcagtgtcaaccatctcatcattctttccacctggctaccaaggtaccggcggaggcggatctggcggcggaggtagcggtggcggaggatctgaattcgacatccagatgacacagagccctagcagcctgtctgccagcgtgggagacagagtgaccatcacatgcaaggccagcgaccacatcaacaactggctggcctggtatcagcagaagcctggacaggcccctaagctgctgatctacggcgctaccacactggaaacaggcgtgcccagcagattttctggcagcggctctggcaccgactacaccctgacaatatccagcctccagcctgaggacttcgccacctactactgtcagcagagctggaacaccccttggacattcggccagggcaccaagctggaaatcaagagactcgaggggaaaccaattcccaaccctcttctgggactggattcaaccggcagcggcgaggacctgaagaacgtgttcccacctgaggtggccgtgttcgagcctagcgaggccgagatcagccacacccagaaagccaccctcgtgtgcctggctaccggcttctaccccgaccatgtggaactgtcttggtgggtcaacggcaaagaggtgcacagcggcgtgtctaccgacccccagccactgaaagaacagcccgccctgaacgacagccggtactgcctgagcagcagactgagagtgtccgccaccttctggcagaacccccggaaccacttcagatgccaggtgcagttctacggcctgagcgagaacgacgagtggacccaggacagagccaagcccgtgacccagatcgtgtctgccgaagcctggggcagagccgattgcggatcccagagcttcggcctgctggaccccaagctgtgctacctgctggatggcatcctgttcatctacggcgtgatcctgaccgccctgttcctgaaacggggcagaaagaaactcctgtatatattcaaacaaccatttatgagaccagtacaaactactcaagaggaagatggctgtagctgccgatttccagaagaagaagaaggaggatgtgaactgagagtgaagttcagcagaagcgccgacgcccctgcctaccagcagggacagaaccaactgtacaacgagctgaacctgggcagacgggaagagtacgacgtgctggacaagcggagaggcagggaccctgagatgggcggaaagccccagcggagaaagaacccccaggaaggactgtataacgaactccagaaagacaagatggccgaagcctacagcgagatcggcatgaagggcgagcggagaagaggcaagggccacgatggcctgtaccagggcctgagcaccgccaccaaggacacctatgacgccctgcacatgcaggccctgcctccaagaagggccaagcgatctggatctggagcaacaaacttctcactactcaaacaagcaggtgacgtggaggagaatcccgggcctactagtatggactggatttggcgcatccttttccttgtcggcgctgctaccggcgcccattccgggccccaggttcagctgcaagagtctggcggaggacttgctcaagctggcggaagcctgagactgtcttgtgccgcctctggcagaaccttcagcatgggctggtttagacaggcccctggcaaagagagagagttcgtcgccgccatcacatacagcggcggcagcccttactacgcctcttctgtcagaggccggttcaccatcagccgggacaacgccaagaacaccgtgtacctccagatgaacagcctgaagccagaggacaccgccgtgtactactgtgccgccaatccaacctacggcagcgactggaatgccgagaattggggccagggcacccaagtgacagtgtctagtggatccggcggcggaggatctggcggaggcggatctgggggcggaggctctttcgaacaagttcagcttcaacagcctggcgctgagctggtcaaacctggcgcttctgtgaagatgagctgcaaagccagcggctacgccttcagcagctactggatcaactggatgaagcagaaacccggccagggactcgaatggatcggccaaatctatcccggcgacggcgacaccaactacaacggcaagttcaagggcagagccacactgaccgccgatacctctagcagcacagcctacatgcagctgagcagcctgaccagcgaagatagcgccgtgtacttctgtgcccggtccatcacaacagtcgtgggctgcgctatggactattggggccagggaacaagcgtgaccgtgtctagtacgcgtgagcagaaactgatctcggaagaggatctggggagcggcatccagaaccctgatcctgccgtgtaccagctgcgggatagcaagagcagcgacaagagcgtgtgtctgttcaccgacttcgacagccagaccaacgtgtcccagagcaaggactccgacgtgtacatcaccgataagaccgtgctggacatgcggagcatggacttcaagagcaactccgccgtggcctggtccaacaagtccgatttcgcctgcgccaacgccttcaacaacagcattatccccgaggacacattcttcccaagccccgagagcagctgcggtacccagagttttgggttgttggaccctaaattgtgctatctgttggacggaatcctgttcatttacggagtgatcctgaccgcattgttcctgaagagaggccggaagaagctgctgtacatcttcaagcagcctttcatgcggcccgtgcagaccacccaggaagaggacggctgctcctgccggttccccgaggaagaagaaggcggctgcgagctgcgggttaagttttccagatccgcagacgcacccgcttaccaacaagggcagaaccaactctacaatgaacttaatttggggcggagggaagagtacgacgttctggacaaaaggaggggacgagatcccgagatgggcggaaagcctcagcgaaggaagaatccgcaagaggggctttataacgaactccagaaagataaaatggcagaagcctatagtgagattgggatgaagggagaaaggaggaggggtaaaggtcacgatgggttgtaccaaggattgagcacagccactaaagatacctatgatgcgctccacatgcaggccctgccgccaaga

SEQ ID NO: 4816 - DNA, 3516 bp, Artificial Sequence
  Synthetic Polynucloetide
atggccttaccagtgaccgccttgctcctgccgctggccttgctgctccacgccgccaggccgggcatgcggactgaagacctcccaaaggctgtggtgttcctggagcctcaatggtacagggtgctggagaaggacagtgtgactctgaagtgccagggagcctactcccctgaggacaattccacacagtggtttcacaatgagagcctcatctcaagccaggcctccagctacttcattgacgctgccacagtggacgacagtggagagtacaggtgccagacaaacctctccaccctcagtgacccggtgcagctagaagtccatatcggctggctgttgctccaggcccctcggtgggtgttcaaggaggaagaccctattcacctgaggtgtcacagctggaagaacactgctctgcataaggtcacatatttacagaatggcaaaggcaggaagtattttcatcataattctgacttctacattccaaaagccacactcaaagacagcggctcctacttctgcagggggcttgttgggagtaaaaatgtgtcttcagagactgtgaacatcaccatcactcaaggtttggcagtgtcaaccatctcatcattctttccacctggctaccaaggtaccggcggaggcggatctggcggcggaggtagcggtggcggaggatctgaattcgacatccagatgacacagagccctagcagcctgtctgccagcgtgggagacagagtgaccatcacatgcaaggccagcgaccacatcaacaactggctggcctggtatcagcagaagcctggacaggcccctaagctgctgatctacggcgctaccacactggaaacaggcgtgcccagcagattttctggcagcggctctggcaccgactacaccctgacaatatccagcctccagcctgaggacttcgccacctactactgtcagcagagctggaacaccccttggacattcggccagggcaccaagctggaaatcaagagactcgagcagagcttcggcctgctggaccccaagctgtgctacctgctggatggcatcctgttcatctacggcgtgatcctgaccgccctgttcctgagagtgaagttcagcagaagcgccgacgcccctgcctaccagcagggacagaaccaactgtacaacgagctgaacctgggcagacgggaagagtacgacgtgctggacaagcggagaggcagggaccctgagatgggcggaaagccccagcggagaaagaacccccaggaaggactgtataacgaactccagaaagacaagatggccgaagcctacagcgagatcggcatgaagggcgagcggagaagaggcaagggccacgatggcctgtaccagggcctgagcaccgccaccaaggacacctatgacgccctgcacatgcaggccctgcctccaagaagggccaagcgatctggatctggagcaacaaacttctcactactcaaacaagcaggtgacgtggaggagaatcccgggcctactagtatggactggatttggcgcatccttttccttgtcggcgctgctaccggcgcccattccgggccccaggttcagctgcaagagtctggcggaggacttgctcaagctggcggaagcctgagactgtcttgtgccgcctctggcagaaccttcagcatgggctggtttagacaggcccctggcaaagagagagagttcgtcgccgccatcacatacagcggcggcagcccttactacgcctcttctgtcagaggccggttcaccatcagccgggacaacgccaagaacaccgtgtacctccagatgaacagcctgaagccagaggacaccgccgtgtactactgtgccgccaatccaacctacggcagcgactggaatgccgagaattggggccagggcacccaagtgacagtgtctagtggatccggcggcggaggatctggcggaggcggatctgggggcggaggctctttcgaacaagttcagcttcaacagcctggcgctgagctggtcaaacctggcgcttctgtgaagatgagctgcaaagccagcggctacgccttcagcagctactggatcaactggatgaagcagaaacccggccagggactcgaatggatcggccaaatctatcccggcgacggcgacaccaactacaacggcaagttcaagggcagagccacactgaccgccgatacctctagcagcacagcctacatgcagctgagcagcctgaccagcgaagatagcgccgtgtacttctgtgcccggtccatcacaacagtcgtgggctgcgctatggactattggggccagggaacaagcgtgaccgtgtctagtacgcgtcagagttttgggttgttggaccctaaattgtgctatctgttggacggaatcctgttcatttacggagtgatcctgaccgcattgttcctgcgggttaagttttccagatccgcagacgcacccgcttaccaacaagggcagaaccaactctacaatgaacttaatttggggcggagggaagagtacgacgttctggacaaaaggaggggacgagatcccgagatgggcggaaagcctcagcgaaggaagaatccgcaagaggggctttataacgaactccagaaagataaaatggcagaagcctatagtgagattgggatgaagggagaaaggaggaggggtaaaggtcacgatgggttgtaccaaggattgagcacagccactaaagatacctatgatgcgctccacatgcaggccctgccgccaagacgcgccaagagaagcggatctggcgtgaagcagaccctgaatttcgacctgctgaagctggctggcgacgtggaatccaacccaggcccttctagaggccatatgaccgagtacaagcccacggtgcgcctcgccacccgcgacgacgtccccagggccgtacgcaccctcgccgccgcgttcgccgactaccccgccacgcgccacaccgtcgatccggaccgccacatcgagcgggtcaccgagctgcaagaactcttcctcacgcgcgtcgggctcgacatcggcaaggtgtgggtcgcggacgacggcgccgcggtggcggtctggaccacgccggagagcgtcgaagcgggggcggtgttcgccgagatcggcccgcgcatggccgagttgagcggttcccggctggccgcgcagcaacagatggaaggcctcctggcgccgcaccggcccaaggagcccgcgtggttcctggccaccgtcggcgtctcgcccgaccaccagggcaagggtctgggcagcgccgtcgtgctccccggagtggaggcggccgagcgcgccggggtgcccgccttcctggagacctccgcgccccgcaacctccccttctacgagcggctcggcttcaccgtcaccgccgacgtcgaggtgcccgaaggaccgcgcacctggtgcatgacccgcaagcccggtgcctga

SEQ ID NO: 4817 - DNA, 2988 bp, Artificial Sequence
  Synthetic Polynucloetide
atggccttaccagtgaccgccttgctcctgccgctggccttgctgctccacgccgccaggccgggcatgcggactgaagacctcccaaaggctgtggtgttcctggagcctcaatggtacagggtgctggagaaggacagtgtgactctgaagtgccagggagcctactcccctgaggacaattccacacagtggtttcacaatgagagcctcatctcaagccaggcctccagctacttcattgacgctgccacagtggacgacagtggagagtacaggtgccagacaaacctctccaccctcagtgacccggtgcagctagaagtccatatcggctggctgttgctccaggcccctcggtgggtgttcaaggaggaagaccctattcacctgaggtgtcacagctggaagaacactgctctgcataaggtcacatatttacagaatggcaaaggcaggaagtattttcatcataattctgacttctacattccaaaagccacactcaaagacagcggctcctacttctgcagggggcttgttgggagtaaaaatgtgtcttcagagactgtgaacatcaccatcactcaaggtttggcagtgtcaaccatctcatcattctttccacctggctaccaaggtaccggcggaggcggatctggcggcggaggtagcggtggcggaggatctgaattcgacatccagatgacacagagccctagcagcctgtctgccagcgtgggagacagagtgaccatcacatgcaaggccagcgaccacatcaacaactggctggcctggtatcagcagaagcctggacaggcccctaagctgctgatctacggcgctaccacactggaaacaggcgtgcccagcagattttctggcagcggctctggcaccgactacaccctgacaatatccagcctccagcctgaggacttcgccacctactactgtcagcagagctggaacaccccttggacattcggccagggcaccaagctggaaatcaagagactcgagggacagcctaaggccaatcctaccgtgacactgttccctccaagcagcgaagaactccaggccaacaaggccacacttgtgtgcctgatctccgacttctaccctggggctgtgacagtggcttggaaggccgatggatctcctgtgaaagccggcgtggaaaccaccaagccatccaagcagagcaacaacaaatacgccgccagctcctacctgagcctgacacctgagcagtggaagtcccacagatcctacagctgccaagtgacccacgaaggcagcaccgtggaaaagacagtggcccctacagagtgcagccccatcaagaccgatgtgattacaatggaccccaaggacaactgctccaaggacgccaacgataccctgctgctccagctgaccaacaccagcgcctactacatgtacttgttgctgctgctgaagtccgtggtgtacttcgccatcatcacatgctgcctgctgcggagaaccgccttctgctgcaacggcgagaagtctagggccaagcgatctggatctggagcaacaaacttctcactactcaaacaagcaggtgacgtggaggagaatcccgggcctactagtatggactggatttggcgcatccttttccttgtcggcgctgctaccggcgcccattccgggccccaggttcagctgcaagagtctggcggaggacttgctcaagctggcggaagcctgagactgtcttgtgccgcctctggcagaaccttcagcatgggctggtttagacaggcccctggcaaagagagagagttcgtcgccgccatcacatacagcggcggcagcccttactacgcctcttctgtcagaggccggttcaccatcagccgggacaacgccaagaacaccgtgtacctccagatgaacagcctgaagccagaggacaccgccgtgtactactgtgccgccaatccaacctacggcagcgactggaatgccgagaattggggccagggcacccaagtgacagtgtctagtggatccggcggcggaggatctggcggaggcggatctgggggcggaggctctttcgaacaagttcagcttcaacagcctggcgctgagctggtcaaacctggcgcttctgtgaagatgagctgcaaagccagcggctacgccttcagcagctactggatcaactggatgaagcagaaacccggccagggactcgaatggatcggccaaatctatcccggcgacggcgacaccaactacaacggcaagttcaagggcagagccacactgaccgccgatacctctagcagcacagcctacatgcagctgagcagcctgaccagcgaagatagcgccgtgtacttctgtgcccggtccatcacaacagtcgtgggctgcgctatggactattggggccagggaacaagcgtgaccgtgtctagtacgcgtgcctctacaaagggaccctccgtgtttcctctggctcccagcagcaagtctacaagcggaggaacagccgctctgggctgcctggtcaaggattactttcccgagcctgtgaccgtgtcctggaatagcggagcactgacaagcggcgtgcacacctttccagccgtgctgcaaagcagcggcctgtactctctgagcagcgtggtcacagtgcctagctctagcctgggcacccagacctacatctgcaatgtgaaccacaagcctagcaacaccaaggtggacaagagagtggaacccaagagctgtgaagtgaaaaccgactccaccgaccacgtgaagcccaaagagacagagaacaccaagcagcccagcaagagctgccacaagcccaaggccatcgtgcacaccgagaaagtgaacatgatgagcctgaccgtgctgggcctgcggatgctgttcgccaaaaccgtggccgtgaacttcctgctgaccgccaagctgttcttcctc

SEQ ID NO: 4818 - DNA, 2922 bp, Artificial Sequence
  Synthetic Polynucloetide
atggccttaccagtgaccgccttgctcctgccgctggccttgctgctccacgccgccaggccgggcatgcggactgaagacctcccaaaggctgtggtgttcctggagcctcaatggtacagggtgctggagaaggacagtgtgactctgaagtgccagggagcctactcccctgaggacaattccacacagtggtttcacaatgagagcctcatctcaagccaggcctccagctacttcattgacgctgccacagtggacgacagtggagagtacaggtgccagacaaacctctccaccctcagtgacccggtgcagctagaagtccatatcggctggctgttgctccaggcccctcggtgggtgttcaaggaggaagaccctattcacctgaggtgtcacagctggaagaacactgctctgcataaggtcacatatttacagaatggcaaaggcaggaagtattttcatcataattctgacttctacattccaaaagccacactcaaagacagcggctcctacttctgcagggggcttgttgggagtaaaaatgtgtcttcagagactgtgaacatcaccatcactcaaggtttggcagtgtcaaccatctcatcattctttccacctggctaccaaggtaccggcggaggcggatctggcggcggaggtagcggtggcggaggatctgaattcgacatccagatgacacagagccctagcagcctgtctgccagcgtgggagacagagtgaccatcacatgcaaggccagcgaccacatcaacaactggctggcctggtatcagcagaagcctggacaggcccctaagctgctgatctacggcgctaccacactggaaacaggcgtgcccagcagattttctggcagcggctctggcaccgactacaccctgacaatatccagcctccagcctgaggacttcgccacctactactgtcagcagagctggaacaccccttggacattcggccagggcaccaagctggaaatcaagagactcgagggacagcctaaggccaatcctaccgtgacactgttccctccaagcagcgaagaactccaggccaacaaggccacacttgtgtgcctgatctccgacttctaccctggggctgtgacagtggcttggaaggccgatggatctcctgtgaaagccggcgtggaaaccaccaagccatccaagcagagcaacaacaaatacgccgccagctcctacctgagcctgacacctgagcagtggaagtcccacagatcctacagctgccaagtgacccacgaaggcagcaccgtggaaaagacagtggcccctacagagtgcagcggcagagccgattgcggcatcaccagcgccagctaccaccagggcgtgctgagcgccaccatcctgtacgagatcctgctgggcaaggccaccctgtacgccgtgctggtgtctgccctggtgctgatggctatggtcaagcggaaggacagccggggaagggccaagcgatctggatctggagcaacaaacttctcactactcaaacaagcaggtgacgtggaggagaatcccgggcctactagtatggactggatttggcgcatccttttccttgtcggcgctgctaccggcgcccattccgggccccaggttcagctgcaagagtctggcggaggacttgctcaagctggcggaagcctgagactgtcttgtgccgcctctggcagaaccttcagcatgggctggtttagacaggcccctggcaaagagagagagttcgtcgccgccatcacatacagcggcggcagcccttactacgcctcttctgtcagaggccggttcaccatcagccgggacaacgccaagaacaccgtgtacctccagatgaacagcctgaagccagaggacaccgccgtgtactactgtgccgccaatccaacctacggcagcgactggaatgccgagaattggggccagggcacccaagtgacagtgtctagtggatccggcggcggaggatctggcggaggcggatctgggggcggaggctctttcgaacaagttcagcttcaacagcctggcgctgagctggtcaaacctggcgcttctgtgaagatgagctgcaaagccagcggctacgccttcagcagctactggatcaactggatgaagcagaaacccggccagggactcgaatggatcggccaaatctatcccggcgacggcgacaccaactacaacggcaagttcaagggcagagccacactgaccgccgatacctctagcagcacagcctacatgcagctgagcagcctgaccagcgaagatagcgccgtgtacttctgtgcccggtccatcacaacagtcgtgggctgcgctatggactattggggccagggaacaagcgtgaccgtgtctagtacgcgtgcctctacaaagggaccctccgtgtttcctctggctcccagcagcaagtctacaagcggaggaacagccgctctgggctgcctggtcaaggattactttcccgagcctgtgaccgtgtcctggaatagcggagcactgacaagcggcgtgcacacctttccagccgtgctgcaaagcagcggcctgtactctctgagcagcgtggtcacagtgcctagctctagcctgggcacccagacctacatctgcaatgtgaaccacaagcctagcaacaccaaggtggacaagagagtggaacccaagagctgtatccccgaggacacattcttcccaagcagcgacgtgccctgcgacgtgaagctggtggaaaagagcttcgagacagacaccaacctgaacttccagaacctgagcgtgatcggcttcagaatcctgctgctgaaagtggccggctttaacctgctgatgaccctgcggctgtggtccagc

SEQ ID NO: 4819 - DNA, 2922 bp, Artificial Sequence
  Synthetic Polynucloetide
atggccttaccagtgaccgccttgctcctgccgctggccttgctgctccacgccgccaggccgggcatgcggactgaagacctcccaaaggctgtggtgttcctggagcctcaatggtacagggtgctggagaaggacagtgtgactctgaagtgccagggagcctactcccctgaggacaattccacacagtggtttcacaatgagagcctcatctcaagccaggcctccagctacttcattgacgctgccacagtggacgacagtggagagtacaggtgccagacaaacctctccaccctcagtgacccggtgcagctagaagtccatatcggctggctgttgctccaggcccctcggtgggtgttcaaggaggaagaccctattcacctgaggtgtcacagctggaagaacactgctctgcataaggtcacatatttacagaatggcaaaggcaggaagtattttcatcataattctgacttctacattccaaaagccacactcaaagacagcggctcctacttctgcagggggcttgttgggagtaaaaatgtgtcttcagagactgtgaacatcaccatcactcaaggtttggcagtgtcaaccatctcatcattctttccacctggctaccaaggtaccggcggaggcggatctggcggcggaggtagcggtggcggaggatctgaattcgacatccagatgacacagagccctagcagcctgtctgccagcgtgggagacagagtgaccatcacatgcaaggccagcgaccacatcaacaactggctggcctggtatcagcagaagcctggacaggcccctaagctgctgatctacggcgctaccacactggaaacaggcgtgcccagcagattttctggcagcggctctggcaccgactacaccctgacaatatccagcctccagcctgaggacttcgccacctactactgtcagcagagctggaacaccccttggacattcggccagggcaccaagctggaaatcaagagactcgagggacagcctaaggccaatcctaccgtgacactgttccctccaagcagcgaagaactccaggccaacaaggccacacttgtgtgcctgatctccgacttctaccctggggctgtgacagtggcttggaaggccgatggatctcctgtgaaagccggcgtggaaaccaccaagccatccaagcagagcaacaacaaatacgccgccagctcctacctgagcctgacacctgagcagtggaagtcccacagatcctacagctgccaagtgacccacgaaggcagcaccgtggaaaagacagtggcccctacagagtgcagcggcagagccgattgcggctttaccagcgagagctaccagcagggcgtgctgagcgccaccatcctgtacgagatcctgctgggcaaggccaccctgtacgccgtgctggtgtctgccctggtgctgatggctatggtcaagcggaaggacagccggggaagggccaagcgatctggatctggagcaacaaacttctcactactcaaacaagcaggtgacgtggaggagaatcccgggcctactagtatggactggatttggcgcatccttttccttgtcggcgctgctaccggcgcccattccgggccccaggttcagctgcaagagtctggcggaggacttgctcaagctggcggaagcctgagactgtcttgtgccgcctctggcagaaccttcagcatgggctggtttagacaggcccctggcaaagagagagagttcgtcgccgccatcacatacagcggcggcagcccttactacgcctcttctgtcagaggccggttcaccatcagccgggacaacgccaagaacaccgtgtacctccagatgaacagcctgaagccagaggacaccgccgtgtactactgtgccgccaatccaacctacggcagcgactggaatgccgagaattggggccagggcacccaagtgacagtgtctagtggatccggcggcggaggatctggcggaggcggatctgggggcggaggctctttcgaacaagttcagcttcaacagcctggcgctgagctggtcaaacctggcgcttctgtgaagatgagctgcaaagccagcggctacgccttcagcagctactggatcaactggatgaagcagaaacccggccagggactcgaatggatcggccaaatctatcccggcgacggcgacaccaactacaacggcaagttcaagggcagagccacactgaccgccgatacctctagcagcacagcctacatgcagctgagcagcctgaccagcgaagatagcgccgtgtacttctgtgcccggtccatcacaacagtcgtgggctgcgctatggactattggggccagggaacaagcgtgaccgtgtctagtacgcgtgcctctacaaagggaccctccgtgtttcctctggctcccagcagcaagtctacaagcggaggaacagccgctctgggctgcctggtcaaggattactttcccgagcctgtgaccgtgtcctggaatagcggagcactgacaagcggcgtgcacacctttccagccgtgctgcaaagcagcggcctgtactctctgagcagcgtggtcacagtgcctagctctagcctgggcacccagacctacatctgcaatgtgaaccacaagcctagcaacaccaaggtggacaagagagtggaacccaagagctgtatccccgaggacacattcttcccaagccccgagagcagctgcgacgtgaagctggtggaaaagagcttcgagacagacaccaacctgaacttccagaacctgagcgtgatcggcttcagaatcctgctgctgaaagtggccggctttaacctgctgatgaccctgcggctgtggtccagc

SEQ ID NO: 4820 - DNA, 2823 bp, Artificial Sequence
  Synthetic Polynucloetide
atggccttaccagtgaccgccttgctcctgccgctggccttgctgctccacgccgccaggccgggcatgcggactgaagacctcccaaaggctgtggtgttcctggagcctcaatggtacagggtgctggagaaggacagtgtgactctgaagtgccagggagcctactcccctgaggacaattccacacagtggtttcacaatgagagcctcatctcaagccaggcctccagctacttcattgacgctgccacagtggacgacagtggagagtacaggtgccagacaaacctctccaccctcagtgacccggtgcagctagaagtccatatcggctggctgttgctccaggcccctcggtgggtgttcaaggaggaagaccctattcacctgaggtgtcacagctggaagaacactgctctgcataaggtcacatatttacagaatggcaaaggcaggaagtattttcatcataattctgacttctacattccaaaagccacactcaaagacagcggctcctacttctgcagggggcttgttgggagtaaaaatgtgtcttcagagactgtgaacatcaccatcactcaaggtttggcagtgtcaaccatctcatcattctttccacctggctaccaactcgagggacagcctaaggccaatcctaccgtgacactgttccctccaagcagcgaagaactccaggccaacaaggccacacttgtgtgcctgatctccgacttctaccctggggctgtgacagtggcttggaaggccgatggatctcctgtgaaagccggcgtggaaaccaccaagccatccaagcagagcaacaacaaatacgccgccagctcctacctgagcctgacacctgagcagtggaagtcccacagatcctacagctgccaagtgacccacgaaggcagcaccgtggaaaagacagtggcccctacagagtgcagcggcagagccgattgcggctttaccagcgagagctaccagcagggcgtgctgagcgccaccatcctgtacgagatcctgctgggcaaggccaccctgtacgccgtgctggtgtctgccctggtgctgatggctatggtcaagcggaaggacagccggggaagggccaagcgatctggatctggagcaacaaacttctcactactcaaacaagcaggtgacgtggaggagaatcccgggcctactagtatggactggatttggcgcatccttttccttgtcggcgctgctaccggcgcgcattccgggccccaggttcagctgcaagagtctggcggaggacttgctcaagctggcggaagcctgagactgtcttgtgccgcctctggcagaaccttcagcatgggctggtttagacaggcccctggcaaagagagagagttcgtcgccgccatcacatacagcggcggcagcccttactacgcctcttctgtcagaggccggttcaccatcagccgggacaacgccaagaacaccgtgtacctccagatgaacagcctgaagccagaggacaccgccgtgtactactgtgccgccaatccaacctacggcagcgactggaatgccgagaattggggccagggcacccaagtgacagtgtctagtacgcgtgcctctacaaagggaccctccgtgtttcctctggctcccagcagcaagtctacaagcggaggaacagccgctctgggctgcctggtcaaggattactttcccgagcctgtgaccgtgtcctggaatagcggagcactgacaagcggcgtgcacacctttccagccgtgctgcaaagcagcggcctgtactctctgagcagcgtggtcacagtgcctagctctagcctgggcacccagacctacatctgcaatgtgaaccacaagcctagcaacaccaaggtggacaagagagtggaacccaagagctgtatccccgaggacacattcttcccaagccccgagagcagctgcgacgtgaagctggtggaaaagagcttcgagacagacaccaacctgaacttccagaacctgagcgtgatcggcttcagaatcctgctgctgaaagtggccggctttaacctgctgatgaccctgcggctgtggtccagccgcgccaagagaagcggatctggcgtgaagcagaccctgaatttcgacctgctgaagctggctggcgacgtggaatccaacccaggcccttctagaggccatatgaccgagtacaagcccacggtgcgcctcgccacccgcgacgacgtccccagggccgtacgcaccctcgccgccgcgttcgccgactaccccgccacgcgccacaccgtcgatccggaccgccacatcgagcgggtcaccgagctgcaagaactcttcctcacgcgcgtcgggctcgacatcggcaaggtgtgggtcgcggacgacggcgccgcggtggcggtctggaccacgccggagagcgtcgaagcgggggcggtgttcgccgagatcggcccgcgcatggccgagttgagcggttcccggctggccgcgcagcaacagatggaaggcctcctggcgccgcaccggcccaaggagcccgcgtggttcctggccaccgtcggcgtctcgcccgaccaccagggcaagggtctgggcagcgccgtcgtgctccccggagtggaggcggccgagcgcgccggggtgcccgccttcctggagacctccgcgccccgcaacctccccttctacgagcggctcggcttcaccgtcaccgccgacgtcgaggtgcccgaaggaccgcgcacctggtgcatgacccgcaagcccggtgcctga

SEQ ID NO: 4821 - DNA, 2121 bp, Artificial Sequence
  Synthetic Polynucloetide
atggccttaccagtgaccgccttgctcctgccgctggccttgctgctccacgccgccaggccgggcatgcggactgaagacctcccaaaggctgtggtgttcctggagcctcaatggtacagggtgctggagaaggacagtgtgactctgaagtgccagggagcctactcccctgaggacaattccacacagtggtttcacaatgagagcctcatctcaagccaggcctccagctacttcattgacgctgccacagtggacgacagtggagagtacaggtgccagacaaacctctccaccctcagtgacccggtgcagctagaagtccatatcggctggctgttgctccaggcccctcggtgggtgttcaaggaggaagaccctattcacctgaggtgtcacagctggaagaacactgctctgcataaggtcacatatttacagaatggcaaaggcaggaagtattttcatcataattctgacttctacattccaaaagccacactcaaagacagcggctcctacttctgcagggggcttgttgggagtaaaaatgtgtcttcagagactgtgaacatcaccatcactcaaggtttggcagtgtcaaccatctcatcattctttccacctggctaccaactcgagggacagcctaaggccaatcctaccgtgacactgttccctccaagcagcgaagaactccaggccaacaaggccacacttgtgtgcctgatctccgacttctaccctggggctgtgacagtggcttggaaggccgatggatctcctgtgaaagccggcgtggaaaccaccaagccatccaagcagagcaacaacaaatacgccgccagctcctacctgagcctgacacctgagcagtggaagtcccacagatcctacagctgccaagtgacccacgaaggcagcaccgtggaaaagacagtggcccctacagagtgcagcggcagagccgattgcggctttaccagcgagagctaccagcagggcgtgctgagcgccaccatcctgtacgagatcctgctgggcaaggccaccctgtacgccgtgctggtgtctgccctggtgctgatggctatggtcaagcggaaggacagccggggaagggccaagcgatctggatctggagcaacaaacttctcactactcaaacaagcaggtgacgtggaggagaatcccgggcctactagtatggactggatttggcgcatccttttccttgtcggcgctgctaccggcgcgcattccgggccccaggttcagctgcaagagtctggcggaggacttgctcaagctggcggaagcctgagactgtcttgtgccgcctctggcagaaccttcagcatgggctggtttagacaggcccctggcaaagagagagagttcgtcgccgccatcacatacagcggcggcagcccttactacgcctcttctgtcagaggccggttcaccatcagccgggacaacgccaagaacaccgtgtacctccagatgaacagcctgaagccagaggacaccgccgtgtactactgtgccgccaatccaacctacggcagcgactggaatgccgagaattggggccagggcacccaagtgacagtgtctagtacgcgtgcctctacaaagggaccctccgtgtttcctctggctcccagcagcaagtctacaagcggaggaacagccgctctgggctgcctggtcaaggattactttcccgagcctgtgaccgtgtcctggaatagcggagcactgacaagcggcgtgcacacctttccagccgtgctgcaaagcagcggcctgtactctctgagcagcgtggtcacagtgcctagctctagcctgggcacccagacctacatctgcaatgtgaaccacaagcctagcaacaccaaggtggacaagagagtggaacccaagagctgtatccccgaggacacattcttcccaagccccgagagcagctgcgacgtgaagctggtggaaaagagcttcgagacagacaccaacctgaacttccagaacctgagcgtgatcggcttcagaatcctgctgctgaaagtggccggctttaacctgctgatgaccctgcggctgtggtccagc

SEQ ID NO: 4822 - DNA, 2208 bp, Artificial Sequence
  Synthetic Polynucloetide
atggccttaccagtgaccgccttgctcctgccgctggccttgctgctccacgccgccaggccgggcatgcggactgaagacctcccaaaggctgtggtgttcctggagcctcaatggtacagggtgctggagaaggacagtgtgactctgaagtgccagggagcctactcccctgaggacaattccacacagtggtttcacaatgagagcctcatctcaagccaggcctccagctacttcattgacgctgccacagtggacgacagtggagagtacaggtgccagacaaacctctccaccctcagtgacccggtgcagctagaagtccatatcggctggctgttgctccaggcccctcggtgggtgttcaaggaggaagaccctattcacctgaggtgtcacagctggaagaacactgctctgcataaggtcacatatttacagaatggcaaaggcaggaagtattttcatcataattctgacttctacattccaaaagccacactcaaagacagcggctcctacttctgcagggggcttgttgggagtaaaaatgtgtcttcagagactgtgaacatcaccatcactcaaggtttggcagtgtcaaccatctcatcattctttccacctggctaccaactcgagggatctggcagagccgattgcggctttaccagcgagagctaccagcagggcgtgctgagcgccaccatcctgtacgagatcctgctgggcaaggccaccctgtacgccgtgctggtgtctgccctggtgctgatggctatggtcaagcggaaggacagccggggaagggccaagcgatctggatctggagcaacaaacttctcactactcaaacaagcaggtgacgtggaggagaatcccgggcctactagtatggactggatttggcgcatccttttccttgtcggcgctgctaccggcgcgcattccgggccccaggttcagctgcaagagtctggcggaggacttgctcaagctggcggaagcctgagactgtcttgtgccgcctctggcagaaccttcagcatgggctggtttagacaggcccctggcaaagagagagagttcgtcgccgccatcacatacagcggcggcagcccttactacgcctcttctgtcagaggccggttcaccatcagccgggacaacgccaagaacaccgtgtacctccagatgaacagcctgaagccagaggacaccgccgtgtactactgtgccgccaatccaacctacggcagcgactggaatgccgagaattggggccagggcacccaagtgacagtgtctagtacgcgtggcagcatccccgaggacacattcttcccaagccccgagagcagctgcgacgtgaagctggtggaaaagagcttcgagacagacaccaacctgaacttccagaacctgagcgtgatcggcttcagaatcctgctgctgaaagtggccggctttaacctgctgatgaccctgcggctgtggtccagccgcgccaagagaagcggatctggcgtgaagcagaccctgaatttcgacctgctgaagctggctggcgacgtggaatccaacccaggcccttctagaggccatatgaccgagtacaagcccacggtgcgcctcgccacccgcgacgacgtccccagggccgtacgcaccctcgccgccgcgttcgccgactaccccgccacgcgccacaccgtcgatccggaccgccacatcgagcgggtcaccgagctgcaagaactcttcctcacgcgcgtcgggctcgacatcggcaaggtgtgggtcgcggacgacggcgccgcggtggcggtctggaccacgccggagagcgtcgaagcgggggcggtgttcgccgagatcggcccgcgcatggccgagttgagcggttcccggctggccgcgcagcaacagatggaaggcctcctggcgccgcaccggcccaaggagcccgcgtggttcctggccaccgtcggcgtctcgcccgaccaccagggcaagggtctgggcagcgccgtcgtgctccccggagtggaggcggccgagcgcgccggggtgcccgccttcctggagacctccgcgccccgcaacctccccttctacgagcggctcggcttcaccgtcaccgccgacgtcgaggtgcccgaaggaccgcgcacctggtgcatgacccgcaagcccggtgcctga

SEQ ID NO: 4823 - DNA, 1506 bp, Artificial Sequence
  Synthetic Polynucloetide
atggccttaccagtgaccgccttgctcctgccgctggccttgctgctccacgccgccaggccgggcatgcggactgaagacctcccaaaggctgtggtgttcctggagcctcaatggtacagggtgctggagaaggacagtgtgactctgaagtgccagggagcctactcccctgaggacaattccacacagtggtttcacaatgagagcctcatctcaagccaggcctccagctacttcattgacgctgccacagtggacgacagtggagagtacaggtgccagacaaacctctccaccctcagtgacccggtgcagctagaagtccatatcggctggctgttgctccaggcccctcggtgggtgttcaaggaggaagaccctattcacctgaggtgtcacagctggaagaacactgctctgcataaggtcacatatttacagaatggcaaaggcaggaagtattttcatcataattctgacttctacattccaaaagccacactcaaagacagcggctcctacttctgcagggggcttgttgggagtaaaaatgtgtcttcagagactgtgaacatcaccatcactcaaggtttggcagtgtcaaccatctcatcattctttccacctggctaccaactcgagggatctggcagagccgattgcggctttaccagcgagagctaccagcagggcgtgctgagcgccaccatcctgtacgagatcctgctgggcaaggccaccctgtacgccgtgctggtgtctgccctggtgctgatggctatggtcaagcggaaggacagccggggaagggccaagcgatctggatctggagcaacaaacttctcactactcaaacaagcaggtgacgtggaggagaatcccgggcctactagtatggactggatttggcgcatccttttccttgtcggcgctgctaccggcgcgcattccgggccccaggttcagctgcaagagtctggcggaggacttgctcaagctggcggaagcctgagactgtcttgtgccgcctctggcagaaccttcagcatgggctggtttagacaggcccctggcaaagagagagagttcgtcgccgccatcacatacagcggcggcagcccttactacgcctcttctgtcagaggccggttcaccatcagccgggacaacgccaagaacaccgtgtacctccagatgaacagcctgaagccagaggacaccgccgtgtactactgtgccgccaatccaacctacggcagcgactggaatgccgagaattggggccagggcacccaagtgacagtgtctagtacgcgtggcagcatccccgaggacacattcttcccaagccccgagagcagctgcgacgtgaagctggtggaaaagagcttcgagacagacaccaacctgaacttccagaacctgagcgtgatcggcttcagaatcctgctgctgaaagtggccggctttaacctgctgatgaccctgcggctgtggtccagc

SEQ ID NO: 4824 - DNA, 2235 bp, Artificial Sequence
  Synthetic Polynucloetide
atggccttaccagtgaccgccttgctcctgccgctggccttgctgctccacgccgccaggccgggcatgcggactgaagacctcccaaaggctgtggtgttcctggagcctcaatggtacagggtgctggagaaggacagtgtgactctgaagtgccagggagcctactcccctgaggacaattccacacagtggtttcacaatgagagcctcatctcaagccaggcctccagctacttcattgacgctgccacagtggacgacagtggagagtacaggtgccagacaaacctctccaccctcagtgacccggtgcagctagaagtccatatcggctggctgttgctccaggcccctcggtgggtgttcaaggaggaagaccctattcacctgaggtgtcacagctggaagaacactgctctgcataaggtcacatatttacagaatggcaaaggcaggaagtattttcatcataattctgacttctacattccaaaagccacactcaaagacagcggctcctacttctgcagggggcttgttgggagtaaaaatgtgtcttcagagactgtgaacatcaccatcactcaaggtttggcagtgtcaaccatctcatcattctttccacctggctaccaactcgaggacaaaactcacacatgcccaccgtgcccagcaggcagagccgattgcggctttaccagcgagagctaccagcagggcgtgctgagcgccaccatcctgtacgagatcctgctgggcaaggccaccctgtacgccgtgctggtgtctgccctggtgctgatggctatggtcaagcggaaggacagccggggaagggccaagcgatctggatctggagcaacaaacttctcactactcaaacaagcaggtgacgtggaggagaatcccgggcctactagtatggactggatttggcgcatccttttccttgtcggcgctgctaccggcgcgcattccgggccccaggttcagctgcaagagtctggcggaggacttgctcaagctggcggaagcctgagactgtcttgtgccgcctctggcagaaccttcagcatgggctggtttagacaggcccctggcaaagagagagagttcgtcgccgccatcacatacagcggcggcagcccttactacgcctcttctgtcagaggccggttcaccatcagccgggacaacgccaagaacaccgtgtacctccagatgaacagcctgaagccagaggacaccgccgtgtactactgtgccgccaatccaacctacggcagcgactggaatgccgagaattggggccagggcacccaagtgacagtgtctagtacgcgtggcagcatccccgaggacacattcttcccaagccccgagagcagctgcgacgtgaagctggtggaaaagagcttcgagacagacaccaacctgaacttccagaacctgagcgtgatcggcttcagaatcctgctgctgaaagtggccggctttaacctgctgatgaccctgcggctgtggtccagccgcgccaagagaagcggatctggcgtgaagcagaccctgaatttcgacctgctgaagctggctggcgacgtggaatccaacccaggcccttctagaggccatatgaccgagtacaagcccacggtgcgcctcgccacccgcgacgacgtccccagggccgtacgcaccctcgccgccgcgttcgccgactaccccgccacgcgccacaccgtcgatccggaccgccacatcgagcgggtcaccgagctgcaagaactcttcctcacgcgcgtcgggctcgacatcggcaaggtgtgggtcgcggacgacggcgccgcggtggcggtctggaccacgccggagagcgtcgaagcgggggcggtgttcgccgagatcggcccgcgcatggccgagttgagcggttcccggctggccgcgcagcaacagatggaaggcctcctggcgccgcaccggcccaaggagcccgcgtggttcctggccaccgtcggcgtctcgcccgaccaccagggcaagggtctgggcagcgccgtcgtgctccccggagtggaggcggccgagcgcgccggggtgcccgccttcctggagacctccgcgccccgcaacctccccttctacgagcggctcggcttcaccgtcaccgccgacgtcgaggtgcccgaaggaccgcgcacctggtgcatgacccgcaagcccggtgcctga

SEQ ID NO: 4825 - DNA, 2235 bp, Artificial Sequence
  Synthetic Polynucloetide
atggccttaccagtgaccgccttgctcctgccgctggccttgctgctccacgccgccaggccgggcatgcggactgaagacctcccaaaggctgtggtgttcctggagcctcaatggtacagggtgctggagaaggacagtgtgactctgaagtgccagggagcctactcccctgaggacaattccacacagtggtttcacaatgagagcctcatctcaagccaggcctccagctacttcattgacgctgccacagtggacgacagtggagagtacaggtgccagacaaacctctccaccctcagtgacccggtgcagctagaagtccatatcggctggctgttgctccaggcccctcggtgggtgttcaaggaggaagaccctattcacctgaggtgtcacagctggaagaacactgctctgcataaggtcacatatttacagaatggcaaaggcaggaagtattttcatcataattctgacttctacattccaaaagccacactcaaagacagcggctcctacttctgcagggggcttgttgggagtaaaaatgtgtcttcagagactgtgaacatcaccatcactcaaggtttggcagtgtcaaccatctcatcattctttccacctggctaccaactcgagggatctggcagagccgattgcggctttaccagcgagagctaccagcagggcgtgctgagcgccaccatcctgtacgagatcctgctgggcaaggccaccctgtacgccgtgctggtgtctgccctggtgctgatggctatggtcaagcggaaggacagccggggaagggccaagcgatctggatctggagcaacaaacttctcactactcaaacaagcaggtgacgtggaggagaatcccgggcctactagtatggactggatttggcgcatccttttccttgtcggcgctgctaccggcgcgcattccgggccccaggttcagctgcaagagtctggcggaggacttgctcaagctggcggaagcctgagactgtcttgtgccgcctctggcagaaccttcagcatgggctggtttagacaggcccctggcaaagagagagagttcgtcgccgccatcacatacagcggcggcagcccttactacgcctcttctgtcagaggccggttcaccatcagccgggacaacgccaagaacaccgtgtacctccagatgaacagcctgaagccagaggacaccgccgtgtactactgtgccgccaatccaacctacggcagcgactggaatgccgagaattggggccagggcacccaagtgacagtgtctagtacgcgtgataaaactcatacctgtccgccatgcccggcaatccccgaggacacattcttcccaagccccgagagcagctgcgacgtgaagctggtggaaaagagcttcgagacagacaccaacctgaacttccagaacctgagcgtgatcggcttcagaatcctgctgctgaaagtggccggctttaacctgctgatgaccctgcggctgtggtccagccgcgccaagagaagcggatctggcgtgaagcagaccctgaatttcgacctgctgaagctggctggcgacgtggaatccaacccaggcccttctagaggccatatgaccgagtacaagcccacggtgcgcctcgccacccgcgacgacgtccccagggccgtacgcaccctcgccgccgcgttcgccgactaccccgccacgcgccacaccgtcgatccggaccgccacatcgagcgggtcaccgagctgcaagaactcttcctcacgcgcgtcgggctcgacatcggcaaggtgtgggtcgcggacgacggcgccgcggtggcggtctggaccacgccggagagcgtcgaagcgggggcggtgttcgccgagatcggcccgcgcatggccgagttgagcggttcccggctggccgcgcagcaacagatggaaggcctcctggcgccgcaccggcccaaggagcccgcgtggttcctggccaccgtcggcgtctcgcccgaccaccagggcaagggtctgggcagcgccgtcgtgctccccggagtggaggcggccgagcgcgccggggtgcccgccttcctggagacctccgcgccccgcaacctccccttctacgagcggctcggcttcaccgtcaccgccgacgtcgaggtgcccgaaggaccgcgcacctggtgcatgacccgcaagcccggtgcctga

SEQ ID NO: 4826 - DNA, 2262 bp, Artificial Sequence
  Synthetic Polynucloetide
atggccttaccagtgaccgccttgctcctgccgctggccttgctgctccacgccgccaggccgggcatgcggactgaagacctcccaaaggctgtggtgttcctggagcctcaatggtacagggtgctggagaaggacagtgtgactctgaagtgccagggagcctactcccctgaggacaattccacacagtggtttcacaatgagagcctcatctcaagccaggcctccagctacttcattgacgctgccacagtggacgacagtggagagtacaggtgccagacaaacctctccaccctcagtgacccggtgcagctagaagtccatatcggctggctgttgctccaggcccctcggtgggtgttcaaggaggaagaccctattcacctgaggtgtcacagctggaagaacactgctctgcataaggtcacatatttacagaatggcaaaggcaggaagtattttcatcataattctgacttctacattccaaaagccacactcaaagacagcggctcctacttctgcagggggcttgttgggagtaaaaatgtgtcttcagagactgtgaacatcaccatcactcaaggtttggcagtgtcaaccatctcatcattctttccacctggctaccaactcgaggacaaaactcacacatgcccaccgtgcccagcaggcagagccgattgcggctttaccagcgagagctaccagcagggcgtgctgagcgccaccatcctgtacgagatcctgctgggcaaggccaccctgtacgccgtgctggtgtctgccctggtgctgatggctatggtcaagcggaaggacagccggggaagggccaagcgatctggatctggagcaacaaacttctcactactcaaacaagcaggtgacgtggaggagaatcccgggcctactagtatggactggatttggcgcatccttttccttgtcggcgctgctaccggcgcgcattccgggccccaggttcagctgcaagagtctggcggaggacttgctcaagctggcggaagcctgagactgtcttgtgccgcctctggcagaaccttcagcatgggctggtttagacaggcccctggcaaagagagagagttcgtcgccgccatcacatacagcggcggcagcccttactacgcctcttctgtcagaggccggttcaccatcagccgggacaacgccaagaacaccgtgtacctccagatgaacagcctgaagccagaggacaccgccgtgtactactgtgccgccaatccaacctacggcagcgactggaatgccgagaattggggccagggcacccaagtgacagtgtctagtacgcgtgataaaactcatacctgtccgccatgcccggcaatccccgaggacacattcttcccaagccccgagagcagctgcgacgtgaagctggtggaaaagagcttcgagacagacaccaacctgaacttccagaacctgagcgtgatcggcttcagaatcctgctgctgaaagtggccggctttaacctgctgatgaccctgcggctgtggtccagccgcgccaagagaagcggatctggcgtgaagcagaccctgaatttcgacctgctgaagctggctggcgacgtggaatccaacccaggcccttctagaggccatatgaccgagtacaagcccacggtgcgcctcgccacccgcgacgacgtccccagggccgtacgcaccctcgccgccgcgttcgccgactaccccgccacgcgccacaccgtcgatccggaccgccacatcgagcgggtcaccgagctgcaagaactcttcctcacgcgcgtcgggctcgacatcggcaaggtgtgggtcgcggacgacggcgccgcggtggcggtctggaccacgccggagagcgtcgaagcgggggcggtgttcgccgagatcggcccgcgcatggccgagttgagcggttcccggctggccgcgcagcaacagatggaaggcctcctggcgccgcaccggcccaaggagcccgcgtggttcctggccaccgtcggcgtctcgcccgaccaccagggcaagggtctgggcagcgccgtcgtgctccccggagtggaggcggccgagcgcgccggggtgcccgccttcctggagacctccgcgccccgcaacctccccttctacgagcggctcggcttcaccgtcaccgccgacgtcgaggtgcccgaaggaccgcgcacctggtgcatgacccgcaagcccggtgcctga

SEQ ID NO: 4827 - DNA, 1560 bp, Artificial Sequence
  Synthetic Polynucloetide
atggccttaccagtgaccgccttgctcctgccgctggccttgctgctccacgccgccaggccgggcatgcggactgaagacctcccaaaggctgtggtgttcctggagcctcaatggtacagggtgctggagaaggacagtgtgactctgaagtgccagggagcctactcccctgaggacaattccacacagtggtttcacaatgagagcctcatctcaagccaggcctccagctacttcattgacgctgccacagtggacgacagtggagagtacaggtgccagacaaacctctccaccctcagtgacccggtgcagctagaagtccatatcggctggctgttgctccaggcccctcggtgggtgttcaaggaggaagaccctattcacctgaggtgtcacagctggaagaacactgctctgcataaggtcacatatttacagaatggcaaaggcaggaagtattttcatcataattctgacttctacattccaaaagccacactcaaagacagcggctcctacttctgcagggggcttgttgggagtaaaaatgtgtcttcagagactgtgaacatcaccatcactcaaggtttggcagtgtcaaccatctcatcattctttccacctggctaccaactcgaggacaaaactcacacatgcccaccgtgcccagcaggcagagccgattgcggctttaccagcgagagctaccagcagggcgtgctgagcgccaccatcctgtacgagatcctgctgggcaaggccaccctgtacgccgtgctggtgtctgccctggtgctgatggctatggtcaagcggaaggacagccggggaagggccaagcgatctggatctggagcaacaaacttctcactactcaaacaagcaggtgacgtggaggagaatcccgggcctactagtatggactggatttggcgcatccttttccttgtcggcgctgctaccggcgcgcattccgggccccaggttcagctgcaagagtctggcggaggacttgctcaagctggcggaagcctgagactgtcttgtgccgcctctggcagaaccttcagcatgggctggtttagacaggcccctggcaaagagagagagttcgtcgccgccatcacatacagcggcggcagcccttactacgcctcttctgtcagaggccggttcaccatcagccgggacaacgccaagaacaccgtgtacctccagatgaacagcctgaagccagaggacaccgccgtgtactactgtgccgccaatccaacctacggcagcgactggaatgccgagaattggggccagggcacccaagtgacagtgtctagtacgcgtgataaaactcatacctgtccgccatgcccggcaatccccgaggacacattcttcccaagccccgagagcagctgcgacgtgaagctggtggaaaagagcttcgagacagacaccaacctgaacttccagaacctgagcgtgatcggcttcagaatcctgctgctgaaagtggccggctttaacctgctgatgaccctgcggctgtggtccagc

SEQ ID NO: 4828 - DNA, 1533 bp, Artificial Sequence
  Synthetic Polynucloetide
atggccttaccagtgaccgccttgctcctgccgctggccttgctgctccacgccgccaggccgggcatgcggactgaagacctcccaaaggctgtggtgttcctggagcctcaatggtacagggtgctggagaaggacagtgtgactctgaagtgccagggagcctactcccctgaggacaattccacacagtggtttcacaatgagagcctcatctcaagccaggcctccagctacttcattgacgctgccacagtggacgacagtggagagtacaggtgccagacaaacctctccaccctcagtgacccggtgcagctagaagtccatatcggctggctgttgctccaggcccctcggtgggtgttcaaggaggaagaccctattcacctgaggtgtcacagctggaagaacactgctctgcataaggtcacatatttacagaatggcaaaggcaggaagtattttcatcataattctgacttctacattccaaaagccacactcaaagacagcggctcctacttctgcagggggcttgttgggagtaaaaatgtgtcttcagagactgtgaacatcaccatcactcaaggtttggcagtgtcaaccatctcatcattctttccacctggctaccaactcgagggatctggcagagccgattgcggctttaccagcgagagctaccagcagggcgtgctgagcgccaccatcctgtacgagatcctgctgggcaaggccaccctgtacgccgtgctggtgtctgccctggtgctgatggctatggtcaagcggaaggacagccggggaagggccaagcgatctggatctggagcaacaaacttctcactactcaaacaagcaggtgacgtggaggagaatcccgggcctactagtatggactggatttggcgcatccttttccttgtcggcgctgctaccggcgcgcattccgggccccaggttcagctgcaagagtctggcggaggacttgctcaagctggcggaagcctgagactgtcttgtgccgcctctggcagaaccttcagcatgggctggtttagacaggcccctggcaaagagagagagttcgtcgccgccatcacatacagcggcggcagcccttactacgcctcttctgtcagaggccggttcaccatcagccgggacaacgccaagaacaccgtgtacctccagatgaacagcctgaagccagaggacaccgccgtgtactactgtgccgccaatccaacctacggcagcgactggaatgccgagaattggggccagggcacccaagtgacagtgtctagtacgcgtgataaaactcatacctgtccgccatgcccggcaatccccgaggacacattcttcccaagccccgagagcagctgcgacgtgaagctggtggaaaagagcttcgagacagacaccaacctgaacttccagaacctgagcgtgatcggcttcagaatcctgctgctgaaagtggccggctttaacctgctgatgaccctgcggctgtggtccagc

SEQ ID NO: 4829 - DNA, 2889 bp, Artificial Sequence
  Synthetic Polynucloetide
atggccttaccagtgaccgccttgctcctgccgctggccttgctgctccacgccgccaggccgggcatgcggactgaagacctcccaaaggctgtggtgttcctggagcctcaatggtacagggtgctggagaaggacagtgtgactctgaagtgccagggagcctactcccctgaggacaattccacacagtggtttcacaatgagagcctcatctcaagccaggcctccagctacttcattgacgctgccacagtggacgacagtggagagtacaggtgccagacaaacctctccaccctcagtgacccggtgcagctagaagtccatatcggctggctgttgctccaggcccctcggtgggtgttcaaggaggaagaccctattcacctgaggtgtcacagctggaagaacactgctctgcataaggtcacatatttacagaatggcaaaggcaggaagtattttcatcataattctgacttctacattccaaaagccacactcaaagacagcggctcctacttctgcagggggcttgttgggagtaaaaatgtgtcttcagagactgtgaacatcaccatcactcaaggtttggcagtgtcaaccatctcatcattctttccacctggctaccaactcgagggacagcctaaggccaatcctaccgtgacactgttccctccaagcagcgaagaactccaggccaacaaggccacacttgtgtgcctgatctccgacttctaccctggggctgtgacagtggcttggaaggccgatggatctcctgtgaaagccggcgtggaaaccaccaagccatccaagcagagcaacaacaaatacgccgccagctcctacctgagcctgacacctgagcagtggaagtcccacagatcctacagctgccaagtgacccacgaaggcagcaccgtggaaaagacagtggcccctacagagtgcagccccatcaagaccgatgtgattacaatggaccccaaggacaactgctccaaggacgccaacgataccctgctgctccagctgaccaacaccagcgcctactacatgtacttgttgctgctgctgaagtccgtggtgtacttcgccatcatcacatgctgcctgctgcggagaaccgccttctgctgcaacggcgagaagtctagggccaagcgatctggatctggagcaacaaacttctcactactcaaacaagcaggtgacgtggaggagaatcccgggcctactagtatggactggatttggcgcatccttttccttgtcggcgctgctaccggcgcgcattccgggccccaggttcagctgcaagagtctggcggaggacttgctcaagctggcggaagcctgagactgtcttgtgccgcctctggcagaaccttcagcatgggctggtttagacaggcccctggcaaagagagagagttcgtcgccgccatcacatacagcggcggcagcccttactacgcctcttctgtcagaggccggttcaccatcagccgggacaacgccaagaacaccgtgtacctccagatgaacagcctgaagccagaggacaccgccgtgtactactgtgccgccaatccaacctacggcagcgactggaatgccgagaattggggccagggcacccaagtgacagtgtctagtacgcgtgcctctacaaagggaccctccgtgtttcctctggctcccagcagcaagtctacaagcggaggaacagccgctctgggctgcctggtcaaggattactttcccgagcctgtgaccgtgtcctggaatagcggagcactgacaagcggcgtgcacacctttccagccgtgctgcaaagcagcggcctgtactctctgagcagcgtggtcacagtgcctagctctagcctgggcacccagacctacatctgcaatgtgaaccacaagcctagcaacaccaaggtggacaagagagtggaacccaagagctgtgaagtgaaaaccgactccaccgaccacgtgaagcccaaagagacagagaacaccaagcagcccagcaagagctgccacaagcccaaggccatcgtgcacaccgagaaagtgaacatgatgagcctgaccgtgctgggcctgcggatgctgttcgccaaaaccgtggccgtgaacttcctgctgaccgccaagctgttcttcctccgcgccaagagaagcggatctggcgtgaagcagaccctgaatttcgacctgctgaagctggctggcgacgtggaatccaacccaggcccttctagaggccatatgaccgagtacaagcccacggtgcgcctcgccacccgcgacgacgtccccagggccgtacgcaccctcgccgccgcgttcgccgactaccccgccacgcgccacaccgtcgatccggaccgccacatcgagcgggtcaccgagctgcaagaactcttcctcacgcgcgtcgggctcgacatcggcaaggtgtgggtcgcggacgacggcgccgcggtggcggtctggaccacgccggagagcgtcgaagcgggggcggtgttcgccgagatcggcccgcgcatggccgagttgagcggttcccggctggccgcgcagcaacagatggaaggcctcctggcgccgcaccggcccaaggagcccgcgtggttcctggccaccgtcggcgtctcgcccgaccaccagggcaagggtctgggcagcgccgtcgtgctccccggagtggaggcggccgagcgcgccggggtgcccgccttcctggagacctccgcgccccgcaacctccccttctacgagcggctcggcttcaccgtcaccgccgacgtcgaggtgcccgaaggaccgcgcacctggtgcatgacccgcaagcccggtgcctga

SEQ ID NO: 4830 - DNA, 2187 bp, Artificial Sequence
  Synthetic Polynucloetide
atggccttaccagtgaccgccttgctcctgccgctggccttgctgctccacgccgccaggccgggcatgcggactgaagacctcccaaaggctgtggtgttcctggagcctcaatggtacagggtgctggagaaggacagtgtgactctgaagtgccagggagcctactcccctgaggacaattccacacagtggtttcacaatgagagcctcatctcaagccaggcctccagctacttcattgacgctgccacagtggacgacagtggagagtacaggtgccagacaaacctctccaccctcagtgacccggtgcagctagaagtccatatcggctggctgttgctccaggcccctcggtgggtgttcaaggaggaagaccctattcacctgaggtgtcacagctggaagaacactgctctgcataaggtcacatatttacagaatggcaaaggcaggaagtattttcatcataattctgacttctacattccaaaagccacactcaaagacagcggctcctacttctgcagggggcttgttgggagtaaaaatgtgtcttcagagactgtgaacatcaccatcactcaaggtttggcagtgtcaaccatctcatcattctttccacctggctaccaactcgagggacagcctaaggccaatcctaccgtgacactgttccctccaagcagcgaagaactccaggccaacaaggccacacttgtgtgcctgatctccgacttctaccctggggctgtgacagtggcttggaaggccgatggatctcctgtgaaagccggcgtggaaaccaccaagccatccaagcagagcaacaacaaatacgccgccagctcctacctgagcctgacacctgagcagtggaagtcccacagatcctacagctgccaagtgacccacgaaggcagcaccgtggaaaagacagtggcccctacagagtgcagccccatcaagaccgatgtgattacaatggaccccaaggacaactgctccaaggacgccaacgataccctgctgctccagctgaccaacaccagcgcctactacatgtacttgttgctgctgctgaagtccgtggtgtacttcgccatcatcacatgctgcctgctgcggagaaccgccttctgctgcaacggcgagaagtctagggccaagcgatctggatctggagcaacaaacttctcactactcaaacaagcaggtgacgtggaggagaatcccgggcctactagtatggactggatttggcgcatccttttccttgtcggcgctgctaccggcgcgcattccgggccccaggttcagctgcaagagtctggcggaggacttgctcaagctggcggaagcctgagactgtcttgtgccgcctctggcagaaccttcagcatgggctggtttagacaggcccctggcaaagagagagagttcgtcgccgccatcacatacagcggcggcagcccttactacgcctcttctgtcagaggccggttcaccatcagccgggacaacgccaagaacaccgtgtacctccagatgaacagcctgaagccagaggacaccgccgtgtactactgtgccgccaatccaacctacggcagcgactggaatgccgagaattggggccagggcacccaagtgacagtgtctagtacgcgtgcctctacaaagggaccctccgtgtttcctctggctcccagcagcaagtctacaagcggaggaacagccgctctgggctgcctggtcaaggattactttcccgagcctgtgaccgtgtcctggaatagcggagcactgacaagcggcgtgcacacctttccagccgtgctgcaaagcagcggcctgtactctctgagcagcgtggtcacagtgcctagctctagcctgggcacccagacctacatctgcaatgtgaaccacaagcctagcaacaccaaggtggacaagagagtggaacccaagagctgtgaagtgaaaaccgactccaccgaccacgtgaagcccaaagagacagagaacaccaagcagcccagcaagagctgccacaagcccaaggccatcgtgcacaccgagaaagtgaacatgatgagcctgaccgtgctgggcctgcggatgctgttcgccaaaaccgtggccgtgaacttcctgctgaccgccaagctgttcttcctc

SEQ ID NO: 4831 - DNA, 2274 bp, Artificial Sequence
  Synthetic Polynucloetide
atggccttaccagtgaccgccttgctcctgccgctggccttgctgctccacgccgccaggccgggcatgcggactgaagacctcccaaaggctgtggtgttcctggagcctcaatggtacagggtgctggagaaggacagtgtgactctgaagtgccagggagcctactcccctgaggacaattccacacagtggtttcacaatgagagcctcatctcaagccaggcctccagctacttcattgacgctgccacagtggacgacagtggagagtacaggtgccagacaaacctctccaccctcagtgacccggtgcagctagaagtccatatcggctggctgttgctccaggcccctcggtgggtgttcaaggaggaagaccctattcacctgaggtgtcacagctggaagaacactgctctgcataaggtcacatatttacagaatggcaaaggcaggaagtattttcatcataattctgacttctacattccaaaagccacactcaaagacagcggctcctacttctgcagggggcttgttgggagtaaaaatgtgtcttcagagactgtgaacatcaccatcactcaaggtttggcagtgtcaaccatctcatcattctttccacctggctaccaactcgagggatctcccatcaagaccgatgtgattacaatggaccccaaggacaactgctccaaggacgccaacgataccctgctgctccagctgaccaacaccagcgcctactacatgtacttgttgctgctgctgaagtccgtggtgtacttcgccatcatcacatgctgcctgctgcggagaaccgccttctgctgcaacggcgagaagtctagggccaagcgatctggatctggagcaacaaacttctcactactcaaacaagcaggtgacgtggaggagaatcccgggcctactagtatggactggatttggcgcatccttttccttgtcggcgctgctaccggcgcgcattccgggccccaggttcagctgcaagagtctggcggaggacttgctcaagctggcggaagcctgagactgtcttgtgccgcctctggcagaaccttcagcatgggctggtttagacaggcccctggcaaagagagagagttcgtcgccgccatcacatacagcggcggcagcccttactacgcctcttctgtcagaggccggttcaccatcagccgggacaacgccaagaacaccgtgtacctccagatgaacagcctgaagccagaggacaccgccgtgtactactgtgccgccaatccaacctacggcagcgactggaatgccgagaattggggccagggcacccaagtgacagtgtctagtacgcgtggcagcgaagtgaaaaccgactccaccgaccacgtgaagcccaaagagacagagaacaccaagcagcccagcaagagctgccacaagcccaaggccatcgtgcacaccgagaaagtgaacatgatgagcctgaccgtgctgggcctgcggatgctgttcgccaaaaccgtggccgtgaacttcctgctgaccgccaagctgttcttcctccgcgccaagagaagcggatctggcgtgaagcagaccctgaatttcgacctgctgaagctggctggcgacgtggaatccaacccaggcccttctagaggccatatgaccgagtacaagcccacggtgcgcctcgccacccgcgacgacgtccccagggccgtacgcaccctcgccgccgcgttcgccgactaccccgccacgcgccacaccgtcgatccggaccgccacatcgagcgggtcaccgagctgcaagaactcttcctcacgcgcgtcgggctcgacatcggcaaggtgtgggtcgcggacgacggcgccgcggtggcggtctggaccacgccggagagcgtcgaagcgggggcggtgttcgccgagatcggcccgcgcatggccgagttgagcggttcccggctggccgcgcagcaacagatggaaggcctcctggcgccgcaccggcccaaggagcccgcgtggttcctggccaccgtcggcgtctcgcccgaccaccagggcaagggtctgggcagcgccgtcgtgctccccggagtggaggcggccgagcgcgccggggtgcccgccttcctggagacctccgcgccccgcaacctccccttctacgagcggctcggcttcaccgtcaccgccgacgtcgaggtgcccgaaggaccgcgcacctggtgcatgacccgcaagcccggtgcctga

SEQ ID NO: 4832 - DNA, 1572 bp, Artificial Sequence
  Synthetic Polynucloetide
atggccttaccagtgaccgccttgctcctgccgctggccttgctgctccacgccgccaggccgggcatgcggactgaagacctcccaaaggctgtggtgttcctggagcctcaatggtacagggtgctggagaaggacagtgtgactctgaagtgccagggagcctactcccctgaggacaattccacacagtggtttcacaatgagagcctcatctcaagccaggcctccagctacttcattgacgctgccacagtggacgacagtggagagtacaggtgccagacaaacctctccaccctcagtgacccggtgcagctagaagtccatatcggctggctgttgctccaggcccctcggtgggtgttcaaggaggaagaccctattcacctgaggtgtcacagctggaagaacactgctctgcataaggtcacatatttacagaatggcaaaggcaggaagtattttcatcataattctgacttctacattccaaaagccacactcaaagacagcggctcctacttctgcagggggcttgttgggagtaaaaatgtgtcttcagagactgtgaacatcaccatcactcaaggtttggcagtgtcaaccatctcatcattctttccacctggctaccaactcgagggatctcccatcaagaccgatgtgattacaatggaccccaaggacaactgctccaaggacgccaacgataccctgctgctccagctgaccaacaccagcgcctactacatgtacttgttgctgctgctgaagtccgtggtgtacttcgccatcatcacatgctgcctgctgcggagaaccgccttctgctgcaacggcgagaagtctagggccaagcgatctggatctggagcaacaaacttctcactactcaaacaagcaggtgacgtggaggagaatcccgggcctactagtatggactggatttggcgcatccttttccttgtcggcgctgctaccggcgcgcattccgggccccaggttcagctgcaagagtctggcggaggacttgctcaagctggcggaagcctgagactgtcttgtgccgcctctggcagaaccttcagcatgggctggtttagacaggcccctggcaaagagagagagttcgtcgccgccatcacatacagcggcggcagcccttactacgcctcttctgtcagaggccggttcaccatcagccgggacaacgccaagaacaccgtgtacctccagatgaacagcctgaagccagaggacaccgccgtgtactactgtgccgccaatccaacctacggcagcgactggaatgccgagaattggggccagggcacccaagtgacagtgtctagtacgcgtggcagcgaagtgaaaaccgactccaccgaccacgtgaagcccaaagagacagagaacaccaagcagcccagcaagagctgccacaagcccaaggccatcgtgcacaccgagaaagtgaacatgatgagcctgaccgtgctgggcctgcggatgctgttcgccaaaaccgtggccgtgaacttcctgctgaccgccaagctgttcttcctc

SEQ ID NO: 4833 - DNA, 2301 bp, Artificial Sequence
  Synthetic Polynucloetide
atggccttaccagtgaccgccttgctcctgccgctggccttgctgctccacgccgccaggccgggcatgcggactgaagacctcccaaaggctgtggtgttcctggagcctcaatggtacagggtgctggagaaggacagtgtgactctgaagtgccagggagcctactcccctgaggacaattccacacagtggtttcacaatgagagcctcatctcaagccaggcctccagctacttcattgacgctgccacagtggacgacagtggagagtacaggtgccagacaaacctctccaccctcagtgacccggtgcagctagaagtccatatcggctggctgttgctccaggcccctcggtgggtgttcaaggaggaagaccctattcacctgaggtgtcacagctggaagaacactgctctgcataaggtcacatatttacagaatggcaaaggcaggaagtattttcatcataattctgacttctacattccaaaagccacactcaaagacagcggctcctacttctgcagggggcttgttgggagtaaaaatgtgtcttcagagactgtgaacatcaccatcactcaaggtttggcagtgtcaaccatctcatcattctttccacctggctaccaactcgaggacaaaactcacacatgcccaccgtgcccagcacccatcaagaccgatgtgattacaatggaccccaaggacaactgctccaaggacgccaacgataccctgctgctccagctgaccaacaccagcgcctactacatgtacttgttgctgctgctgaagtccgtggtgtacttcgccatcatcacatgctgcctgctgcggagaaccgccttctgctgcaacggcgagaagtctagggccaagcgatctggatctggagcaacaaacttctcactactcaaacaagcaggtgacgtggaggagaatcccgggcctactagtatggactggatttggcgcatccttttccttgtcggcgctgctaccggcgcgcattccgggccccaggttcagctgcaagagtctggcggaggacttgctcaagctggcggaagcctgagactgtcttgtgccgcctctggcagaaccttcagcatgggctggtttagacaggcccctggcaaagagagagagttcgtcgccgccatcacatacagcggcggcagcccttactacgcctcttctgtcagaggccggttcaccatcagccgggacaacgccaagaacaccgtgtacctccagatgaacagcctgaagccagaggacaccgccgtgtactactgtgccgccaatccaacctacggcagcgactggaatgccgagaattggggccagggcacccaagtgacagtgtctagtacgcgtggcagcgaagtgaaaaccgactccaccgaccacgtgaagcccaaagagacagagaacaccaagcagcccagcaagagctgccacaagcccaaggccatcgtgcacaccgagaaagtgaacatgatgagcctgaccgtgctgggcctgcggatgctgttcgccaaaaccgtggccgtgaacttcctgctgaccgccaagctgttcttcctccgcgccaagagaagcggatctggcgtgaagcagaccctgaatttcgacctgctgaagctggctggcgacgtggaatccaacccaggcccttctagaggccatatgaccgagtacaagcccacggtgcgcctcgccacccgcgacgacgtccccagggccgtacgcaccctcgccgccgcgttcgccgactaccccgccacgcgccacaccgtcgatccggaccgccacatcgagcgggtcaccgagctgcaagaactcttcctcacgcgcgtcgggctcgacatcggcaaggtgtgggtcgcggacgacggcgccgcggtggcggtctggaccacgccggagagcgtcgaagcgggggcggtgttcgccgagatcggcccgcgcatggccgagttgagcggttcccggctggccgcgcagcaacagatggaaggcctcctggcgccgcaccggcccaaggagcccgcgtggttcctggccaccgtcggcgtctcgcccgaccaccagggcaagggtctgggcagcgccgtcgtgctccccggagtggaggcggccgagcgcgccggggtgcccgccttcctggagacctccgcgccccgcaacctccccttctacgagcggctcggcttcaccgtcaccgccgacgtcgaggtgcccgaaggaccgcgcacctggtgcatgacccgcaagcccggtgcctga

SEQ ID NO: 4834 - DNA, 2301 bp, Artificial Sequence
  Synthetic Polynucloetide
atggccttaccagtgaccgccttgctcctgccgctggccttgctgctccacgccgccaggccgggcatgcggactgaagacctcccaaaggctgtggtgttcctggagcctcaatggtacagggtgctggagaaggacagtgtgactctgaagtgccagggagcctactcccctgaggacaattccacacagtggtttcacaatgagagcctcatctcaagccaggcctccagctacttcattgacgctgccacagtggacgacagtggagagtacaggtgccagacaaacctctccaccctcagtgacccggtgcagctagaagtccatatcggctggctgttgctccaggcccctcggtgggtgttcaaggaggaagaccctattcacctgaggtgtcacagctggaagaacactgctctgcataaggtcacatatttacagaatggcaaaggcaggaagtattttcatcataattctgacttctacattccaaaagccacactcaaagacagcggctcctacttctgcagggggcttgttgggagtaaaaatgtgtcttcagagactgtgaacatcaccatcactcaaggtttggcagtgtcaaccatctcatcattctttccacctggctaccaactcgagggatctcccatcaagaccgatgtgattacaatggaccccaaggacaactgctccaaggacgccaacgataccctgctgctccagctgaccaacaccagcgcctactacatgtacttgttgctgctgctgaagtccgtggtgtacttcgccatcatcacatgctgcctgctgcggagaaccgccttctgctgcaacggcgagaagtctagggccaagcgatctggatctggagcaacaaacttctcactactcaaacaagcaggtgacgtggaggagaatcccgggcctactagtatggactggatttggcgcatccttttccttgtcggcgctgctaccggcgcgcattccgggccccaggttcagctgcaagagtctggcggaggacttgctcaagctggcggaagcctgagactgtcttgtgccgcctctggcagaaccttcagcatgggctggtttagacaggcccctggcaaagagagagagttcgtcgccgccatcacatacagcggcggcagcccttactacgcctcttctgtcagaggccggttcaccatcagccgggacaacgccaagaacaccgtgtacctccagatgaacagcctgaagccagaggacaccgccgtgtactactgtgccgccaatccaacctacggcagcgactggaatgccgagaattggggccagggcacccaagtgacagtgtctagtacgcgtgataaaactcatacctgtccgccatgcccggcagaagtgaaaaccgactccaccgaccacgtgaagcccaaagagacagagaacaccaagcagcccagcaagagctgccacaagcccaaggccatcgtgcacaccgagaaagtgaacatgatgagcctgaccgtgctgggcctgcggatgctgttcgccaaaaccgtggccgtgaacttcctgctgaccgccaagctgttcttcctccgcgccaagagaagcggatctggcgtgaagcagaccctgaatttcgacctgctgaagctggctggcgacgtggaatccaacccaggcccttctagaggccatatgaccgagtacaagcccacggtgcgcctcgccacccgcgacgacgtccccagggccgtacgcaccctcgccgccgcgttcgccgactaccccgccacgcgccacaccgtcgatccggaccgccacatcgagcgggtcaccgagctgcaagaactcttcctcacgcgcgtcgggctcgacatcggcaaggtgtgggtcgcggacgacggcgccgcggtggcggtctggaccacgccggagagcgtcgaagcgggggcggtgttcgccgagatcggcccgcgcatggccgagttgagcggttcccggctggccgcgcagcaacagatggaaggcctcctggcgccgcaccggcccaaggagcccgcgtggttcctggccaccgtcggcgtctcgcccgaccaccagggcaagggtctgggcagcgccgtcgtgctccccggagtggaggcggccgagcgcgccggggtgcccgccttcctggagacctccgcgccccgcaacctccccttctacgagcggctcggcttcaccgtcaccgccgacgtcgaggtgcccgaaggaccgcgcacctggtgcatgacccgcaagcccggtgcctga

SEQ ID NO: 4835 - DNA, 2328 bp, Artificial Sequence
  Synthetic Polynucloetide
atggccttaccagtgaccgccttgctcctgccgctggccttgctgctccacgccgccaggccgggcatgcggactgaagacctcccaaaggctgtggtgttcctggagcctcaatggtacagggtgctggagaaggacagtgtgactctgaagtgccagggagcctactcccctgaggacaattccacacagtggtttcacaatgagagcctcatctcaagccaggcctccagctacttcattgacgctgccacagtggacgacagtggagagtacaggtgccagacaaacctctccaccctcagtgacccggtgcagctagaagtccatatcggctggctgttgctccaggcccctcggtgggtgttcaaggaggaagaccctattcacctgaggtgtcacagctggaagaacactgctctgcataaggtcacatatttacagaatggcaaaggcaggaagtattttcatcataattctgacttctacattccaaaagccacactcaaagacagcggctcctacttctgcagggggcttgttgggagtaaaaatgtgtcttcagagactgtgaacatcaccatcactcaaggtttggcagtgtcaaccatctcatcattctttccacctggctaccaactcgaggacaaaactcacacatgcccaccgtgcccagcacccatcaagaccgatgtgattacaatggaccccaaggacaactgctccaaggacgccaacgataccctgctgctccagctgaccaacaccagcgcctactacatgtacttgttgctgctgctgaagtccgtggtgtacttcgccatcatcacatgctgcctgctgcggagaaccgccttctgctgcaacggcgagaagtctagggccaagcgatctggatctggagcaacaaacttctcactactcaaacaagcaggtgacgtggaggagaatcccgggcctactagtatggactggatttggcgcatccttttccttgtcggcgctgctaccggcgcgcattccgggccccaggttcagctgcaagagtctggcggaggacttgctcaagctggcggaagcctgagactgtcttgtgccgcctctggcagaaccttcagcatgggctggtttagacaggcccctggcaaagagagagagttcgtcgccgccatcacatacagcggcggcagcccttactacgcctcttctgtcagaggccggttcaccatcagccgggacaacgccaagaacaccgtgtacctccagatgaacagcctgaagccagaggacaccgccgtgtactactgtgccgccaatccaacctacggcagcgactggaatgccgagaattggggccagggcacccaagtgacagtgtctagtacgcgtgataaaactcatacctgtccgccatgcccggcagaagtgaaaaccgactccaccgaccacgtgaagcccaaagagacagagaacaccaagcagcccagcaagagctgccacaagcccaaggccatcgtgcacaccgagaaagtgaacatgatgagcctgaccgtgctgggcctgcggatgctgttcgccaaaaccgtggccgtgaacttcctgctgaccgccaagctgttcttcctccgcgccaagagaagcggatctggcgtgaagcagaccctgaatttcgacctgctgaagctggctggcgacgtggaatccaacccaggcccttctagaggccatatgaccgagtacaagcccacggtgcgcctcgccacccgcgacgacgtccccagggccgtacgcaccctcgccgccgcgttcgccgactaccccgccacgcgccacaccgtcgatccggaccgccacatcgagcgggtcaccgagctgcaagaactcttcctcacgcgcgtcgggctcgacatcggcaaggtgtgggtcgcggacgacggcgccgcggtggcggtctggaccacgccggagagcgtcgaagcgggggcggtgttcgccgagatcggcccgcgcatggccgagttgagcggttcccggctggccgcgcagcaacagatggaaggcctcctggcgccgcaccggcccaaggagcccgcgtggttcctggccaccgtcggcgtctcgcccgaccaccagggcaagggtctgggcagcgccgtcgtgctccccggagtggaggcggccgagcgcgccggggtgcccgccttcctggagacctccgcgccccgcaacctccccttctacgagcggctcggcttcaccgtcaccgccgacgtcgaggtgcccgaaggaccgcgcacctggtgcatgacccgcaagcccggtgcctga

SEQ ID NO: 4836 - DNA, 1626 bp, Artificial Sequence
  Synthetic Polynucloetide
atggccttaccagtgaccgccttgctcctgccgctggccttgctgctccacgccgccaggccgggcatgcggactgaagacctcccaaaggctgtggtgttcctggagcctcaatggtacagggtgctggagaaggacagtgtgactctgaagtgccagggagcctactcccctgaggacaattccacacagtggtttcacaatgagagcctcatctcaagccaggcctccagctacttcattgacgctgccacagtggacgacagtggagagtacaggtgccagacaaacctctccaccctcagtgacccggtgcagctagaagtccatatcggctggctgttgctccaggcccctcggtgggtgttcaaggaggaagaccctattcacctgaggtgtcacagctggaagaacactgctctgcataaggtcacatatttacagaatggcaaaggcaggaagtattttcatcataattctgacttctacattccaaaagccacactcaaagacagcggctcctacttctgcagggggcttgttgggagtaaaaatgtgtcttcagagactgtgaacatcaccatcactcaaggtttggcagtgtcaaccatctcatcattctttccacctggctaccaactcgaggacaaaactcacacatgcccaccgtgcccagcacccatcaagaccgatgtgattacaatggaccccaaggacaactgctccaaggacgccaacgataccctgctgctccagctgaccaacaccagcgcctactacatgtacttgttgctgctgctgaagtccgtggtgtacttcgccatcatcacatgctgcctgctgcggagaaccgccttctgctgcaacggcgagaagtctagggccaagcgatctggatctggagcaacaaacttctcactactcaaacaagcaggtgacgtggaggagaatcccgggcctactagtatggactggatttggcgcatccttttccttgtcggcgctgctaccggcgcgcattccgggccccaggttcagctgcaagagtctggcggaggacttgctcaagctggcggaagcctgagactgtcttgtgccgcctctggcagaaccttcagcatgggctggtttagacaggcccctggcaaagagagagagttcgtcgccgccatcacatacagcggcggcagcccttactacgcctcttctgtcagaggccggttcaccatcagccgggacaacgccaagaacaccgtgtacctccagatgaacagcctgaagccagaggacaccgccgtgtactactgtgccgccaatccaacctacggcagcgactggaatgccgagaattggggccagggcacccaagtgacagtgtctagtacgcgtgataaaactcatacctgtccgccatgcccggcagaagtgaaaaccgactccaccgaccacgtgaagcccaaagagacagagaacaccaagcagcccagcaagagctgccacaagcccaaggccatcgtgcacaccgagaaagtgaacatgatgagcctgaccgtgctgggcctgcggatgctgttcgccaaaaccgtggccgtgaacttcctgctgaccgccaagctgttcttcctc

SEQ ID NO: 4837 - DNA, 1599 bp, Artificial Sequence
  Synthetic Polynucloetide
atggccttaccagtgaccgccttgctcctgccgctggccttgctgctccacgccgccaggccgggcatgcggactgaagacctcccaaaggctgtggtgttcctggagcctcaatggtacagggtgctggagaaggacagtgtgactctgaagtgccagggagcctactcccctgaggacaattccacacagtggtttcacaatgagagcctcatctcaagccaggcctccagctacttcattgacgctgccacagtggacgacagtggagagtacaggtgccagacaaacctctccaccctcagtgacccggtgcagctagaagtccatatcggctggctgttgctccaggcccctcggtgggtgttcaaggaggaagaccctattcacctgaggtgtcacagctggaagaacactgctctgcataaggtcacatatttacagaatggcaaaggcaggaagtattttcatcataattctgacttctacattccaaaagccacactcaaagacagcggctcctacttctgcagggggcttgttgggagtaaaaatgtgtcttcagagactgtgaacatcaccatcactcaaggtttggcagtgtcaaccatctcatcattctttccacctggctaccaactcgagggatctcccatcaagaccgatgtgattacaatggaccccaaggacaactgctccaaggacgccaacgataccctgctgctccagctgaccaacaccagcgcctactacatgtacttgttgctgctgctgaagtccgtggtgtacttcgccatcatcacatgctgcctgctgcggagaaccgccttctgctgcaacggcgagaagtctagggccaagcgatctggatctggagcaacaaacttctcactactcaaacaagcaggtgacgtggaggagaatcccgggcctactagtatggactggatttggcgcatccttttccttgtcggcgctgctaccggcgcgcattccgggccccaggttcagctgcaagagtctggcggaggacttgctcaagctggcggaagcctgagactgtcttgtgccgcctctggcagaaccttcagcatgggctggtttagacaggcccctggcaaagagagagagttcgtcgccgccatcacatacagcggcggcagcccttactacgcctcttctgtcagaggccggttcaccatcagccgggacaacgccaagaacaccgtgtacctccagatgaacagcctgaagccagaggacaccgccgtgtactactgtgccgccaatccaacctacggcagcgactggaatgccgagaattggggccagggcacccaagtgacagtgtctagtacgcgtgataaaactcatacctgtccgccatgcccggcagaagtgaaaaccgactccaccgaccacgtgaagcccaaagagacagagaacaccaagcagcccagcaagagctgccacaagcccaaggccatcgtgcacaccgagaaagtgaacatgatgagcctgaccgtgctgggcctgcggatgctgttcgccaaaaccgtggccgtgaacttcctgctgaccgccaagctgttcttcctc

SEQ ID NO: 4838 - DNA, 2250 bp, Artificial Sequence
  Synthetic Polynucloetide
atggccttaccagtgaccgccttgctcctgccgctggccttgctgctccacgccgccaggccgggcatgcggactgaagacctcccaaaggctgtggtgttcctggagcctcaatggtacagggtgctggagaaggacagtgtgactctgaagtgccagggagcctactcccctgaggacaattccacacagtggtttcacaatgagagcctcatctcaagccaggcctccagctacttcattgacgctgccacagtggacgacagtggagagtacaggtgccagacaaacctctccaccctcagtgacccggtgcagctagaagtccatatcggctggctgttgctccaggcccctcggtgggtgttcaaggaggaagaccctattcacctgaggtgtcacagctggaagaacactgctctgcataaggtcacatatttacagaatggcaaaggcaggaagtattttcatcataattctgacttctacattccaaaagccacactcaaagacagcggctcctacttctgcagggggcttgttgggagtaaaaatgtgtcttcagagactgtgaacatcaccatcactcaaggtttggcagtgtcaaccatctcatcattctttccacctggctaccaactcgagggatctatggaccccaaggacaactgctccaaggacgccaacgataccctgctgctccagctgaccaacaccagcgcctactacatgtacttgttgctgctgctgaagtccgtggtgtacttcgccatcatcacatgctgcctgctgcggagaaccgccttctgctgcaacggcgagaagtctagggccaagcgatctggatctggagcaacaaacttctcactactcaaacaagcaggtgacgtggaggagaatcccgggcctactagtatggactggatttggcgcatccttttccttgtcggcgctgctaccggcgcgcattccgggccccaggttcagctgcaagagtctggcggaggacttgctcaagctggcggaagcctgagactgtcttgtgccgcctctggcagaaccttcagcatgggctggtttagacaggcccctggcaaagagagagagttcgtcgccgccatcacatacagcggcggcagcccttactacgcctcttctgtcagaggccggttcaccatcagccgggacaacgccaagaacaccgtgtacctccagatgaacagcctgaagccagaggacaccgccgtgtactactgtgccgccaatccaacctacggcagcgactggaatgccgagaattggggccagggcacccaagtgacagtgtctagtacgcgtggcagcgaagtgaaaaccgactccaccgaccacgtgaagcccaaagagacagagaacaccaagcagcccagcaagagctgccacaagcccaaggccatcgtgcacaccgagaaagtgaacatgatgagcctgaccgtgctgggcctgcggatgctgttcgccaaaaccgtggccgtgaacttcctgctgaccgccaagctgttcttcctccgcgccaagagaagcggatctggcgtgaagcagaccctgaatttcgacctgctgaagctggctggcgacgtggaatccaacccaggcccttctagaggccatatgaccgagtacaagcccacggtgcgcctcgccacccgcgacgacgtccccagggccgtacgcaccctcgccgccgcgttcgccgactaccccgccacgcgccacaccgtcgatccggaccgccacatcgagcgggtcaccgagctgcaagaactcttcctcacgcgcgtcgggctcgacatcggcaaggtgtgggtcgcggacgacggcgccgcggtggcggtctggaccacgccggagagcgtcgaagcgggggcggtgttcgccgagatcggcccgcgcatggccgagttgagcggttcccggctggccgcgcagcaacagatggaaggcctcctggcgccgcaccggcccaaggagcccgcgtggttcctggccaccgtcggcgtctcgcccgaccaccagggcaagggtctgggcagcgccgtcgtgctccccggagtggaggcggccgagcgcgccggggtgcccgccttcctggagacctccgcgccccgcaacctccccttctacgagcggctcggcttcaccgtcaccgccgacgtcgaggtgcccgaaggaccgcgcacctggtgcatgacccgcaagcccggtgcctga

SEQ ID NO: 4839 - DNA, 2253 bp, Artificial Sequence
  Synthetic Polynucloetide
atggccttaccagtgaccgccttgctcctgccgctggccttgctgctccacgccgccaggccgggcatgcggactgaagacctcccaaaggctgtggtgttcctggagcctcaatggtacagggtgctggagaaggacagtgtgactctgaagtgccagggagcctactcccctgaggacaattccacacagtggtttcacaatgagagcctcatctcaagccaggcctccagctacttcattgacgctgccacagtggacgacagtggagagtacaggtgccagacaaacctctccaccctcagtgacccggtgcagctagaagtccatatcggctggctgttgctccaggcccctcggtgggtgttcaaggaggaagaccctattcacctgaggtgtcacagctggaagaacactgctctgcataaggtcacatatttacagaatggcaaaggcaggaagtattttcatcataattctgacttctacattccaaaagccacactcaaagacagcggctcctacttctgcagggggcttgttgggagtaaaaatgtgtcttcagagactgtgaacatcaccatcactcaaggtttggcagtgtcaaccatctcatcattctttccacctggctaccaactcgagggatctcccatcaagaccgatgtgattacaatggaccccaaggacaactgctccaaggacgccaacgataccctgctgctccagctgaccaacaccagcgcctactacatgtacttgttgctgctgctgaagtccgtggtgtacttcgccatcatcacatgctgcctgctgcggagaaccgccttctgctgcaacggcgagaagtctagggccaagcgatctggatctggagcaacaaacttctcactactcaaacaagcaggtgacgtggaggagaatcccgggcctactagtatggactggatttggcgcatccttttccttgtcggcgctgctaccggcgcgcattccgggccccaggttcagctgcaagagtctggcggaggacttgctcaagctggcggaagcctgagactgtcttgtgccgcctctggcagaaccttcagcatgggctggtttagacaggcccctggcaaagagagagagttcgtcgccgccatcacatacagcggcggcagcccttactacgcctcttctgtcagaggccggttcaccatcagccgggacaacgccaagaacaccgtgtacctccagatgaacagcctgaagccagaggacaccgccgtgtactactgtgccgccaatccaacctacggcagcgactggaatgccgagaattggggccagggcacccaagtgacagtgtctagtacgcgtggcagcgaccacgtgaagcccaaagagacagagaacaccaagcagcccagcaagagctgccacaagcccaaggccatcgtgcacaccgagaaagtgaacatgatgagcctgaccgtgctgggcctgcggatgctgttcgccaaaaccgtggccgtgaacttcctgctgaccgccaagctgttcttcctccgcgccaagagaagcggatctggcgtgaagcagaccctgaatttcgacctgctgaagctggctggcgacgtggaatccaacccaggcccttctagaggccatatgaccgagtacaagcccacggtgcgcctcgccacccgcgacgacgtccccagggccgtacgcaccctcgccgccgcgttcgccgactaccccgccacgcgccacaccgtcgatccggaccgccacatcgagcgggtcaccgagctgcaagaactcttcctcacgcgcgtcgggctcgacatcggcaaggtgtgggtcgcggacgacggcgccgcggtggcggtctggaccacgccggagagcgtcgaagcgggggcggtgttcgccgagatcggcccgcgcatggccgagttgagcggttcccggctggccgcgcagcaacagatggaaggcctcctggcgccgcaccggcccaaggagcccgcgtggttcctggccaccgtcggcgtctcgcccgaccaccagggcaagggtctgggcagcgccgtcgtgctccccggagtggaggcggccgagcgcgccggggtgcccgccttcctggagacctccgcgccccgcaacctccccttctacgagcggctcggcttcaccgtcaccgccgacgtcgaggtgcccgaaggaccgcgcacctggtgcatgacccgcaagcccggtgcctga

SEQ ID NO: 4840 - DNA, 2229 bp, Artificial Sequence
  Synthetic Polynucloetide
atggccttaccagtgaccgccttgctcctgccgctggccttgctgctccacgccgccaggccgggcatgcggactgaagacctcccaaaggctgtggtgttcctggagcctcaatggtacagggtgctggagaaggacagtgtgactctgaagtgccagggagcctactcccctgaggacaattccacacagtggtttcacaatgagagcctcatctcaagccaggcctccagctacttcattgacgctgccacagtggacgacagtggagagtacaggtgccagacaaacctctccaccctcagtgacccggtgcagctagaagtccatatcggctggctgttgctccaggcccctcggtgggtgttcaaggaggaagaccctattcacctgaggtgtcacagctggaagaacactgctctgcataaggtcacatatttacagaatggcaaaggcaggaagtattttcatcataattctgacttctacattccaaaagccacactcaaagacagcggctcctacttctgcagggggcttgttgggagtaaaaatgtgtcttcagagactgtgaacatcaccatcactcaaggtttggcagtgtcaaccatctcatcattctttccacctggctaccaactcgagggatctatggaccccaaggacaactgctccaaggacgccaacgataccctgctgctccagctgaccaacaccagcgcctactacatgtacttgttgctgctgctgaagtccgtggtgtacttcgccatcatcacatgctgcctgctgcggagaaccgccttctgctgcaacggcgagaagtctagggccaagcgatctggatctggagcaacaaacttctcactactcaaacaagcaggtgacgtggaggagaatcccgggcctactagtatggactggatttggcgcatccttttccttgtcggcgctgctaccggcgcgcattccgggccccaggttcagctgcaagagtctggcggaggacttgctcaagctggcggaagcctgagactgtcttgtgccgcctctggcagaaccttcagcatgggctggtttagacaggcccctggcaaagagagagagttcgtcgccgccatcacatacagcggcggcagcccttactacgcctcttctgtcagaggccggttcaccatcagccgggacaacgccaagaacaccgtgtacctccagatgaacagcctgaagccagaggacaccgccgtgtactactgtgccgccaatccaacctacggcagcgactggaatgccgagaattggggccagggcacccaagtgacagtgtctagtacgcgtggcagcgaccacgtgaagcccaaagagacagagaacaccaagcagcccagcaagagctgccacaagcccaaggccatcgtgcacaccgagaaagtgaacatgatgagcctgaccgtgctgggcctgcggatgctgttcgccaaaaccgtggccgtgaacttcctgctgaccgccaagctgttcttcctccgcgccaagagaagcggatctggcgtgaagcagaccctgaatttcgacctgctgaagctggctggcgacgtggaatccaacccaggcccttctagaggccatatgaccgagtacaagcccacggtgcgcctcgccacccgcgacgacgtccccagggccgtacgcaccctcgccgccgcgttcgccgactaccccgccacgcgccacaccgtcgatccggaccgccacatcgagcgggtcaccgagctgcaagaactcttcctcacgcgcgtcgggctcgacatcggcaaggtgtgggtcgcggacgacggcgccgcggtggcggtctggaccacgccggagagcgtcgaagcgggggcggtgttcgccgagatcggcccgcgcatggccgagttgagcggttcccggctggccgcgcagcaacagatggaaggcctcctggcgccgcaccggcccaaggagcccgcgtggttcctggccaccgtcggcgtctcgcccgaccaccagggcaagggtctgggcagcgccgtcgtgctccccggagtggaggcggccgagcgcgccggggtgcccgccttcctggagacctccgcgccccgcaacctccccttctacgagcggctcggcttcaccgtcaccgccgacgtcgaggtgcccgaaggaccgcgcacctggtgcatgacccgcaagcccggtgcctga

SEQ ID NO: 4841 - DNA, 1527 bp, Artificial Sequence
  Synthetic Polynucloetide
atggccttaccagtgaccgccttgctcctgccgctggccttgctgctccacgccgccaggccgggcatgcggactgaagacctcccaaaggctgtggtgttcctggagcctcaatggtacagggtgctggagaaggacagtgtgactctgaagtgccagggagcctactcccctgaggacaattccacacagtggtttcacaatgagagcctcatctcaagccaggcctccagctacttcattgacgctgccacagtggacgacagtggagagtacaggtgccagacaaacctctccaccctcagtgacccggtgcagctagaagtccatatcggctggctgttgctccaggcccctcggtgggtgttcaaggaggaagaccctattcacctgaggtgtcacagctggaagaacactgctctgcataaggtcacatatttacagaatggcaaaggcaggaagtattttcatcataattctgacttctacattccaaaagccacactcaaagacagcggctcctacttctgcagggggcttgttgggagtaaaaatgtgtcttcagagactgtgaacatcaccatcactcaaggtttggcagtgtcaaccatctcatcattctttccacctggctaccaactcgagggatctatggaccccaaggacaactgctccaaggacgccaacgataccctgctgctccagctgaccaacaccagcgcctactacatgtacttgttgctgctgctgaagtccgtggtgtacttcgccatcatcacatgctgcctgctgcggagaaccgccttctgctgcaacggcgagaagtctagggccaagcgatctggatctggagcaacaaacttctcactactcaaacaagcaggtgacgtggaggagaatcccgggcctactagtatggactggatttggcgcatccttttccttgtcggcgctgctaccggcgcgcattccgggccccaggttcagctgcaagagtctggcggaggacttgctcaagctggcggaagcctgagactgtcttgtgccgcctctggcagaaccttcagcatgggctggtttagacaggcccctggcaaagagagagagttcgtcgccgccatcacatacagcggcggcagcccttactacgcctcttctgtcagaggccggttcaccatcagccgggacaacgccaagaacaccgtgtacctccagatgaacagcctgaagccagaggacaccgccgtgtactactgtgccgccaatccaacctacggcagcgactggaatgccgagaattggggccagggcacccaagtgacagtgtctagtacgcgtggcagcgaccacgtgaagcccaaagagacagagaacaccaagcagcccagcaagagctgccacaagcccaaggccatcgtgcacaccgagaaagtgaacatgatgagcctgaccgtgctgggcctgcggatgctgttcgccaaaaccgtggccgtgaacttcctgctgaccgccaagctgttcttcctc

SEQ ID NO: 4842 - DNA, 2256 bp, Artificial Sequence
  Synthetic Polynucloetide
atggccttaccagtgaccgccttgctcctgccgctggccttgctgctccacgccgccaggccgggcatgcggactgaagacctcccaaaggctgtggtgttcctggagcctcaatggtacagggtgctggagaaggacagtgtgactctgaagtgccagggagcctactcccctgaggacaattccacacagtggtttcacaatgagagcctcatctcaagccaggcctccagctacttcattgacgctgccacagtggacgacagtggagagtacaggtgccagacaaacctctccaccctcagtgacccggtgcagctagaagtccatatcggctggctgttgctccaggcccctcggtgggtgttcaaggaggaagaccctattcacctgaggtgtcacagctggaagaacactgctctgcataaggtcacatatttacagaatggcaaaggcaggaagtattttcatcataattctgacttctacattccaaaagccacactcaaagacagcggctcctacttctgcagggggcttgttgggagtaaaaatgtgtcttcagagactgtgaacatcaccatcactcaaggtttggcagtgtcaaccatctcatcattctttccacctggctaccaactcgaggacaaaactcacacatgcccaccgtgcccagcaatggaccccaaggacaactgctccaaggacgccaacgataccctgctgctccagctgaccaacaccagcgcctactacatgtacttgttgctgctgctgaagtccgtggtgtacttcgccatcatcacatgctgcctgctgcggagaaccgccttctgctgcaacggcgagaagtctagggccaagcgatctggatctggagcaacaaacttctcactactcaaacaagcaggtgacgtggaggagaatcccgggcctactagtatggactggatttggcgcatccttttccttgtcggcgctgctaccggcgcgcattccgggccccaggttcagctgcaagagtctggcggaggacttgctcaagctggcggaagcctgagactgtcttgtgccgcctctggcagaaccttcagcatgggctggtttagacaggcccctggcaaagagagagagttcgtcgccgccatcacatacagcggcggcagcccttactacgcctcttctgtcagaggccggttcaccatcagccgggacaacgccaagaacaccgtgtacctccagatgaacagcctgaagccagaggacaccgccgtgtactactgtgccgccaatccaacctacggcagcgactggaatgccgagaattggggccagggcacccaagtgacagtgtctagtacgcgtggcagcgaccacgtgaagcccaaagagacagagaacaccaagcagcccagcaagagctgccacaagcccaaggccatcgtgcacaccgagaaagtgaacatgatgagcctgaccgtgctgggcctgcggatgctgttcgccaaaaccgtggccgtgaacttcctgctgaccgccaagctgttcttcctccgcgccaagagaagcggatctggcgtgaagcagaccctgaatttcgacctgctgaagctggctggcgacgtggaatccaacccaggcccttctagaggccatatgaccgagtacaagcccacggtgcgcctcgccacccgcgacgacgtccccagggccgtacgcaccctcgccgccgcgttcgccgactaccccgccacgcgccacaccgtcgatccggaccgccacatcgagcgggtcaccgagctgcaagaactcttcctcacgcgcgtcgggctcgacatcggcaaggtgtgggtcgcggacgacggcgccgcggtggcggtctggaccacgccggagagcgtcgaagcgggggcggtgttcgccgagatcggcccgcgcatggccgagttgagcggttcccggctggccgcgcagcaacagatggaaggcctcctggcgccgcaccggcccaaggagcccgcgtggttcctggccaccgtcggcgtctcgcccgaccaccagggcaagggtctgggcagcgccgtcgtgctccccggagtggaggcggccgagcgcgccggggtgcccgccttcctggagacctccgcgccccgcaacctccccttctacgagcggctcggcttcaccgtcaccgccgacgtcgaggtgcccgaaggaccgcgcacctggtgcatgacccgcaagcccggtgcctga

SEQ ID NO: 4843 - DNA, 2283 bp, Artificial Sequence
  Synthetic Polynucloetide
atggccttaccagtgaccgccttgctcctgccgctggccttgctgctccacgccgccaggccgggcatgcggactgaagacctcccaaaggctgtggtgttcctggagcctcaatggtacagggtgctggagaaggacagtgtgactctgaagtgccagggagcctactcccctgaggacaattccacacagtggtttcacaatgagagcctcatctcaagccaggcctccagctacttcattgacgctgccacagtggacgacagtggagagtacaggtgccagacaaacctctccaccctcagtgacccggtgcagctagaagtccatatcggctggctgttgctccaggcccctcggtgggtgttcaaggaggaagaccctattcacctgaggtgtcacagctggaagaacactgctctgcataaggtcacatatttacagaatggcaaaggcaggaagtattttcatcataattctgacttctacattccaaaagccacactcaaagacagcggctcctacttctgcagggggcttgttgggagtaaaaatgtgtcttcagagactgtgaacatcaccatcactcaaggtttggcagtgtcaaccatctcatcattctttccacctggctaccaactcgaggacaaaactcacacatgcccaccgtgcccagcaatggaccccaaggacaactgctccaaggacgccaacgataccctgctgctccagctgaccaacaccagcgcctactacatgtacttgttgctgctgctgaagtccgtggtgtacttcgccatcatcacatgctgcctgctgcggagaaccgccttctgctgcaacggcgagaagtctagggccaagcgatctggatctggagcaacaaacttctcactactcaaacaagcaggtgacgtggaggagaatcccgggcctactagtatggactggatttggcgcatccttttccttgtcggcgctgctaccggcgcgcattccgggccccaggttcagctgcaagagtctggcggaggacttgctcaagctggcggaagcctgagactgtcttgtgccgcctctggcagaaccttcagcatgggctggtttagacaggcccctggcaaagagagagagttcgtcgccgccatcacatacagcggcggcagcccttactacgcctcttctgtcagaggccggttcaccatcagccgggacaacgccaagaacaccgtgtacctccagatgaacagcctgaagccagaggacaccgccgtgtactactgtgccgccaatccaacctacggcagcgactggaatgccgagaattggggccagggcacccaagtgacagtgtctagtacgcgtgataaaactcatacctgtccgccatgcccggcagaccacgtgaagcccaaagagacagagaacaccaagcagcccagcaagagctgccacaagcccaaggccatcgtgcacaccgagaaagtgaacatgatgagcctgaccgtgctgggcctgcggatgctgttcgccaaaaccgtggccgtgaacttcctgctgaccgccaagctgttcttcctccgcgccaagagaagcggatctggcgtgaagcagaccctgaatttcgacctgctgaagctggctggcgacgtggaatccaacccaggcccttctagaggccatatgaccgagtacaagcccacggtgcgcctcgccacccgcgacgacgtccccagggccgtacgcaccctcgccgccgcgttcgccgactaccccgccacgcgccacaccgtcgatccggaccgccacatcgagcgggtcaccgagctgcaagaactcttcctcacgcgcgtcgggctcgacatcggcaaggtgtgggtcgcggacgacggcgccgcggtggcggtctggaccacgccggagagcgtcgaagcgggggcggtgttcgccgagatcggcccgcgcatggccgagttgagcggttcccggctggccgcgcagcaacagatggaaggcctcctggcgccgcaccggcccaaggagcccgcgtggttcctggccaccgtcggcgtctcgcccgaccaccagggcaagggtctgggcagcgccgtcgtgctccccggagtggaggcggccgagcgcgccggggtgcccgccttcctggagacctccgcgccccgcaacctccccttctacgagcggctcggcttcaccgtcaccgccgacgtcgaggtgcccgaaggaccgcgcacctggtgcatgacccgcaagcccggtgcctga

SEQ ID NO: 4844 - DNA, 1581 bp, Artificial Sequence
  Synthetic Polynucloetide
atggccttaccagtgaccgccttgctcctgccgctggccttgctgctccacgccgccaggccgggcatgcggactgaagacctcccaaaggctgtggtgttcctggagcctcaatggtacagggtgctggagaaggacagtgtgactctgaagtgccagggagcctactcccctgaggacaattccacacagtggtttcacaatgagagcctcatctcaagccaggcctccagctacttcattgacgctgccacagtggacgacagtggagagtacaggtgccagacaaacctctccaccctcagtgacccggtgcagctagaagtccatatcggctggctgttgctccaggcccctcggtgggtgttcaaggaggaagaccctattcacctgaggtgtcacagctggaagaacactgctctgcataaggtcacatatttacagaatggcaaaggcaggaagtattttcatcataattctgacttctacattccaaaagccacactcaaagacagcggctcctacttctgcagggggcttgttgggagtaaaaatgtgtcttcagagactgtgaacatcaccatcactcaaggtttggcagtgtcaaccatctcatcattctttccacctggctaccaactcgaggacaaaactcacacatgcccaccgtgcccagcaatggaccccaaggacaactgctccaaggacgccaacgataccctgctgctccagctgaccaacaccagcgcctactacatgtacttgttgctgctgctgaagtccgtggtgtacttcgccatcatcacatgctgcctgctgcggagaaccgccttctgctgcaacggcgagaagtctagggccaagcgatctggatctggagcaacaaacttctcactactcaaacaagcaggtgacgtggaggagaatcccgggcctactagtatggactggatttggcgcatccttttccttgtcggcgctgctaccggcgcgcattccgggccccaggttcagctgcaagagtctggcggaggacttgctcaagctggcggaagcctgagactgtcttgtgccgcctctggcagaaccttcagcatgggctggtttagacaggcccctggcaaagagagagagttcgtcgccgccatcacatacagcggcggcagcccttactacgcctcttctgtcagaggccggttcaccatcagccgggacaacgccaagaacaccgtgtacctccagatgaacagcctgaagccagaggacaccgccgtgtactactgtgccgccaatccaacctacggcagcgactggaatgccgagaattggggccagggcacccaagtgacagtgtctagtacgcgtgataaaactcatacctgtccgccatgcccggcagaccacgtgaagcccaaagagacagagaacaccaagcagcccagcaagagctgccacaagcccaaggccatcgtgcacaccgagaaagtgaacatgatgagcctgaccgtgctgggcctgcggatgctgttcgccaaaaccgtggccgtgaacttcctgctgaccgccaagctgttcttcctc

SEQ ID NO: 4845 - DNA, 1122 bp, Artificial Sequence
  Synthetic Polynucloetide
atggccttaccagtgaccgccttgctcctgccgctggccttgctgctccacgccgccaggccgggcatgcggactgaagacctcccaaaggctgtggtgttcctggagcctcaatggtacagggtgctggagaaggacagtgtgactctgaagtgccagggagcctactcccctgaggacaattccacacagtggtttcacaatgagagcctcatctcaagccaggcctccagctacttcattgacgctgccacagtggacgacagtggagagtacaggtgccagacaaacctctccaccctcagtgacccggtgcagctagaagtccatatcggctggctgttgctccaggcccctcggtgggtgttcaaggaggaagaccctattcacctgaggtgtcacagctggaagaacactgctctgcataaggtcacatatttacagaatggcaaaggcaggaagtattttcatcataattctgacttctacattccaaaagccacactcaaagacagcggctcctacttctgcagggggcttgttgggagtaaaaatgtgtcttcagagactgtgaacatcaccatcactcaaggtttggcagtgtcaaccatctcatcattctttccacctggctaccaactcgagggacagcctaaggccaatcctaccgtgacactgttccctccaagcagcgaagaactccaggccaacaaggccacacttgtgtgcctgatctccgacttctaccctggggctgtgacagtggcttggaaggccgatggatctcctgtgaaagccggcgtggaaaccaccaagccatccaagcagagcaacaacaaatacgccgccagctcctacctgagcctgacacctgagcagtggaagtcccacagatcctacagctgccaagtgacccacgaaggcagcaccgtggaaaagacagtggcccctacagagtgcagcggcagagccgattgcggctttaccagcgagagctaccagcagggcgtgctgagcgccaccatcctgtacgagatcctgctgggcaaggccaccctgtacgccgtgctggtgtctgccctggtgctgatggctatggtcaagcggaaggacagccgggga

SEQ ID NO: 4846 - DNA, 912 bp, Artificial Sequence; identical to SEQ ID NO: 4211
  Synthetic Polynucloetide

SEQ ID NO: 4847 - DNA, 1164 bp, Artificial Sequence
  Synthetic Polynucloetide
atggccttaccagtgaccgccttgctcctgccgctggccttgctgctccacgccgccaggccgggcatgcggactgaagacctcccaaaggctgtggtgttcctggagcctcaatggtacagggtgctggagaaggacagtgtgactctgaagtgccagggagcctactcccctgaggacaattccacacagtggtttcacaatgagagcctcatctcaagccaggcctccagctacttcattgacgctgccacagtggacgacagtggagagtacaggtgccagacaaacctctccaccctcagtgacccggtgcagctagaagtccatatcggctggctgttgctccaggcccctcggtgggtgttcaaggaggaagaccctattcacctgaggtgtcacagctggaagaacactgctctgcataaggtcacatatttacagaatggcaaaggcaggaagtattttcatcataattctgacttctacattccaaaagccacactcaaagacagcggctcctacttctgcagggggcttgttgggagtaaaaatgtgtcttcagagactgtgaacatcaccatcactcaaggtttggcagtgtcaaccatctcatcattctttccacctggctaccaactcgagggacagcctaaggccaatcctaccgtgacactgttccctccaagcagcgaagaactccaggccaacaaggccacacttgtgtgcctgatctccgacttctaccctggggctgtgacagtggcttggaaggccgatggatctcctgtgaaagccggcgtggaaaccaccaagccatccaagcagagcaacaacaaatacgccgccagctcctacctgagcctgacacctgagcagtggaagtcccacagatcctacagctgccaagtgacccacgaaggcagcaccgtggaaaagacagtggcccctacagagtgcagccccatcaagaccgatgtgattacaatggaccccaaggacaactgctccaaggacgccaacgataccctgctgctccagctgaccaacaccagcgcctactacatgtacttgttgctgctgctgaagtccgtggtgtacttcgccatcatcacatgctgcctgctgcggagaaccgccttctgctgcaacggcgagaagtct

SEQ ID NO: 4848 - DNA, 936 bp, Artificial Sequence; identical to SEQ ID NO: 4213
  Synthetic Polynucloetide

SEQ ID NO: 4849 - DNA, 2145 bp, Artificial Sequence
  Synthetic Polynucloetide
atggactggatttggcgcatccttttccttgtcggcgctgctaccggcgcccattccgggcccggcatgagaaccgaggacctgcctaaggccgtggtgttcctggaaccccagtggtacagagtgctggaaaaggacagcgtgaccctgaagtgccagggcgcctacagccccgaggacaatagcacccagtggttccacaacgagagcctgatctccagccaggccagcagctacttcatcgacgccgccaccgtggacgacagcggcgagtatagatgccagaccaacctgagcaccctgagcgaccccgtgcagctggaagtgcacatcggatggctgctgctgcaggcccccagatgggtgttcaaagaagaggaccccatccacctgagatgccactcttggaagaacaccgccctgcacaaagtgacctacctgcagaacggcaagggcagaaagtacttccaccacaacagcgacttctacatccccaaggccaccctgaaggactccggctcctacttctgcagaggcctcgtgggcagcaagaacgtgtccagcgagacagtgaacatcaccatcacccagggcctggccgtgtctaccatcagcagctttttcccacccggctaccagggatccggcggcggaggatctggcggaggcggatctgggggcggaggctctttcgaacaagttcagcttcaacagcctggcgctgagctggtcaaacctggcgcttctgtgaagatgagctgcaaagccagcggctacgccttcagcagctactggatcaactggatgaagcagaaacccggccagggactcgaatggatcggccaaatctatcccggcgacggcgacaccaactacaacggcaagttcaagggcagagccacactgaccgccgatacctctagcagcacagcctacatgcagctgagcagcctgaccagcgaagatagcgccgtgtacttctgtgcccggtccatcacaacagtcgtgggctgcgctatggactattggggccagggaacaagcgtgaccgtgtctagtggcggaggcggaagtggaggcggaggatctggcggcggaggctctgacatccagatgacacagagccctagcagcctgtctgccagcgtgggagacagagtgaccatcacatgcaaggccagcgaccacatcaacaactggctggcctggtatcagcagaagcctggacaggcccctaagctgctgatctacggcgctaccacactggaaacaggcgtgcccagcagattttctggcagcggctctggcaccgactacaccctgacaatatccagcctccagcctgaggacttcgccacctactactgtcagcagagctggaacaccccttggacattcggccagggcaccaagctggaaatcaagagaacgcgtgagcagaaactgatctcggaagaggatctggcgaagcccaccacgacgccagcgccgcgaccaccaacaccggcgcccaccatcgcgtcgcagcccctgtccctgcgcccagaggcgtgccggccagcggcggggggcgcagtgcacacgagggggctggacttcgcctgtgacatctacatctgggcgcccttggccgggacttgtggggtccttctcctgtcactggttatcaccctttactgcaaacggggcagaaagaaactcctgtatatattcaaacaaccatttatgagaccagtacaaactactcaagaggaagatggctgtagctgccgatttccagaagaagaagaaggaggatgtgaactgagagtgaagttcagcaggagcgcagacgcccccgcgtaccagcagggccagaaccagctctataacgagctgaatctaggacgaagagaggagtacgatgttttggacaagagacgtggccgggaccctgagatggggggaaagccgagaaggaagaaccctcaggaaggcctgtacaatgaactgcagaaagataagatggcggaggcctacagtgagattgggatgaaaggcgagcgccggaggggcaaggggcacgatggcctttaccagggtctcagtacagccaccaaggacacctacgacgcccttcacatgcaggccctgccccctcgctga

SEQ ID NO: 4850 - DNA, 3204 bp, Artificial Sequence
  Synthetic Polynucloetide
atggccttaccagtgaccgccttgctcctgccgctggccttgctgctccacgccgccaggccggacatccagatgacacagagccctagcagcctgtctgccagcgtgggagacagagtgaccatcacatgcaaggccagcgaccacatcaacaactggctggcctggtatcagcagaagcctggacaggcccctaagctgctgatctacggcgctaccacactggaaacaggcgtgcccagcagattttctggcagcggctctggcaccgactacaccctgacaatatccagcctccagcctgaggacttcgccacctactactgtcagcagagctggaacaccccttggacattcggccagggcaccaagctggaaatcaagagactcgagatccagaaccctgatcctgccgtgtaccagctgcgggatagcaagagcagcgacaagagcgtgtgtctgttcaccgacttcgacagccagaccaacgtgtcccagagcaaggactccgacgtgtacatcaccgataagtgcgtgctggacatgcggagcatggacttcaagagcaactccgccgtggcctggtccaacaagtccgatttcgcctgcgccaacgccttcaacaacagcattatccccgaggacacattcttcccaagcagcgacgtgccctgcgacgtgaagctggtggaaaagagcttcgagacagacaccaacctgaacttccagaacctgagcgtgatcggcttcagaatcctgctgctgaaagtggccggctttaacctgctgatgaccctgcggctgtggtccagccgcgccaagagaagcggatctggcgtgaagcagaccctgaatttcgacctgctgaagctggctggcgacgtggaatccaacccaggccctactagtatggactggatttggcgcatccttttccttgtcggcgctgctaccggcgcccattccgggcccggcatgagaaccgaggacctgcctaaggccgtggtgttcctggaaccccagtggtacagagtgctggaaaaggacagcgtgaccctgaagtgccagggcgcctacagccccgaggacaatagcacccagtggttccacaacgagagcctgatctccagccaggccagcagctacttcatcgacgccgccaccgtggacgacagcggcgagtatagatgccagaccaacctgagcaccctgagcgaccccgtgcagctggaagtgcacatcggatggctgctgctgcaggcccccagatgggtgttcaaagaagaggaccccatccacctgagatgccactcttggaagaacaccgccctgcacaaagtgacctacctgcagaacggcaagggcagaaagtacttccaccacaacagcgacttctacatccccaaggccaccctgaaggactccggctcctacttctgcagaggcctcgtgggcagcaagaacgtgtccagcgagacagtgaacatcaccatcacccagggcctggccgtgtctaccatcagcagctttttcccacccggctaccagggatccggcggcggaggatctggcggaggcggatctgggggcggaggctctttcgaacaagttcagcttcaacagcctggcgctgagctggtcaaacctggcgcttctgtgaagatgagctgcaaagccagcggctacgccttcagcagctactggatcaactggatgaagcagaaacccggccagggactcgaatggatcggccaaatctatcccggcgacggcgacaccaactacaacggcaagttcaagggcagagccacactgaccgccgatacctctagcagcacagcctacatgcagctgagcagcctgaccagcgaagatagcgccgtgtacttctgtgcccggtccatcacaacagtcgtgggctgcgctatggactattggggccagggaacaagcgtgaccgtgtctagtacgcgtgaggacctgaagaacgtgttcccacctgaggtggccgtgttcgagcctagcaaggccgagatcgcccacacccagaaagccaccctcgtgtgcctggctaccggcttctaccccgaccatgtggaactgtcttggtgggtcaacggcaaagaggtgcacagcggcgtgtgtaccgacccccagccactgaaagaacagcccgccctgaacgacagccggtactgcctgagcagcagactgagagtgtccgccaccttctggcagaacccccggaaccacttcagatgccaggtgcagttctacggcctgagcgagaacgacgagtggacccaggacagagccaagcccgtgacccagatcgtgtctgccgaagcctggggcagagccgattgcggcatcaccagcgccagctaccaccagggcgtgctgagcgccaccatcctgtacgagatcctgctgggcaaggccaccctgtacgccgtgctggtgtctgccctggtgctgatggctatggtcaagcggaaggacagccggggaagggccaagcgatctggatctggagcaacaaacttctcactactcaaacaagcaggtgacgtggaggagaatcccgggccttctagaggccatatgaccgagtacaagcccacggtgcgcctcgccacccgcgacgacgtccccagggccgtacgcaccctcgccgccgcgttcgccgactaccccgccacgcgccacaccgtcgatccggaccgccacatcgagcgggtcaccgagctgcaagaactcttcctcacgcgcgtcgggctcgacatcggcaaggtgtgggtcgcggacgacggcgccgcggtggcggtctggaccacgccggagagcgtcgaagcgggggcggtgttcgccgagatcggcccgcgcatggccgagttgagcggttcccggctggccgcgcagcaacagatggaaggcctcctggcgccgcaccggcccaaggagcccgcgtggttcctggccaccgtcggcgtctcgcccgaccaccagggcaagggtctgggcagcgccgtcgtgctccccggagtggaggcggccgagcgcgccggggtgcccgccttcctggagacctccgcgccccgcaacctccccttctacgagcggctcggcttcaccgtcaccgccgacgtcgaggtgcccgaaggaccgcgcacctggtgcatgacccgcaagcccggtgcctga

SEQ ID NO: 4851 - DNA, 3201 bp, Artificial Sequence
  Synthetic Polynucloetide
atggccttaccagtgaccgccttgctcctgccgctggccttgctgctccacgccgccaggccggacatccagatgacacagagccctagcagcctgtctgccagcgtgggagacagagtgaccatcacatgcaaggccagcgaccacatcaacaactggctggcctggtatcagcagaagcctggacaggcccctaagctgctgatctacggcgctaccacactggaaacaggcgtgcccagcagattttctggcagcggctctggcaccgactacaccctgacaatatccagcctccagcctgaggacttcgccacctactactgtcagcagagctggaacaccccttggacattcggccagggcaccaagctggaaatcaagagactcgaggacctgaagaacgtgttcccacctgaggtggccgtgttcgagcctagcaaggccgagatcgcccacacccagaaagccaccctcgtgtgcctggctaccggcttctaccccgaccatgtggaactgtcttggtgggtcaacggcaaagaggtgcacagcggcgtgtgtaccgacccccagccactgaaagaacagcccgccctgaacgacagccggtactgcctgagcagcagactgagagtgtccgccaccttctggcagaacccccggaaccacttcagatgccaggtgcagttctacggcctgagcgagaacgacgagtggacccaggacagagccaagcccgtgacccagatcgtgtctgccgaagcctggggcagagccgattgcggcatcaccagcgccagctaccaccagggcgtgctgagcgccaccatcctgtacgagatcctgctgggcaaggccaccctgtacgccgtgctggtgtctgccctggtgctgatggctatggtcaagcggaaggacagccggggaagggccaagcgatctggatctggagcaacaaacttctcactactcaaacaagcaggtgacgtggaggagaatcccgggcctactagtatggactggatttggcgcatccttttccttgtcggcgctgctaccggcgcccattccgggcccggcatgagaaccgaggacctgcctaaggccgtggtgttcctggaaccccagtggtacagagtgctggaaaaggacagcgtgaccctgaagtgccagggcgcctacagccccgaggacaatagcacccagtggttccacaacgagagcctgatctccagccaggccagcagctacttcatcgacgccgccaccgtggacgacagcggcgagtatagatgccagaccaacctgagcaccctgagcgaccccgtgcagctggaagtgcacatcggatggctgctgctgcaggcccccagatgggtgttcaaagaagaggaccccatccacctgagatgccactcttggaagaacaccgccctgcacaaagtgacctacctgcagaacggcaagggcagaaagtacttccaccacaacagcgacttctacatccccaaggccaccctgaaggactccggctcctacttctgcagaggcctcgtgggcagcaagaacgtgtccagcgagacagtgaacatcaccatcacccagggcctggccgtgtctaccatcagcagctttttcccacccggctaccagggatccggcggcggaggatctggcggaggcggatctgggggcggaggctctttcgaacaagttcagcttcaacagcctggcgctgagctggtcaaacctggcgcttctgtgaagatgagctgcaaagccagcggctacgccttcagcagctactggatcaactggatgaagcagaaacccggccagggactcgaatggatcggccaaatctatcccggcgacggcgacaccaactacaacggcaagttcaagggcagagccacactgaccgccgatacctctagcagcacagcctacatgcagctgagcagcctgaccagcgaagatagcgccgtgtacttctgtgcccggtccatcacaacagtcgtgggctgcgctatggactattggggccagggaacaagcgtgaccgtgtctagtacgcgtatccagaaccctgatcctgccgtgtaccagctgcgggatagcaagagcagcgacaagagcgtgtgtctgttcaccgacttcgacagccagaccaacgtgtcccagagcaaggactccgacgtgtacatcaccgataagtgcgtgctggacatgcggagcatggacttcaagagcaactccgccgtggcctggtccaacaagtccgatttcgcctgcgccaacgccttcaacaacagcattatccccgaggacacattcttcccaagcagcgacgtgccctgcgacgtgaagctggtggaaaagagcttcgagacagacaccaacctgaacttccagaacctgagcgtgatcggcttcagaatcctgctgctgaaagtggccggctttaacctgctgatgaccctgcggctgtggtccagccgcgccaagagaagcggatctggcgtgaagcagaccctgaatttcgacctgctgaagctggctggcgacgtggaatccaacccaggcccttctagaggccatatgaccgagtacaagcccacggtgcgcctcgccacccgcgacgacgtccccagggccgtacgcaccctcgccgccgcgttcgccgactaccccgccacgcgccacaccgtcgatccggaccgccacatcgagcgggtcaccgagctgcaagaactcttcctcacgcgcgtcgggctcgacatcggcaaggtgtgggtcgcggacgacggcgccgcggtggcggtctggaccacgccggagagcgtcgaagcgggggcggtgttcgccgagatcggcccgcgcatggccgagttgagcggttcccggctggccgcgcagcaacagatggaaggcctcctggcgccgcaccggcccaaggagcccgcgtggttcctggccaccgtcggcgtctcgcccgaccaccagggcaagggtctgggcagcgccgtcgtgctccccggagtggaggcggccgagcgcgccggggtgcccgccttcctggagacctccgcgccccgcaacctccccttctacgagcggctcggcttcaccgtcaccgccgacgtcgaggtgcccgaaggaccgcgcacctggtgcatgacccgcaagcccggtgcctga

SEQ ID NO: 4852 - DNA, 3201 bp, Artificial Sequence
  Synthetic Polynucloetide
atggccttaccagtgaccgccttgctcctgccgctggccttgctgctccacgccgccaggccggacatccagatgacacagagccctagcagcctgtctgccagcgtgggagacagagtgaccatcacatgcaaggccagcgaccacatcaacaactggctggcctggtatcagcagaagcctggacaggcccctaagctgctgatctacggcgctaccacactggaaacaggcgtgcccagcagattttctggcagcggctctggcaccgactacaccctgacaatatccagcctccagcctgaggacttcgccacctactactgtcagcagagctggaacaccccttggacattcggccagggcaccaagctggaaatcaagagactcgaggacctgaagaacgtgttcccacctgaggtggccgtgttcgagcctagcgaggccgagatcagccacacccagaaagccaccctcgtgtgcctggctaccggcttctaccccgaccatgtggaactgtcttggtgggtcaacggcaaagaggtgcacagcggcgtgtgtaccgacccccagccactgaaagaacagcccgccctgaacgacagccggtactgcctgagcagcagactgagagtgtccgccaccttctggcagaacccccggaaccacttcagatgccaggtgcagttctacggcctgagcgagaacgacgagtggacccaggacagagccaagcccgtgacccagatcgtgtctgccgaagcctggggcagagccgattgcggctttaccagcgagagctaccagcagggcgtgctgagcgccaccatcctgtacgagatcctgctgggcaaggccaccctgtacgccgtgctggtgtctgccctggtgctgatggctatggtcaagcggaaggacagccggggaagggccaagcgatctggatctggagcaacaaacttctcactactcaaacaagcaggtgacgtggaggagaatcccgggcctactagtatggactggatttggcgcatccttttccttgtcggcgctgctaccggcgcccattccgggcccggcatgagaaccgaggacctgcctaaggccgtggtgttcctggaaccccagtggtacagagtgctggaaaaggacagcgtgaccctgaagtgccagggcgcctacagccccgaggacaatagcacccagtggttccacaacgagagcctgatctccagccaggccagcagctacttcatcgacgccgccaccgtggacgacagcggcgagtatagatgccagaccaacctgagcaccctgagcgaccccgtgcagctggaagtgcacatcggatggctgctgctgcaggcccccagatgggtgttcaaagaagaggaccccatccacctgagatgccactcttggaagaacaccgccctgcacaaagtgacctacctgcagaacggcaagggcagaaagtacttccaccacaacagcgacttctacatccccaaggccaccctgaaggactccggctcctacttctgcagaggcctcgtgggcagcaagaacgtgtccagcgagacagtgaacatcaccatcacccagggcctggccgtgtctaccatcagcagctttttcccacccggctaccagggatccggcggcggaggatctggcggaggcggatctgggggcggaggctctttcgaacaagttcagcttcaacagcctggcgctgagctggtcaaacctggcgcttctgtgaagatgagctgcaaagccagcggctacgccttcagcagctactggatcaactggatgaagcagaaacccggccagggactcgaatggatcggccaaatctatcccggcgacggcgacaccaactacaacggcaagttcaagggcagagccacactgaccgccgatacctctagcagcacagcctacatgcagctgagcagcctgaccagcgaagatagcgccgtgtacttctgtgcccggtccatcacaacagtcgtgggctgcgctatggactattggggccagggaacaagcgtgaccgtgtctagtacgcgtatccagaaccctgatcctgccgtgtaccagctgcgggatagcaagagcagcgacaagagcgtgtgtctgttcaccgacttcgacagccagaccaacgtgtcccagagcaaggactccgacgtgtacatcaccgataagtgcgtgctggacatgcggagcatggacttcaagagcaactccgccgtggcctggtccaacaagtccgatttcgcctgcgccaacgccttcaacaacagcattatccccgaggacacattcttcccaagccccgagagcagctgcgacgtgaagctggtggaaaagagcttcgagacagacaccaacctgaacttccagaacctgagcgtgatcggcttcagaatcctgctgctgaaagtggccggctttaacctgctgatgaccctgcggctgtggtccagccgcgccaagagaagcggatctggcgtgaagcagaccctgaatttcgacctgctgaagctggctggcgacgtggaatccaacccaggcccttctagaggccatatgaccgagtacaagcccacggtgcgcctcgccacccgcgacgacgtccccagggccgtacgcaccctcgccgccgcgttcgccgactaccccgccacgcgccacaccgtcgatccggaccgccacatcgagcgggtcaccgagctgcaagaactcttcctcacgcgcgtcgggctcgacatcggcaaggtgtgggtcgcggacgacggcgccgcggtggcggtctggaccacgccggagagcgtcgaagcgggggcggtgttcgccgagatcggcccgcgcatggccgagttgagcggttcccggctggccgcgcagcaacagatggaaggcctcctggcgccgcaccggcccaaggagcccgcgtggttcctggccaccgtcggcgtctcgcccgaccaccagggcaagggtctgggcagcgccgtcgtgctccccggagtggaggcggccgagcgcgccggggtgcccgccttcctggagacctccgcgccccgcaacctccccttctacgagcggctcggcttcaccgtcaccgccgacgtcgaggtgcccgaaggaccgcgcacctggtgcatgacccgcaagcccggtgcctga

SEQ ID NO: 4853 - DNA, 2499 bp, Artificial Sequence
  Synthetic Polynucloetide
atggccttaccagtgaccgccttgctcctgccgctggccttgctgctccacgccgccaggccggacatccagatgacacagagccctagcagcctgtctgccagcgtgggagacagagtgaccatcacatgcaaggccagcgaccacatcaacaactggctggcctggtatcagcagaagcctggacaggcccctaagctgctgatctacggcgctaccacactggaaacaggcgtgcccagcagattttctggcagcggctctggcaccgactacaccctgacaatatccagcctccagcctgaggacttcgccacctactactgtcagcagagctggaacaccccttggacattcggccagggcaccaagctggaaatcaagagactcgaggacctgaagaacgtgttcccacctgaggtggccgtgttcgagcctagcgaggccgagatcagccacacccagaaagccaccctcgtgtgcctggctaccggcttctaccccgaccatgtggaactgtcttggtgggtcaacggcaaagaggtgcacagcggcgtgtgtaccgacccccagccactgaaagaacagcccgccctgaacgacagccggtactgcctgagcagcagactgagagtgtccgccaccttctggcagaacccccggaaccacttcagatgccaggtgcagttctacggcctgagcgagaacgacgagtggacccaggacagagccaagcccgtgacccagatcgtgtctgccgaagcctggggcagagccgattgcggctttaccagcgagagctaccagcagggcgtgctgagcgccaccatcctgtacgagatcctgctgggcaaggccaccctgtacgccgtgctggtgtctgccctggtgctgatggctatggtcaagcggaaggacagccggggaagggccaagcgatctggatctggagcaacaaacttctcactactcaaacaagcaggtgacgtggaggagaatcccgggcctactagtatggactggatttggcgcatccttttccttgtcggcgctgctaccggcgcccattccgggcccggcatgagaaccgaggacctgcctaaggccgtggtgttcctggaaccccagtggtacagagtgctggaaaaggacagcgtgaccctgaagtgccagggcgcctacagccccgaggacaatagcacccagtggttccacaacgagagcctgatctccagccaggccagcagctacttcatcgacgccgccaccgtggacgacagcggcgagtatagatgccagaccaacctgagcaccctgagcgaccccgtgcagctggaagtgcacatcggatggctgctgctgcaggcccccagatgggtgttcaaagaagaggaccccatccacctgagatgccactcttggaagaacaccgccctgcacaaagtgacctacctgcagaacggcaagggcagaaagtacttccaccacaacagcgacttctacatccccaaggccaccctgaaggactccggctcctacttctgcagaggcctcgtgggcagcaagaacgtgtccagcgagacagtgaacatcaccatcacccagggcctggccgtgtctaccatcagcagctttttcccacccggctaccagggatccggcggcggaggatctggcggaggcggatctgggggcggaggctctttcgaacaagttcagcttcaacagcctggcgctgagctggtcaaacctggcgcttctgtgaagatgagctgcaaagccagcggctacgccttcagcagctactggatcaactggatgaagcagaaacccggccagggactcgaatggatcggccaaatctatcccggcgacggcgacaccaactacaacggcaagttcaagggcagagccacactgaccgccgatacctctagcagcacagcctacatgcagctgagcagcctgaccagcgaagatagcgccgtgtacttctgtgcccggtccatcacaacagtcgtgggctgcgctatggactattggggccagggaacaagcgtgaccgtgtctagtacgcgtatccagaaccctgatcctgccgtgtaccagctgcgggatagcaagagcagcgacaagagcgtgtgtctgttcaccgacttcgacagccagaccaacgtgtcccagagcaaggactccgacgtgtacatcaccgataagtgcgtgctggacatgcggagcatggacttcaagagcaactccgccgtggcctggtccaacaagtccgatttcgcctgcgccaacgccttcaacaacagcattatccccgaggacacattcttcccaagccccgagagcagctgcgacgtgaagctggtggaaaagagcttcgagacagacaccaacctgaacttccagaacctgagcgtgatcggcttcagaatcctgctgctgaaagtggccggctttaacctgctgatgaccctgcggctgtggtccagc

SEQ ID NO: 4854 - DNA, 3174 bp, Artificial Sequence
  Synthetic Polynucloetide
atggccttaccagtgaccgccttgctcctgccgctggccttgctgctccacgccgccaggccggacatccagatgacacagagccctagcagcctgtctgccagcgtgggagacagagtgaccatcacatgcaaggccagcgaccacatcaacaactggctggcctggtatcagcagaagcctggacaggcccctaagctgctgatctacggcgctaccacactggaaacaggcgtgcccagcagattttctggcagcggctctggcaccgactacaccctgacaatatccagcctccagcctgaggacttcgccacctactactgtcagcagagctggaacaccccttggacattcggccagggcaccaagctggaaatcaagagactcgaggacctgaagaacgtgttcccacctgaggtggccgtgttcgagcctagcgaggccgagatcagccacacccagaaagccaccctcgtgtgcctggctaccggcttctaccccgaccatgtggaactgtcttggtgggtcaacggcaaagaggtgcacagcggcgtgtgtaccgacccccagccactgaaagaacagcccgccctgaacgacagccggtactgcctgagcagcagactgagagtgtccgccaccttctggcagaacccccggaaccacttcagatgccaggtgcagttctacggcctgagcgagaacgacgagtggacccaggacagagccaagcccgtgacccagatcgtgtctgccgaagcctggggcagagccgattgcggctttaccagcgagagctaccagcagggcgtgctgagcgccaccatcctgtacgagatcctgctgggcaaggccaccctgtacgccgtgctggtgtctgccctggtgctgatggctatggtcaagcggaaggacagccggggaagggccaagcgatctggatctggagcaacaaacttctcactactcaaacaagcaggtgacgtggaggagaatcccgggcctactagtatggactggatttggcgcatccttttccttgtcggcgctgctaccggcgcccattccgggcccggcatgagaaccgaggacctgcctaaggccgtggtgttcctggaaccccagtggtacagagtgctggaaaaggacagcgtgaccctgaagtgccagggcgcctacagccccgaggacaatagcacccagtggttccacaacgagagcctgatctccagccaggccagcagctacttcatcgacgccgccaccgtggacgacagcggcgagtatagatgccagaccaacctgagcaccctgagcgaccccgtgcagctggaagtgcacatcggatggctgctgctgcaggcccccagatgggtgttcaaagaagaggaccccatccacctgagatgccactcttggaagaacaccgccctgcacaaagtgacctacctgcagaacggcaagggcagaaagtacttccaccacaacagcgacttctacatccccaaggccaccctgaaggactccggctcctacttctgcagaggcctcgtgggcagcaagaacgtgtccagcgagacagtgaacatcaccatcacccagggcctggccgtgtctaccatcagcagctttttcccacccggctaccagggatccggcggcggaggatctggcggaggcggatctgggggcggaggctctttcgaacaagttcagcttcaacagcctggcgctgagctggtcaaacctggcgcttctgtgaagatgagctgcaaagccagcggctacgccttcagcagctactggatcaactggatgaagcagaaacccggccagggactcgaatggatcggccaaatctatcccggcgacggcgacaccaactacaacggcaagttcaagggcagagccacactgaccgccgatacctctagcagcacagcctacatgcagctgagcagcctgaccagcgaagatagcgccgtgtacttctgtgcccggtccatcacaacagtcgtgggctgcgctatggactattggggccagggaacaagcgtgaccgtgtctagtacgcgtatccagaaccctgatcctgccgtgtaccagctgcgggatagcaagagcagcgacaagagcgtgtgtctgttcaccgacttcgacagccagaccaacgtgtcccagagcaaggactccgacgtgtacatcaccgataagtgcgtgctggacatgcggagcatggacttcaagagcaactccgccgtggcctggtccaacaagtccgatttcgcctgcgccaacgccttcaacaacagcattatccccgaggacacattcttcccaagccccgagagcagctgcgacgtgaagctggtggaaaagagcttcgagacagacaccaacctgaacttccagaacctgagcgtgatcggcttcagaatcctgctgctgaaagtggccggctttaacctgctgatgaccctgcggctgtggtccagccgcgccaagagaagcggatctggcgtgaagcagaccctgaatttcgacctgctgaagctggctggcgacgtggaatccaacccaggcccttctagaggcgggatccacaccatggctacctacgaggtgctgtgcgaggtggcaagaaagctgggcaccgacgacagagaagtggtgctgttcctgctgaacgtgttcatccctcagcctacactggcccagctgatcggtgcactgagagccctgaaagaggaaggccggctgacctttcctctgctggccgaatgcctgttcagagccggaagaagggatctgctgcgggacctgctgcatctggaccccagatttctggaaagacacctggccggcaccatgagctacttcagcccttaccagctgaccgtgctgcacgttgacggcgaactgtgcgccagagatattcggagcctgatcttcctgagcaaggacaccatcggcagccggtctacccctcagacatttctgcactgggtgtactgcatggaaaacctggacctgctcggccccacagatgtggatgccctgatgtccatgctgagaagcctgagcagagtggacctccagagacaggtgcagacactgatgggactgcacctgagcggacctagccacagccagcactacagacacacccct

SEQ ID NO: 4855 - DNA, 2511 bp, Artificial Sequence
  Synthetic Polynucloetide
atggccttaccagtgaccgccttgctcctgccgctggccttgctgctccacgccgccaggccggacatccagatgacacagagccctagcagcctgtctgccagcgtgggagacagagtgaccatcacatgcaaggccagcgaccacatcaacaactggctggcctggtatcagcagaagcctggacaggcccctaagctgctgatctacggcgctaccacactggaaacaggcgtgcccagcagattttctggcagcggctctggcaccgactacaccctgacaatatccagcctccagcctgaggacttcgccacctactactgtcagcagagctggaacaccccttggacattcggccagggcaccaagctggaaatcaagagactcgagatccagaaccctgatcctgccgtgtaccagctgcgggatagcaagagcagcgacaagagcgtgtgtctgttcaccgacttcgacagccagaccaacgtgtcccagagcaaggactccgacgtgtacatcaccgataagtgcgtgctggacatgcggagcatggacttcaagagcaactccgccgtggcctggtccaacaagtccgatttcgcctgcgccaacgccttcaacaacagcattatccccgaggacacattcttcccaagccccgagagcagctgcgacgtgaagctggtggaaaagagcttcgagacagacaccaacctgaacttccagaacctgagcgtgatcggcttcagaatcctgctgctgaaagtggccggctttaacctgctgatgaccctgcggctgtggtccagccgcgccaagagaagcggatctggcgtgaagcagaccctgaatttcgacctgctgaagctggctggcgacgtggaatccaacccaggccctactagtatggactggatttggcgcatccttttccttgtcggcgctgctaccggcgcccattccgggcccggcatgagaaccgaggacctgcctaaggccgtggtgttcctggaaccccagtggtacagagtgctggaaaaggacagcgtgaccctgaagtgccagggcgcctacagccccgaggacaatagcacccagtggttccacaacgagagcctgatctccagccaggccagcagctacttcatcgacgccgccaccgtggacgacagcggcgagtatagatgccagaccaacctgagcaccctgagcgaccccgtgcagctggaagtgcacatcggatggctgctgctgcaggcccccagatgggtgttcaaagaagaggaccccatccacctgagatgccactcttggaagaacaccgccctgcacaaagtgacctacctgcagaacggcaagggcagaaagtacttccaccacaacagcgacttctacatccccaaggccaccctgaaggactccggctcctacttctgcagaggcctcgtgggcagcaagaacgtgtccagcgagacagtgaacatcaccatcacccagggcctggccgtgtctaccatcagcagctttttcccacccggctaccagggatccggcggcggaggatctggcggaggcggatctgggggcggaggctctttcgaacaagttcagcttcaacagcctggcgctgagctggtcaaacctggcgcttctgtgaagatgagctgcaaagccagcggctacgccttcagcagctactggatcaactggatgaagcagaaacccggccagggactcgaatggatcggccaaatctatcccggcgacggcgacaccaactacaacggcaagttcaagggcagagccacactgaccgccgatacctctagcagcacagcctacatgcagctgagcagcctgaccagcgaagatagcgccgtgtacttctgtgcccggtccatcacaacagtcgtgggctgcgctatggactattggggccagggaacaagcgtgaccgtgtctagtacgcgtgaggacctgaagaacgtgttcccacctgaggtggccgtgttcgagcctagcgaggccgagatcagccacacccagaaagccaccctcgtgtgcctggctaccggcttctaccccgaccatgtggaactgtcttggtgggtcaacggcaaagaggtgcacagcggcgtgtgtaccgacccccagccactgaaagaacagcccgccctgaacgacagccggtactgcctgagcagcagactgagagtgtccgccaccttctggcagaacccccggaaccacttcagatgccaggtgcagttctacggcctgagcgagaacgacgagtggacccaggacagagccaagcccgtgacccagatcgtgtctgccgaagcctggggcagagccgattgcggctttaccagcgagagctaccagcagggcgtgctgagcgccaccatcctgtacgagatcctgctgggcaaggccaccctgtacgccgtgctggtgtctgccctggtgctgatggctatggtcaagcggaaggacagccgggga

SEQ ID NO: 4856 - DNA, 3177 bp, Artificial Sequence
  Synthetic Polynucloetide
atggccttaccagtgaccgccttgctcctgccgctggccttgctgctccacgccgccaggccggacatccagatgacacagagccctagcagcctgtctgccagcgtgggagacagagtgaccatcacatgcaaggccagcgaccacatcaacaactggctggcctggtatcagcagaagcctggacaggcccctaagctgctgatctacggcgctaccacactggaaacaggcgtgcccagcagattttctggcagcggctctggcaccgactacaccctgacaatatccagcctccagcctgaggacttcgccacctactactgtcagcagagctggaacaccccttggacattcggccagggcaccaagctggaaatcaagagactcgagatccagaaccctgatcctgccgtgtaccagctgcgggatagcaagagcagcgacaagagcgtgtgtctgttcaccgacttcgacagccagaccaacgtgtcccagagcaaggactccgacgtgtacatcaccgataagtgcgtgctggacatgcggagcatggacttcaagagcaactccgccgtggcctggtccaacaagtccgatttcgcctgcgccaacgccttcaacaacagcattatccccgaggacacattcttcccaagccccgagagcagctgcgacgtgaagctggtggaaaagagcttcgagacagacaccaacctgaacttccagaacctgagcgtgatcggcttcagaatcctgctgctgaaagtggccggctttaacctgctgatgaccctgcggctgtggtccagccgcgccaagagaagcggatctggcgtgaagcagaccctgaatttcgacctgctgaagctggctggcgacgtggaatccaacccaggccctactagtatggactggatttggcgcatccttttccttgtcggcgctgctaccggcgcccattccgggcccggcatgagaaccgaggacctgcctaaggccgtggtgttcctggaaccccagtggtacagagtgctggaaaaggacagcgtgaccctgaagtgccagggcgcctacagccccgaggacaatagcacccagtggttccacaacgagagcctgatctccagccaggccagcagctacttcatcgacgccgccaccgtggacgacagcggcgagtatagatgccagaccaacctgagcaccctgagcgaccccgtgcagctggaagtgcacatcggatggctgctgctgcaggcccccagatgggtgttcaaagaagaggaccccatccacctgagatgccactcttggaagaacaccgccctgcacaaagtgacctacctgcagaacggcaagggcagaaagtacttccaccacaacagcgacttctacatccccaaggccaccctgaaggactccggctcctacttctgcagaggcctcgtgggcagcaagaacgtgtccagcgagacagtgaacatcaccatcacccagggcctggccgtgtctaccatcagcagctttttcccacccggctaccagggatccggcggcggaggatctggcggaggcggatctgggggcggaggctctttcgaacaagttcagcttcaacagcctggcgctgagctggtcaaacctggcgcttctgtgaagatgagctgcaaagccagcggctacgccttcagcagctactggatcaactggatgaagcagaaacccggccagggactcgaatggatcggccaaatctatcccggcgacggcgacaccaactacaacggcaagttcaagggcagagccacactgaccgccgatacctctagcagcacagcctacatgcagctgagcagcctgaccagcgaagatagcgccgtgtacttctgtgcccggtccatcacaacagtcgtgggctgcgctatggactattggggccagggaacaagcgtgaccgtgtctagtacgcgtgaggacctgaagaacgtgttcccacctgaggtggccgtgttcgagcctagcgaggccgagatcagccacacccagaaagccaccctcgtgtgcctggctaccggcttctaccccgaccatgtggaactgtcttggtgggtcaacggcaaagaggtgcacagcggcgtgtgtaccgacccccagccactgaaagaacagcccgccctgaacgacagccggtactgcctgagcagcagactgagagtgtccgccaccttctggcagaacccccggaaccacttcagatgccaggtgcagttctacggcctgagcgagaacgacgagtggacccaggacagagccaagcccgtgacccagatcgtgtctgccgaagcctggggcagagccgattgcggctttaccagcgagagctaccagcagggcgtgctgagcgccaccatcctgtacgagatcctgctgggcaaggccaccctgtacgccgtgctggtgtctgccctggtgctgatggctatggtcaagcggaaggacagccggggaagggccaagcgatctggatctggagcaacaaacttctcactactcaaacaagcaggtgacgtggaggagaatcccgggccttctagaggcgggatccacaccatggctacctacgaggtgctgtgcgaggtggcaagaaagctgggcaccgacgacagagaagtggtgctgttcctgctgaacgtgttcatccctcagcctacactggcccagctgatcggtgcactgagagccctgaaagaggaaggccggctgacctttcctctgctggccgaatgcctgttcagagccggaagaagggatctgctgcgggacctgctgcatctggaccccagatttctggaaagacacctggccggcaccatgagctacttcagcccttaccagctgaccgtgctgcacgttgacggcgaactgtgcgccagagatattcggagcctgatcttcctgagcaaggacaccatcggcagccggtctacccctcagacatttctgcactgggtgtactgcatggaaaacctggacctgctcggccccacagatgtggatgccctgatgtccatgctgagaagcctgagcagagtggacctccagagacaggtgcagacactgatgggactgcacctgagcggacctagccacagccagcactacagacacacccct

SEQ ID NO: 4857 - DNA, 3201 bp, Artificial Sequence
  Synthetic Polynucloetide
atggccttaccagtgaccgccttgctcctgccgctggccttgctgctccacgccgccaggccggacatccagatgacacagagccctagcagcctgtctgccagcgtgggagacagagtgaccatcacatgcaaggccagcgaccacatcaacaactggctggcctggtatcagcagaagcctggacaggcccctaagctgctgatctacggcgctaccacactggaaacaggcgtgcccagcagattttctggcagcggctctggcaccgactacaccctgacaatatccagcctccagcctgaggacttcgccacctactactgtcagcagagctggaacaccccttggacattcggccagggcaccaagctggaaatcaagagactcgaggacctgaagaacgtgttcccacctgaggtggccgtgttcgagcctagcgaggccgagatcagccacacccagaaagccaccctcgtgtgcctggctaccggcttctaccccgaccatgtggaactgtcttggtgggtcaacggcaaagaggtgcacagcggcgtgtctaccgacccccagccactgaaagaacagcccgccctgaacgacagccggtactgcctgagcagcagactgagagtgtccgccaccttctggcagaacccccggaaccacttcagatgccaggtgcagttctacggcctgagcgagaacgacgagtggacccaggacagagccaagcccgtgacccagatcgtgtctgccgaagcctggggcagagccgattgcggctttaccagcgagagctaccagcagggcgtgctgagcgccaccatcctgtacgagatcctgctgggcaaggccaccctgtacgccgtgctggtgtctgccctggtgctgatggctatggtcaagcggaaggacagccggggaagggccaagcgatctggatctggagcaacaaacttctcactactcaaacaagcaggtgacgtggaggagaatcccgggcctactagtatggactggatttggcgcatccttttccttgtcggcgctgctaccggcgcccattccgggcccggcatgagaaccgaggacctgcctaaggccgtggtgttcctggaaccccagtggtacagagtgctggaaaaggacagcgtgaccctgaagtgccagggcgcctacagccccgaggacaatagcacccagtggttccacaacgagagcctgatctccagccaggccagcagctacttcatcgacgccgccaccgtggacgacagcggcgagtatagatgccagaccaacctgagcaccctgagcgaccccgtgcagctggaagtgcacatcggatggctgctgctgcaggcccccagatgggtgttcaaagaagaggaccccatccacctgagatgccactcttggaagaacaccgccctgcacaaagtgacctacctgcagaacggcaagggcagaaagtacttccaccacaacagcgacttctacatccccaaggccaccctgaaggactccggctcctacttctgcagaggcctcgtgggcagcaagaacgtgtccagcgagacagtgaacatcaccatcacccagggcctggccgtgtctaccatcagcagctttttcccacccggctaccagggatccggcggcggaggatctggcggaggcggatctgggggcggaggctctttcgaacaagttcagcttcaacagcctggcgctgagctggtcaaacctggcgcttctgtgaagatgagctgcaaagccagcggctacgccttcagcagctactggatcaactggatgaagcagaaacccggccagggactcgaatggatcggccaaatctatcccggcgacggcgacaccaactacaacggcaagttcaagggcagagccacactgaccgccgatacctctagcagcacagcctacatgcagctgagcagcctgaccagcgaagatagcgccgtgtacttctgtgcccggtccatcacaacagtcgtgggctgcgctatggactattggggccagggaacaagcgtgaccgtgtctagtacgcgtatccagaaccctgatcctgccgtgtaccagctgcgggatagcaagagcagcgacaagagcgtgtgtctgttcaccgacttcgacagccagaccaacgtgtcccagagcaaggactccgacgtgtacatcaccgataagaccgtgctggacatgcggagcatggacttcaagagcaactccgccgtggcctggtccaacaagtccgatttcgcctgcgccaacgccttcaacaacagcattatccccgaggacacattcttcccaagccccgagagcagctgcgacgtgaagctggtggaaaagagcttcgagacagacaccaacctgaacttccagaacctgagcgtgatcggcttcagaatcctgctgctgaaagtggccggctttaacctgctgatgaccctgcggctgtggtccagccgcgccaagagaagcggatctggcgtgaagcagaccctgaatttcgacctgctgaagctggctggcgacgtggaatccaacccaggcccttctagaggccatatgaccgagtacaagcccacggtgcgcctcgccacccgcgacgacgtccccagggccgtacgcaccctcgccgccgcgttcgccgactaccccgccacgcgccacaccgtcgatccggaccgccacatcgagcgggtcaccgagctgcaagaactcttcctcacgcgcgtcgggctcgacatcggcaaggtgtgggtcgcggacgacggcgccgcggtggcggtctggaccacgccggagagcgtcgaagcgggggcggtgttcgccgagatcggcccgcgcatggccgagttgagcggttcccggctggccgcgcagcaacagatggaaggcctcctggcgccgcaccggcccaaggagcccgcgtggttcctggccaccgtcggcgtctcgcccgaccaccagggcaagggtctgggcagcgccgtcgtgctccccggagtggaggcggccgagcgcgccggggtgcccgccttcctggagacctccgcgccccgcaacctccccttctacgagcggctcggcttcaccgtcaccgccgacgtcgaggtgcccgaaggaccgcgcacctggtgcatgacccgcaagcccggtgcctga

SEQ ID NO: 4858 - DNA, 3447 bp, Artificial Sequence
  Synthetic Polynucloetide
atggccttaccagtgaccgccttgctcctgccgctggccttgctgctccacgccgccaggccggacatccagatgacacagagccctagcagcctgtctgccagcgtgggagacagagtgaccatcacatgcaaggccagcgaccacatcaacaactggctggcctggtatcagcagaagcctggacaggcccctaagctgctgatctacggcgctaccacactggaaacaggcgtgcccagcagattttctggcagcggctctggcaccgactacaccctgacaatatccagcctccagcctgaggacttcgccacctactactgtcagcagagctggaacaccccttggacattcggccagggcaccaagctggaaatcaagagactcgaggacctgaagaacgtgttcccacctgaggtggccgtgttcgagcctagcgaggccgagatcagccacacccagaaagccaccctcgtgtgcctggctaccggcttctaccccgaccatgtggaactgtcttggtgggtcaacggcaaagaggtgcacagcggcgtgtctaccgacccccagccactgaaagaacagcccgccctgaacgacagccggtactgcctgagcagcagactgagagtgtccgccaccttctggcagaacccccggaaccacttcagatgccaggtgcagttctacggcctgagcgagaacgacgagtggacccaggacagagccaagcccgtgacccagatcgtgtctgccgaagcctggggcagagccgattgcggctttaccagcgagagctaccagcagggcgtgctgagcgccaccatcctgtacgagatcctgctgggcaaggccaccctgtacgccgtgctggtgtctgccctggtgctgatggctatggtcaagcggaaggacagccggggaagggccaagcgatctggatctggagcaacaaacttctcactactcaaacaagcaggtgacgtggaggagaatcccgggcctactagtatggactggatttggcgcatccttttccttgtcggcgctgctaccggcgcccattccgggcccggcatgagaaccgaggacctgcctaaggccgtggtgttcctggaaccccagtggtacagagtgctggaaaaggacagcgtgaccctgaagtgccagggcgcctacagccccgaggacaatagcacccagtggttccacaacgagagcctgatctccagccaggccagcagctacttcatcgacgccgccaccgtggacgacagcggcgagtatagatgccagaccaacctgagcaccctgagcgaccccgtgcagctggaagtgcacatcggatggctgctgctgcaggcccccagatgggtgttcaaagaagaggaccccatccacctgagatgccactcttggaagaacaccgccctgcacaaagtgacctacctgcagaacggcaagggcagaaagtacttccaccacaacagcgacttctacatccccaaggccaccctgaaggactccggctcctacttctgcagaggcctcgtgggcagcaagaacgtgtccagcgagacagtgaacatcaccatcacccagggcctggccgtgtctaccatcagcagctttttcccacccggctaccagggatccggcggcggaggatctggcggaggcggatctgggggcggaggctctttcgaacaagttcagcttcaacagcctggcgctgagctggtcaaacctggcgcttctgtgaagatgagctgcaaagccagcggctacgccttcagcagctactggatcaactggatgaagcagaaacccggccagggactcgaatggatcggccaaatctatcccggcgacggcgacaccaactacaacggcaagttcaagggcagagccacactgaccgccgatacctctagcagcacagcctacatgcagctgagcagcctgaccagcgaagatagcgccgtgtacttctgtgcccggtccatcacaacagtcgtgggctgcgctatggactattggggccagggaacaagcgtgaccgtgtctagtacgcgtgagcagaaactgatctcggaagaggatgggagcggcaccccattcccttctctggcccctcccatcatgctgctggtggacggcaagcagcagatggtggtcgtgtgcctggtgctggatgtggccccacctggactggacagccccatctggtttagcgccggcaatggctctgccctggacgcctttacctacggcccaagccctgccaccgatggcacctggacaaatctggcccacctgagcctgcccagcgaggaactggcttcttgggagcctctcgtgtgccacacaggacctggcgctgagggacacagcagatccacccagcctatgcacctgtctggcgaggccagcaccgccagaacctgtcctcaggaacctctgagaggcacccctggcggagcactgtggctgggagtgctgagactgctgctgttcaagctgctgctgtttgacctgctgctgacctgctcctgtctgtgcgatcctgccggccctctgccttctcctgccaccaccacaagactgagagccctgggcagccacagactgcaccctgccacagagacaggcggcagagaggccacaagcagccctagaccccagcccagagacagaagatggggcgataccccccctggcagaaagcctggatctccagtccgcgccaagagaagcggatctggcgtgaagcagaccctgaatttcgacctgctgaagctggctggcgacgtggaatccaacccaggcccttctagaggccatatgaccgagtacaagcccacggtgcgcctcgccacccgcgacgacgtccccagggccgtacgcaccctcgccgccgcgttcgccgactaccccgccacgcgccacaccgtcgatccggaccgccacatcgagcgggtcaccgagctgcaagaactcttcctcacgcgcgtcgggctcgacatcggcaaggtgtgggtcgcggacgacggcgccgcggtggcggtctggaccacgccggagagcgtcgaagcgggggcggtgttcgccgagatcggcccgcgcatggccgagttgagcggttcccggctggccgcgcagcaacagatggaaggcctcctggcgccgcaccggcccaaggagcccgcgtggttcctggccaccgtcggcgtctcgcccgaccaccagggcaagggtctgggcagcgccgtcgtgctccccggagtggaggcggccgagcgcgccggggtgcccgccttcctggagacctccgcgccccgcaacctccccttctacgagcggctcggcttcaccgtcaccgccgacgtcgaggtgcccgaaggaccgcgcacctggtgcatgacccgcaagcccggtgcctga

SEQ ID NO: 4859 - DNA, 3312 bp, Artificial Sequence
  Synthetic Polynucloetide
atggccttaccagtgaccgccttgctcctgccgctggccttgctgctccacgccgccaggccggacatccagatgacacagagccctagcagcctgtctgccagcgtgggagacagagtgaccatcacatgcaaggccagcgaccacatcaacaactggctggcctggtatcagcagaagcctggacaggcccctaagctgctgatctacggcgctaccacactggaaacaggcgtgcccagcagattttctggcagcggctctggcaccgactacaccctgacaatatccagcctccagcctgaggacttcgccacctactactgtcagcagagctggaacaccccttggacattcggccagggcaccaagctggaaatcaagagactcgaggggaaaccaattcccaaccctcttctgggactggattcaaccggcagcggcgacaagcagctggacgccgacgtgtcccccaagcctaccatcttcctgccctctatcgccgagacaaagctccagaaggccggcacctacctgtgcctgctggaaaagttcttcccagatgtgattaagatccactggcaggaaaagaagtccaacaccatcctgggcagccaggaaggcaacaccatgaagaccaacgacacctacatgaagttcagctggctgaccgtgcccgagaagtccctggacaaagaacacagatgcatcgtgcggcacgaaaacaacaagaacggcgtggaccaggaaatcatcttcccacccatcaagaccgatgtgattacaatggaccccaaggacaactgctccaaggacgccaacgataccctgctgctccagctgaccaacaccagcgcctactacatgtacttgttgctgctgctgaagtccgtggtgtacttcgccatcatcacatgctgcctgctgcggagaaccgccttctgctgcaacggcgagaagtctagggccaagcgatctggatctggagcaacaaacttctcactactcaaacaagcaggtgacgtggaggagaatcccgggcctactagtatggactggatttggcgcatccttttccttgtcggcgctgctaccggcgcccattccgggcccggcatgagaaccgaggacctgcctaaggccgtggtgttcctggaaccccagtggtacagagtgctggaaaaggacagcgtgaccctgaagtgccagggcgcctacagccccgaggacaatagcacccagtggttccacaacgagagcctgatctccagccaggccagcagctacttcatcgacgccgccaccgtggacgacagcggcgagtatagatgccagaccaacctgagcaccctgagcgaccccgtgcagctggaagtgcacatcggatggctgctgctgcaggcccccagatgggtgttcaaagaagaggaccccatccacctgagatgccactcttggaagaacaccgccctgcacaaagtgacctacctgcagaacggcaagggcagaaagtacttccaccacaacagcgacttctacatccccaaggccaccctgaaggactccggctcctacttctgcagaggcctcgtgggcagcaagaacgtgtccagcgagacagtgaacatcaccatcacccagggcctggccgtgtctaccatcagcagctttttcccacccggctaccagggatccggcggcggaggatctggcggaggcggatctgggggcggaggctctttcgaacaagttcagcttcaacagcctggcgctgagctggtcaaacctggcgcttctgtgaagatgagctgcaaagccagcggctacgccttcagcagctactggatcaactggatgaagcagaaacccggccagggactcgaatggatcggccaaatctatcccggcgacggcgacaccaactacaacggcaagttcaagggcagagccacactgaccgccgatacctctagcagcacagcctacatgcagctgagcagcctgaccagcgaagatagcgccgtgtacttctgtgcccggtccatcacaacagtcgtgggctgcgctatggactattggggccagggaacaagcgtgaccgtgtctagtacgcgtgagcagaaactgatctcggaagaggatgggagcggcagccagcctcacaccaagcccagcgtgttcgtgatgaagaacggcaccaacgtggcctgcctcgtgaaagagttctaccccaaggacatcaggatcaacctggtgtccagcaagaagatcaccgagttcgaccccgccatcgtgatctcccccagcggcaagtacaacgccgtgaagctggggaagtacgaggacagcaacagcgtgacctgctccgtgcagcacgacaacaagaccgtgcacagcaccgactttgaagtgaaaaccgactccaccgaccacgtgaagcccaaagagacagagaacaccaagcagcccagcaagagctgccacaagcccaaggccatcgtgcacaccgagaaagtgaacatgatgagcctgaccgtgctgggcctgcggatgctgttcgccaaaaccgtggccgtgaacttcctgctgaccgccaagctgttcttcctccgcgccaagagaagcggatctggcgtgaagcagaccctgaatttcgacctgctgaagctggctggcgacgtggaatccaacccaggcccttctagaggccatatgaccgagtacaagcccacggtgcgcctcgccacccgcgacgacgtccccagggccgtacgcaccctcgccgccgcgttcgccgactaccccgccacgcgccacaccgtcgatccggaccgccacatcgagcgggtcaccgagctgcaagaactcttcctcacgcgcgtcgggctcgacatcggcaaggtgtgggtcgcggacgacggcgccgcggtggcggtctggaccacgccggagagcgtcgaagcgggggcggtgttcgccgagatcggcccgcgcatggccgagttgagcggttcccggctggccgcgcagcaacagatggaaggcctcctggcgccgcaccggcccaaggagcccgcgtggttcctggccaccgtcggcgtctcgcccgaccaccagggcaagggtctgggcagcgccgtcgtgctccccggagtggaggcggccgagcgcgccggggtgcccgccttcctggagacctccgcgccccgcaacctccccttctacgagcggctcggcttcaccgtcaccgccgacgtcgaggtgcccgaaggaccgcgcacctggtgcatgacccgcaagcccggtgcctga

SEQ ID NO: 4860 - DNA, 2523 bp, Artificial Sequence
  Synthetic Polynucloetide
atggccttaccagtgaccgccttgctcctgccgctggccttgctgctccacgccgccaggccggacatccagatgacacagagccctagcagcctgtctgccagcgtgggagacagagtgaccatcacatgcaaggccagcgaccacatcaacaactggctggcctggtatcagcagaagcctggacaggcccctaagctgctgatctacggcgctaccacactggaaacaggcgtgcccagcagattttctggcagcggctctggcaccgactacaccctgacaatatccagcctccagcctgaggacttcgccacctactactgtcagcagagctggaacaccccttggacattcggccagggcaccaagctggaaatcaagagactcgagagccagcctcacaccaagcccagcgtgttcgtgatgaagaacggcaccaacgtggcctgcctcgtgaaagagttctaccccaaggacatcaggatcaacctggtgtccagcaagaagatcaccgagttcgaccccgccatcgtgatctcccccagcggcaagtacaacgccgtgaagctggggaagtacgaggacagcaacagcgtgacctgctccgtgcagcacgacaacaagaccgtgcacagcaccgactttgaagtgaaaaccgactccaccgaccacgtgaagcccaaagagacagagaacaccaagcagcccagcaagagctgccacaagcccaaggccatcgtgcacaccgagaaagtgaacatgatgagcctgaccgtgctgggcctgcggatgctgttcgccaaaaccgtggccgtgaacttcctgctgaccgccaagctgttcttcctcagggccaagcgatctggatctggagcaacaaacttctcactactcaaacaagcaggtgacgtggaggagaatcccgggcctactagtatggactggatttggcgcatccttttccttgtcggcgctgctaccggcgcccattccgggcccggcatgagaaccgaggacctgcctaaggccgtggtgttcctggaaccccagtggtacagagtgctggaaaaggacagcgtgaccctgaagtgccagggcgcctacagccccgaggacaatagcacccagtggttccacaacgagagcctgatctccagccaggccagcagctacttcatcgacgccgccaccgtggacgacagcggcgagtatagatgccagaccaacctgagcaccctgagcgaccccgtgcagctggaagtgcacatcggatggctgctgctgcaggcccccagatgggtgttcaaagaagaggaccccatccacctgagatgccactcttggaagaacaccgccctgcacaaagtgacctacctgcagaacggcaagggcagaaagtacttccaccacaacagcgacttctacatccccaaggccaccctgaaggactccggctcctacttctgcagaggcctcgtgggcagcaagaacgtgtccagcgagacagtgaacatcaccatcacccagggcctggccgtgtctaccatcagcagctttttcccacccggctaccagggatccggcggcggaggatctggcggaggcggatctgggggcggaggctctttcgaacaagttcagcttcaacagcctggcgctgagctggtcaaacctggcgcttctgtgaagatgagctgcaaagccagcggctacgccttcagcagctactggatcaactggatgaagcagaaacccggccagggactcgaatggatcggccaaatctatcccggcgacggcgacaccaactacaacggcaagttcaagggcagagccacactgaccgccgatacctctagcagcacagcctacatgcagctgagcagcctgaccagcgaagatagcgccgtgtacttctgtgcccggtccatcacaacagtcgtgggctgcgctatggactattggggccagggaacaagcgtgaccgtgtctagtacgcgtgacaagcagctggacgccgacgtgtcccccaagcctaccatcttcctgccctctatcgccgagacaaagctccagaaggccggcacctacctgtgcctgctggaaaagttcttcccagatgtgattaagatccactggcaggaaaagaagtccaacaccatcctgggcagccaggaaggcaacaccatgaagaccaacgacacctacatgaagttcagctggctgaccgtgcccgagaagtccctggacaaagaacacagatgcatcgtgcggcacgaaaacaacaagaacggcgtggaccaggaaatcatcttcccacccatcaagaccgatgtgattacaatggaccccaaggacaactgctccaaggacgccaacgataccctgctgctccagctgaccaacaccagcgcctactacatgtacttgttgctgctgctgaagtccgtggtgtacttcgccatcatcacatgctgcctgctgcggagaaccgccttctgctgcaacggcgagaagtct

SEQ ID NO: 4861 - DNA, 3732 bp, Artificial Sequence
  Synthetic Polynucloetide
atggccttaccagtgaccgccttgctcctgccgctggccttgctgctccacgccgccaggccggacatccagatgacacagagccctagcagcctgtctgccagcgtgggagacagagtgaccatcacatgcaaggccagcgaccacatcaacaactggctggcctggtatcagcagaagcctggacaggcccctaagctgctgatctacggcgctaccacactggaaacaggcgtgcccagcagattttctggcagcggctctggcaccgactacaccctgacaatatccagcctccagcctgaggacttcgccacctactactgtcagcagagctggaacaccccttggacattcggccagggcaccaagctggaaatcaagagaggacagcctaaggccaatcctaccgtgacactgttccctccaagcagcgaagaactccaggccaacaaggccacacttgtgtgcctgatctccgacttctaccctggggctgtgacagtggcttggaaggccgatggatctcctgtgaaagccggcgtggaaaccaccaagccatccaagcagagcaacaacaaatacgccgccagctcctacctgagcctgacacctgagcagtggaagtcccacagatcctacagctgccaagtgacccacgaaggcagcaccgtggaaaagacagtggcccctacagagtgcagcggatcccagagcttcggcctgctggaccccaagctgtgctacctgctggatggcatcctgttcatctacggcgtgatcctgaccgccctgttcctgagagtgaagttcagcagaagcgccgacgcccctgcctaccagcagggacagaaccaactgtacaacgagctgaacctgggcagacgggaagagtacgacgtgctggacaagcggagaggcagggaccctgagatgggcggaaagccccagcggagaaagaacccccaggaaggactgtataacgaactccagaaagacaagatggccgaagcctacagcgagatcggcatgaagggcgagcggagaagaggcaagggccacgatggcctgtaccagggcctgagcaccgccaccaaggacacctatgacgccctgcacatgcaggccctgcctccaagaagggccaagcgatctggatctggagcaacaaacttctcactactcaaacaagcaggtgacgtggaggagaatcccgggcctactagtatggactggatttggcgcatccttttccttgtcggcgctgctaccggcgcccattccgggcccggcatgagaaccgaggacctgcctaaggccgtggtgttcctggaaccccagtggtacagagtgctggaaaaggacagcgtgaccctgaagtgccagggcgcctacagccccgaggacaatagcacccagtggttccacaacgagagcctgatctccagccaggccagcagctacttcatcgacgccgccaccgtggacgacagcggcgagtatagatgccagaccaacctgagcaccctgagcgaccccgtgcagctggaagtgcacatcggatggctgctgctgcaggcccccagatgggtgttcaaagaagaggaccccatccacctgagatgccactcttggaagaacaccgccctgcacaaagtgacctacctgcagaacggcaagggcagaaagtacttccaccacaacagcgacttctacatccccaaggccaccctgaaggactccggctcctacttctgcagaggcctcgtgggcagcaagaacgtgtccagcgagacagtgaacatcaccatcacccagggcctggccgtgtctaccatcagcagctttttcccacccggctaccagggatccggcggcggaggatctggcggaggcggatctgggggcggaggctctttcgaacaagttcagcttcaacagcctggcgctgagctggtcaaacctggcgcttctgtgaagatgagctgcaaagccagcggctacgccttcagcagctactggatcaactggatgaagcagaaacccggccagggactcgaatggatcggccaaatctatcccggcgacggcgacaccaactacaacggcaagttcaagggcagagccacactgaccgccgatacctctagcagcacagcctacatgcagctgagcagcctgaccagcgaagatagcgccgtgtacttctgtgcccggtccatcacaacagtcgtgggctgcgctatggactattggggccagggaacaagcgtgaccgtgtctagtgcctctacaaagggaccctccgtgtttcctctggctcccagcagcaagtctacaagcggaggaacagccgctctgggctgcctggtcaaggattactttcccgagcctgtgaccgtgtcctggaatagcggagcactgacaagcggcgtgcacacctttccagccgtgctgcaaagcagcggcctgtactctctgagcagcgtggtcacagtgcctagctctagcctgggcacccagacctacatctgcaatgtgaaccacaagcctagcaacaccaaggtggacaagagagtggaacccaagagctgtggtacccagagttttgggttgttggaccctaaattgtgctatctgttggacggaatcctgttcatttacggagtgatcctgaccgcattgttcctgcgggttaagttttccagatccgcagacgcacccgcttaccaacaagggcagaaccaactctacaatgaacttaatttggggcggagggaagagtacgacgttctggacaaaaggaggggacgagatcccgagatgggcggaaagcctcagcgaaggaagaatccgcaagaggggctttataacgaactccagaaagataaaatggcagaagcctatagtgagattgggatgaagggagaaaggaggaggggtaaaggtcacgatgggttgtaccaaggattgagcacagccactaaagatacctatgatgcgctccacatgcaggccctgccgccaagacgcgccaagagaagcggatctggcgtgaagcagaccctgaatttcgacctgctgaagctggctggcgacgtggaatccaacccaggcccttctagaggccatatgaccgagtacaagcccacggtgcgcctcgccacccgcgacgacgtccccagggccgtacgcaccctcgccgccgcgttcgccgactaccccgccacgcgccacaccgtcgatccggaccgccacatcgagcgggtcaccgagctgcaagaactcttcctcacgcgcgtcgggctcgacatcggcaaggtgtgggtcgcggacgacggcgccgcggtggcggtctggaccacgccggagagcgtcgaagcgggggcggtgttcgccgagatcggcccgcgcatggccgagttgagcggttcccggctggccgcgcagcaacagatggaaggcctcctggcgccgcaccggcccaaggagcccgcgtggttcctggccaccgtcggcgtctcgcccgaccaccagggcaagggtctgggcagcgccgtcgtgctccccggagtggaggcggccgagcgcgccggggtgcccgccttcctggagacctccgcgccccgcaacctccccttctacgagcggctcggcttcaccgtcaccgccgacgtcgaggtgcccgaaggaccgcgcacctggtgcatgacccgcaagcccggtgcctga

SEQ ID NO: 4862 - DNA, 3087 bp, Artificial Sequence
  Synthetic Polynucloetide
atggccttaccagtgaccgccttgctcctgccgctggccttgctgctccacgccgccaggccggacatccagatgacacagagccctagcagcctgtctgccagcgtgggagacagagtgaccatcacatgcaaggccagcgaccacatcaacaactggctggcctggtatcagcagaagcctggacaggcccctaagctgctgatctacggcgctaccacactggaaacaggcgtgcccagcagattttctggcagcggctctggcaccgactacaccctgacaatatccagcctccagcctgaggacttcgccacctactactgtcagcagagctggaacaccccttggacattcggccagggcaccaagctggaaatcaagagactcgaggacctgaagaacgtgttcccacctgaggtggccgtgttcgagcctagcgaggccgagatcagccacacccagaaagccaccctcgtgtgcctggctaccggcttctaccccgaccatgtggaactgtcttggtgggtcaacggcaaagaggtgcacagcggcgtgtctaccgacccccagccactgaaagaacagcccgccctgaacgacagccggtactgcctgagcagcagactgagagtgtccgccaccttctggcagaacccccggaaccacttcagatgccaggtgcagttctacggcctgagcgagaacgacgagtggacccaggacagagccaagcccgtgacccagatcgtgtctgccgaagcctggggcagagccgattgcggatcccagagcttcggcctgctggaccccaagctgtgctacctgctggatggcatcctgttcatctacggcgtgatcctgaccgccctgttcctgagagtgaagttcagcagaagcgccgacgcccctgcctaccagcagggacagaaccaactgtacaacgagctgaacctgggcagacgggaagagtacgacgtgctggacaagcggagaggcagggaccctgagatgggcggaaagccccagcggagaaagaacccccaggaaggactgtataacgaactccagaaagacaagatggccgaagcctacagcgagatcggcatgaagggcgagcggagaagaggcaagggccacgatggcctgtaccagggcctgagcaccgccaccaaggacacctatgacgccctgcacatgcaggccctgcctccaagaagggccaagcgatctggatctggagcaacaaacttctcactactcaaacaagcaggtgacgtggaggagaatcccgggcctactagtatggactggatttggcgcatccttttccttgtcggcgctgctaccggcgcccattccgggcccggcatgagaaccgaggacctgcctaaggccgtggtgttcctggaaccccagtggtacagagtgctggaaaaggacagcgtgaccctgaagtgccagggcgcctacagccccgaggacaatagcacccagtggttccacaacgagagcctgatctccagccaggccagcagctacttcatcgacgccgccaccgtggacgacagcggcgagtatagatgccagaccaacctgagcaccctgagcgaccccgtgcagctggaagtgcacatcggatggctgctgctgcaggcccccagatgggtgttcaaagaagaggaccccatccacctgagatgccactcttggaagaacaccgccctgcacaaagtgacctacctgcagaacggcaagggcagaaagtacttccaccacaacagcgacttctacatccccaaggccaccctgaaggactccggctcctacttctgcagaggcctcgtgggcagcaagaacgtgtccagcgagacagtgaacatcaccatcacccagggcctggccgtgtctaccatcagcagctttttcccacccggctaccagggatccggcggcggaggatctggcggaggcggatctgggggcggaggctctttcgaacaagttcagcttcaacagcctggcgctgagctggtcaaacctggcgcttctgtgaagatgagctgcaaagccagcggctacgccttcagcagctactggatcaactggatgaagcagaaacccggccagggactcgaatggatcggccaaatctatcccggcgacggcgacaccaactacaacggcaagttcaagggcagagccacactgaccgccgatacctctagcagcacagcctacatgcagctgagcagcctgaccagcgaagatagcgccgtgtacttctgtgcccggtccatcacaacagtcgtgggctgcgctatggactattggggccagggaacaagcgtgaccgtgtctagtacgcgtatccagaaccctgatcctgccgtgtaccagctgcgggatagcaagagcagcgacaagagcgtgtgtctgttcaccgacttcgacagccagaccaacgtgtcccagagcaaggactccgacgtgtacatcaccgataagaccgtgctggacatgcggagcatggacttcaagagcaactccgccgtggcctggtccaacaagtccgatttcgcctgcgccaacgccttcaacaacagcattatccccgaggacacattcttcccaagccccgagagcagctgcggtacccagagttttgggttgttggaccctaaattgtgctatctgttggacggaatcctgttcatttacggagtgatcctgaccgcattgttcctgcgggttaagttttccagatccgcagacgcacccgcttaccaacaagggcagaaccaactctacaatgaacttaatttggggcggagggaagagtacgacgttctggacaaaaggaggggacgagatcccgagatgggcggaaagcctcagcgaaggaagaatccgcaagaggggctttataacgaactccagaaagataaaatggcagaagcctatagtgagattgggatgaagggagaaaggaggaggggtaaaggtcacgatgggttgtaccaaggattgagcacagccactaaagatacctatgatgcgctccacatgcaggccctgccgccaaga

SEQ ID NO: 4863 - DNA, 3087 bp, Artificial Sequence
  Synthetic Polynucloetide
atggccttaccagtgaccgccttgctcctgccgctggccttgctgctccacgccgccaggccggacatccagatgacacagagccctagcagcctgtctgccagcgtgggagacagagtgaccatcacatgcaaggccagcgaccacatcaacaactggctggcctggtatcagcagaagcctggacaggcccctaagctgctgatctacggcgctaccacactggaaacaggcgtgcccagcagattttctggcagcggctctggcaccgactacaccctgacaatatccagcctccagcctgaggacttcgccacctactactgtcagcagagctggaacaccccttggacattcggccagggcaccaagctggaaatcaagagactcgaggacctgaagaacgtgttcccacctgaggtggccgtgttcgagcctagcaaggccgagatcgcccacacccagaaagccaccctcgtgtgcctggctaccggcttctaccccgaccatgtggaactgtcttggtgggtcaacggcaaagaggtgcacagcggcgtgtgtaccgacccccagccactgaaagaacagcccgccctgaacgacagccggtactgcctgagcagcagactgagagtgtccgccaccttctggcagaacccccggaaccacttcagatgccaggtgcagttctacggcctgagcgagaacgacgagtggacccaggacagagccaagcccgtgacccagatcgtgtctgccgaagcctggggcagagccgattgcggatcccagagcttcggcctgctggaccccaagctgtgctacctgctggatggcatcctgttcatctacggcgtgatcctgaccgccctgttcctgagagtgaagttcagcagaagcgccgacgcccctgcctaccagcagggacagaaccaactgtacaacgagctgaacctgggcagacgggaagagtacgacgtgctggacaagcggagaggcagggaccctgagatgggcggaaagccccagcggagaaagaacccccaggaaggactgtataacgaactccagaaagacaagatggccgaagcctacagcgagatcggcatgaagggcgagcggagaagaggcaagggccacgatggcctgtaccagggcctgagcaccgccaccaaggacacctatgacgccctgcacatgcaggccctgcctccaagaagggccaagcgatctggatctggagcaacaaacttctcactactcaaacaagcaggtgacgtggaggagaatcccgggcctactagtatggactggatttggcgcatccttttccttgtcggcgctgctaccggcgcccattccgggcccggcatgagaaccgaggacctgcctaaggccgtggtgttcctggaaccccagtggtacagagtgctggaaaaggacagcgtgaccctgaagtgccagggcgcctacagccccgaggacaatagcacccagtggttccacaacgagagcctgatctccagccaggccagcagctacttcatcgacgccgccaccgtggacgacagcggcgagtatagatgccagaccaacctgagcaccctgagcgaccccgtgcagctggaagtgcacatcggatggctgctgctgcaggcccccagatgggtgttcaaagaagaggaccccatccacctgagatgccactcttggaagaacaccgccctgcacaaagtgacctacctgcagaacggcaagggcagaaagtacttccaccacaacagcgacttctacatccccaaggccaccctgaaggactccggctcctacttctgcagaggcctcgtgggcagcaagaacgtgtccagcgagacagtgaacatcaccatcacccagggcctggccgtgtctaccatcagcagctttttcccacccggctaccagggatccggcggcggaggatctggcggaggcggatctgggggcggaggctctttcgaacaagttcagcttcaacagcctggcgctgagctggtcaaacctggcgcttctgtgaagatgagctgcaaagccagcggctacgccttcagcagctactggatcaactggatgaagcagaaacccggccagggactcgaatggatcggccaaatctatcccggcgacggcgacaccaactacaacggcaagttcaagggcagagccacactgaccgccgatacctctagcagcacagcctacatgcagctgagcagcctgaccagcgaagatagcgccgtgtacttctgtgcccggtccatcacaacagtcgtgggctgcgctatggactattggggccagggaacaagcgtgaccgtgtctagtacgcgtatccagaaccctgatcctgccgtgtaccagctgcgggatagcaagagcagcgacaagagcgtgtgtctgttcaccgacttcgacagccagaccaacgtgtcccagagcaaggactccgacgtgtacatcaccgataagtgcgtgctggacatgcggagcatggacttcaagagcaactccgccgtggcctggtccaacaagtccgatttcgcctgcgccaacgccttcaacaacagcattatccccgaggacacattcttcccaagcagcgacgtgccctgcggtacccagagttttgggttgttggaccctaaattgtgctatctgttggacggaatcctgttcatttacggagtgatcctgaccgcattgttcctgcgggttaagttttccagatccgcagacgcacccgcttaccaacaagggcagaaccaactctacaatgaacttaatttggggcggagggaagagtacgacgttctggacaaaaggaggggacgagatcccgagatgggcggaaagcctcagcgaaggaagaatccgcaagaggggctttataacgaactccagaaagataaaatggcagaagcctatagtgagattgggatgaagggagaaaggaggaggggtaaaggtcacgatgggttgtaccaaggattgagcacagccactaaagatacctatgatgcgctccacatgcaggccctgccgccaaga

SEQ ID NO: 4864 - DNA, 3300 bp, Artificial Sequence
  Synthetic Polynucloetide
atggccttaccagtgaccgccttgctcctgccgctggccttgctgctccacgccgccaggccggacatccagatgacacagagccctagcagcctgtctgccagcgtgggagacagagtgaccatcacatgcaaggccagcgaccacatcaacaactggctggcctggtatcagcagaagcctggacaggcccctaagctgctgatctacggcgctaccacactggaaacaggcgtgcccagcagattttctggcagcggctctggcaccgactacaccctgacaatatccagcctccagcctgaggacttcgccacctactactgtcagcagagctggaacaccccttggacattcggccagggcaccaagctggaaatcaagagactcgaggggaaaccaattcccaaccctcttctgggactggattcaaccggcagcggcgaggacctgaagaacgtgttcccacctgaggtggccgtgttcgagcctagcgaggccgagatcagccacacccagaaagccaccctcgtgtgcctggctaccggcttctaccccgaccatgtggaactgtcttggtgggtcaacggcaaagaggtgcacagcggcgtgtctaccgacccccagccactgaaagaacagcccgccctgaacgacagccggtactgcctgagcagcagactgagagtgtccgccaccttctggcagaacccccggaaccacttcagatgccaggtgcagttctacggcctgagcgagaacgacgagtggacccaggacagagccaagcccgtgacccagatcgtgtctgccgaagcctggggcagagccgattgcggatcccagagcttcggcctgctggaccccaagctgtgctacctgctggatggcatcctgttcatctacggcgtgatcctgaccgccctgttcctgagagtgaagttcagcagaagcgccgacgcccctgcctaccagcagggacagaaccaactgtacaacgagctgaacctgggcagacgggaagagtacgacgtgctggacaagcggagaggcagggaccctgagatgggcggaaagccccagcggagaaagaacccccaggaaggactgtataacgaactccagaaagacaagatggccgaagcctacagcgagatcggcatgaagggcgagcggagaagaggcaagggccacgatggcctgtaccagggcctgagcaccgccaccaaggacacctatgacgccctgcacatgcaggccctgcctccaagaagggccaagcgatctggatctggagcaacaaacttctcactactcaaacaagcaggtgacgtggaggagaatcccgggcctactagtatggactggatttggcgcatccttttccttgtcggcgctgctaccggcgcccattccgggcccggcatgagaaccgaggacctgcctaaggccgtggtgttcctggaaccccagtggtacagagtgctggaaaaggacagcgtgaccctgaagtgccagggcgcctacagccccgaggacaatagcacccagtggttccacaacgagagcctgatctccagccaggccagcagctacttcatcgacgccgccaccgtggacgacagcggcgagtatagatgccagaccaacctgagcaccctgagcgaccccgtgcagctggaagtgcacatcggatggctgctgctgcaggcccccagatgggtgttcaaagaagaggaccccatccacctgagatgccactcttggaagaacaccgccctgcacaaagtgacctacctgcagaacggcaagggcagaaagtacttccaccacaacagcgacttctacatccccaaggccaccctgaaggactccggctcctacttctgcagaggcctcgtgggcagcaagaacgtgtccagcgagacagtgaacatcaccatcacccagggcctggccgtgtctaccatcagcagctttttcccacccggctaccagggatccggcggcggaggatctggcggaggcggatctgggggcggaggctctttcgaacaagttcagcttcaacagcctggcgctgagctggtcaaacctggcgcttctgtgaagatgagctgcaaagccagcggctacgccttcagcagctactggatcaactggatgaagcagaaacccggccagggactcgaatggatcggccaaatctatcccggcgacggcgacaccaactacaacggcaagttcaagggcagagccacactgaccgccgatacctctagcagcacagcctacatgcagctgagcagcctgaccagcgaagatagcgccgtgtacttctgtgcccggtccatcacaacagtcgtgggctgcgctatggactattggggccagggaacaagcgtgaccgtgtctagtacgcgtgagcagaaactgatctcggaagaggatgggagcggcatccagaaccctgatcctgccgtgtaccagctgcgggatagcaagagcagcgacaagagcgtgtgtctgttcaccgacttcgacagccagaccaacgtgtcccagagcaaggactccgacgtgtacatcaccgataagaccgtgctggacatgcggagcatggacttcaagagcaactccgccgtggcctggtccaacaagtccgatttcgcctgcgccaacgccttcaacaacagcattatccccgaggacacattcttcccaagccccgagagcagctgcggtacccagagttttgggttgttggaccctaaattgtgctatctgttggacggaatcctgttcatttacggagtgatcctgaccgcattgttcctgaggagcaagcggtcacggctgctccacagcgattacatgaatatgacaccacgaagaccgggtcctactcgcaaacactaccaaccctacgcacctccccgcgactttgcagcgtaccgatctcgggttaagttttccagatccgcagacgcacccgcttaccaacaagggcagaaccaactctacaatgaacttaatttggggcggagggaagagtacgacgttctggacaaaaggaggggacgagatcccgagatgggcggaaagcctcagcgaaggaagaatccgcaagaggggctttataacgaactccagaaagataaaatggcagaagcctatagtgagattgggatgaagggagaaaggaggaggggtaaaggtcacgatgggttgtaccaaggattgagcacagccactaaagatacctatgatgcgctccacatgcaggccctgccgccaaga

SEQ ID NO: 4865 - DNA, 3423 bp, Artificial Sequence
  Synthetic Polynucloetide
atggccttaccagtgaccgccttgctcctgccgctggccttgctgctccacgccgccaggccggacatccagatgacacagagccctagcagcctgtctgccagcgtgggagacagagtgaccatcacatgcaaggccagcgaccacatcaacaactggctggcctggtatcagcagaagcctggacaggcccctaagctgctgatctacggcgctaccacactggaaacaggcgtgcccagcagattttctggcagcggctctggcaccgactacaccctgacaatatccagcctccagcctgaggacttcgccacctactactgtcagcagagctggaacaccccttggacattcggccagggcaccaagctggaaatcaagagactcgaggggaaaccaattcccaaccctcttctgggactggattcaaccggcagcggcgaggacctgaagaacgtgttcccacctgaggtggccgtgttcgagcctagcgaggccgagatcagccacacccagaaagccaccctcgtgtgcctggctaccggcttctaccccgaccatgtggaactgtcttggtgggtcaacggcaaagaggtgcacagcggcgtgtctaccgacccccagccactgaaagaacagcccgccctgaacgacagccggtactgcctgagcagcagactgagagtgtccgccaccttctggcagaacccccggaaccacttcagatgccaggtgcagttctacggcctgagcgagaacgacgagtggacccaggacagagccaagcccgtgacccagatcgtgtctgccgaagcctggggcagagccgattgcggatcccagagcttcggcctgctggaccccaagctgtgctacctgctggatggcatcctgttcatctacggcgtgatcctgaccgccctgttcctgaggagtaagaggagcaggctcctgcacagtgactacatgaacatgactccacgccgccccggacccacccgcaagcattaccagccctatgccccaccacgcgacttcgcagcctatcgctccagagtgaagttcagcagaagcgccgacgcccctgcctaccagcagggacagaaccaactgtacaacgagctgaacctgggcagacgggaagagtacgacgtgctggacaagcggagaggcagggaccctgagatgggcggaaagccccagcggagaaagaacccccaggaaggactgtataacgaactccagaaagacaagatggccgaagcctacagcgagatcggcatgaagggcgagcggagaagaggcaagggccacgatggcctgtaccagggcctgagcaccgccaccaaggacacctatgacgccctgcacatgcaggccctgcctccaagaagggccaagcgatctggatctggagcaacaaacttctcactactcaaacaagcaggtgacgtggaggagaatcccgggcctactagtatggactggatttggcgcatccttttccttgtcggcgctgctaccggcgcccattccgggcccggcatgagaaccgaggacctgcctaaggccgtggtgttcctggaaccccagtggtacagagtgctggaaaaggacagcgtgaccctgaagtgccagggcgcctacagccccgaggacaatagcacccagtggttccacaacgagagcctgatctccagccaggccagcagctacttcatcgacgccgccaccgtggacgacagcggcgagtatagatgccagaccaacctgagcaccctgagcgaccccgtgcagctggaagtgcacatcggatggctgctgctgcaggcccccagatgggtgttcaaagaagaggaccccatccacctgagatgccactcttggaagaacaccgccctgcacaaagtgacctacctgcagaacggcaagggcagaaagtacttccaccacaacagcgacttctacatccccaaggccaccctgaaggactccggctcctacttctgcagaggcctcgtgggcagcaagaacgtgtccagcgagacagtgaacatcaccatcacccagggcctggccgtgtctaccatcagcagctttttcccacccggctaccagggatccggcggcggaggatctggcggaggcggatctgggggcggaggctctttcgaacaagttcagcttcaacagcctggcgctgagctggtcaaacctggcgcttctgtgaagatgagctgcaaagccagcggctacgccttcagcagctactggatcaactggatgaagcagaaacccggccagggactcgaatggatcggccaaatctatcccggcgacggcgacaccaactacaacggcaagttcaagggcagagccacactgaccgccgatacctctagcagcacagcctacatgcagctgagcagcctgaccagcgaagatagcgccgtgtacttctgtgcccggtccatcacaacagtcgtgggctgcgctatggactattggggccagggaacaagcgtgaccgtgtctagtacgcgtgagcagaaactgatctcggaagaggatgggagcggcatccagaaccctgatcctgccgtgtaccagctgcgggatagcaagagcagcgacaagagcgtgtgtctgttcaccgacttcgacagccagaccaacgtgtcccagagcaaggactccgacgtgtacatcaccgataagaccgtgctggacatgcggagcatggacttcaagagcaactccgccgtggcctggtccaacaagtccgatttcgcctgcgccaacgccttcaacaacagcattatccccgaggacacattcttcccaagccccgagagcagctgcggtacccagagttttgggttgttggaccctaaattgtgctatctgttggacggaatcctgttcatttacggagtgatcctgaccgcattgttcctgaggagcaagcggtcacggctgctccacagcgattacatgaatatgacaccacgaagaccgggtcctactcgcaaacactaccaaccctacgcacctccccgcgactttgcagcgtaccgatctcgggttaagttttccagatccgcagacgcacccgcttaccaacaagggcagaaccaactctacaatgaacttaatttggggcggagggaagagtacgacgttctggacaaaaggaggggacgagatcccgagatgggcggaaagcctcagcgaaggaagaatccgcaagaggggctttataacgaactccagaaagataaaatggcagaagcctatagtgagattgggatgaagggagaaaggaggaggggtaaaggtcacgatgggttgtaccaaggattgagcacagccactaaagatacctatgatgcgctccacatgcaggccctgccgccaaga

SEQ ID NO: 4866 - DNA, 3306 bp, Artificial Sequence
  Synthetic Polynucloetide
atggccttaccagtgaccgccttgctcctgccgctggccttgctgctccacgccgccaggccggacatccagatgacacagagccctagcagcctgtctgccagcgtgggagacagagtgaccatcacatgcaaggccagcgaccacatcaacaactggctggcctggtatcagcagaagcctggacaggcccctaagctgctgatctacggcgctaccacactggaaacaggcgtgcccagcagattttctggcagcggctctggcaccgactacaccctgacaatatccagcctccagcctgaggacttcgccacctactactgtcagcagagctggaacaccccttggacattcggccagggcaccaagctggaaatcaagagactcgaggggaaaccaattcccaaccctcttctgggactggattcaaccggcagcggcgaggacctgaagaacgtgttcccacctgaggtggccgtgttcgagcctagcgaggccgagatcagccacacccagaaagccaccctcgtgtgcctggctaccggcttctaccccgaccatgtggaactgtcttggtgggtcaacggcaaagaggtgcacagcggcgtgtctaccgacccccagccactgaaagaacagcccgccctgaacgacagccggtactgcctgagcagcagactgagagtgtccgccaccttctggcagaacccccggaaccacttcagatgccaggtgcagttctacggcctgagcgagaacgacgagtggacccaggacagagccaagcccgtgacccagatcgtgtctgccgaagcctggggcagagccgattgcggatcccagagcttcggcctgctggaccccaagctgtgctacctgctggatggcatcctgttcatctacggcgtgatcctgaccgccctgttcctgagagtgaagttcagcagaagcgccgacgcccctgcctaccagcagggacagaaccaactgtacaacgagctgaacctgggcagacgggaagagtacgacgtgctggacaagcggagaggcagggaccctgagatgggcggaaagccccagcggagaaagaacccccaggaaggactgtataacgaactccagaaagacaagatggccgaagcctacagcgagatcggcatgaagggcgagcggagaagaggcaagggccacgatggcctgtaccagggcctgagcaccgccaccaaggacacctatgacgccctgcacatgcaggccctgcctccaagaagggccaagcgatctggatctggagcaacaaacttctcactactcaaacaagcaggtgacgtggaggagaatcccgggcctactagtatggactggatttggcgcatccttttccttgtcggcgctgctaccggcgcccattccgggcccggcatgagaaccgaggacctgcctaaggccgtggtgttcctggaaccccagtggtacagagtgctggaaaaggacagcgtgaccctgaagtgccagggcgcctacagccccgaggacaatagcacccagtggttccacaacgagagcctgatctccagccaggccagcagctacttcatcgacgccgccaccgtggacgacagcggcgagtatagatgccagaccaacctgagcaccctgagcgaccccgtgcagctggaagtgcacatcggatggctgctgctgcaggcccccagatgggtgttcaaagaagaggaccccatccacctgagatgccactcttggaagaacaccgccctgcacaaagtgacctacctgcagaacggcaagggcagaaagtacttccaccacaacagcgacttctacatccccaaggccaccctgaaggactccggctcctacttctgcagaggcctcgtgggcagcaagaacgtgtccagcgagacagtgaacatcaccatcacccagggcctggccgtgtctaccatcagcagctttttcccacccggctaccagggatccggcggcggaggatctggcggaggcggatctgggggcggaggctctttcgaacaagttcagcttcaacagcctggcgctgagctggtcaaacctggcgcttctgtgaagatgagctgcaaagccagcggctacgccttcagcagctactggatcaactggatgaagcagaaacccggccagggactcgaatggatcggccaaatctatcccggcgacggcgacaccaactacaacggcaagttcaagggcagagccacactgaccgccgatacctctagcagcacagcctacatgcagctgagcagcctgaccagcgaagatagcgccgtgtacttctgtgcccggtccatcacaacagtcgtgggctgcgctatggactattggggccagggaacaagcgtgaccgtgtctagtacgcgtgagcagaaactgatctcggaagaggatctggggagcggcatccagaaccctgatcctgccgtgtaccagctgcgggatagcaagagcagcgacaagagcgtgtgtctgttcaccgacttcgacagccagaccaacgtgtcccagagcaaggactccgacgtgtacatcaccgataagaccgtgctggacatgcggagcatggacttcaagagcaactccgccgtggcctggtccaacaagtccgatttcgcctgcgccaacgccttcaacaacagcattatccccgaggacacattcttcccaagccccgagagcagctgcggtacccagagttttgggttgttggaccctaaattgtgctatctgttggacggaatcctgttcatttacggagtgatcctgaccgcattgttcctgaagagaggccggaagaagctgctgtacatcttcaagcagcctttcatgcggcccgtgcagaccacccaggaagaggacggctgctcctgccggttccccgaggaagaagaaggcggctgcgagctgcgggttaagttttccagatccgcagacgcacccgcttaccaacaagggcagaaccaactctacaatgaacttaatttggggcggagggaagagtacgacgttctggacaaaaggaggggacgagatcccgagatgggcggaaagcctcagcgaaggaagaatccgcaagaggggctttataacgaactccagaaagataaaatggcagaagcctatagtgagattgggatgaagggagaaaggaggaggggtaaaggtcacgatgggttgtaccaaggattgagcacagccactaaagatacctatgatgcgctccacatgcaggccctgccgccaaga

SEQ ID NO: 4867 - DNA, 3432 bp, Artificial Sequence
  Synthetic Polynucloetide
atggccttaccagtgaccgccttgctcctgccgctggccttgctgctccacgccgccaggccggacatccagatgacacagagccctagcagcctgtctgccagcgtgggagacagagtgaccatcacatgcaaggccagcgaccacatcaacaactggctggcctggtatcagcagaagcctggacaggcccctaagctgctgatctacggcgctaccacactggaaacaggcgtgcccagcagattttctggcagcggctctggcaccgactacaccctgacaatatccagcctccagcctgaggacttcgccacctactactgtcagcagagctggaacaccccttggacattcggccagggcaccaagctggaaatcaagagactcgaggggaaaccaattcccaaccctcttctgggactggattcaaccggcagcggcgaggacctgaagaacgtgttcccacctgaggtggccgtgttcgagcctagcgaggccgagatcagccacacccagaaagccaccctcgtgtgcctggctaccggcttctaccccgaccatgtggaactgtcttggtgggtcaacggcaaagaggtgcacagcggcgtgtctaccgacccccagccactgaaagaacagcccgccctgaacgacagccggtactgcctgagcagcagactgagagtgtccgccaccttctggcagaacccccggaaccacttcagatgccaggtgcagttctacggcctgagcgagaacgacgagtggacccaggacagagccaagcccgtgacccagatcgtgtctgccgaagcctggggcagagccgattgcggatcccagagcttcggcctgctggaccccaagctgtgctacctgctggatggcatcctgttcatctacggcgtgatcctgaccgccctgttcctgaaacggggcagaaagaaactcctgtatatattcaaacaaccatttatgagaccagtacaaactactcaagaggaagatggctgtagctgccgatttccagaagaagaagaaggaggatgtgaactgagagtgaagttcagcagaagcgccgacgcccctgcctaccagcagggacagaaccaactgtacaacgagctgaacctgggcagacgggaagagtacgacgtgctggacaagcggagaggcagggaccctgagatgggcggaaagccccagcggagaaagaacccccaggaaggactgtataacgaactccagaaagacaagatggccgaagcctacagcgagatcggcatgaagggcgagcggagaagaggcaagggccacgatggcctgtaccagggcctgagcaccgccaccaaggacacctatgacgccctgcacatgcaggccctgcctccaagaagggccaagcgatctggatctggagcaacaaacttctcactactcaaacaagcaggtgacgtggaggagaatcccgggcctactagtatggactggatttggcgcatccttttccttgtcggcgctgctaccggcgcccattccgggcccggcatgagaaccgaggacctgcctaaggccgtggtgttcctggaaccccagtggtacagagtgctggaaaaggacagcgtgaccctgaagtgccagggcgcctacagccccgaggacaatagcacccagtggttccacaacgagagcctgatctccagccaggccagcagctacttcatcgacgccgccaccgtggacgacagcggcgagtatagatgccagaccaacctgagcaccctgagcgaccccgtgcagctggaagtgcacatcggatggctgctgctgcaggcccccagatgggtgttcaaagaagaggaccccatccacctgagatgccactcttggaagaacaccgccctgcacaaagtgacctacctgcagaacggcaagggcagaaagtacttccaccacaacagcgacttctacatccccaaggccaccctgaaggactccggctcctacttctgcagaggcctcgtgggcagcaagaacgtgtccagcgagacagtgaacatcaccatcacccagggcctggccgtgtctaccatcagcagctttttcccacccggctaccagggatccggcggcggaggatctggcggaggcggatctgggggcggaggctctttcgaacaagttcagcttcaacagcctggcgctgagctggtcaaacctggcgcttctgtgaagatgagctgcaaagccagcggctacgccttcagcagctactggatcaactggatgaagcagaaacccggccagggactcgaatggatcggccaaatctatcccggcgacggcgacaccaactacaacggcaagttcaagggcagagccacactgaccgccgatacctctagcagcacagcctacatgcagctgagcagcctgaccagcgaagatagcgccgtgtacttctgtgcccggtccatcacaacagtcgtgggctgcgctatggactattggggccagggaacaagcgtgaccgtgtctagtacgcgtgagcagaaactgatctcggaagaggatctggggagcggcatccagaaccctgatcctgccgtgtaccagctgcgggatagcaagagcagcgacaagagcgtgtgtctgttcaccgacttcgacagccagaccaacgtgtcccagagcaaggactccgacgtgtacatcaccgataagaccgtgctggacatgcggagcatggacttcaagagcaactccgccgtggcctggtccaacaagtccgatttcgcctgcgccaacgccttcaacaacagcattatccccgaggacacattcttcccaagccccgagagcagctgcggtacccagagttttgggttgttggaccctaaattgtgctatctgttggacggaatcctgttcatttacggagtgatcctgaccgcattgttcctgaagagaggccggaagaagctgctgtacatcttcaagcagcctttcatgcggcccgtgcagaccacccaggaagaggacggctgctcctgccggttccccgaggaagaagaaggcggctgcgagctgcgggttaagttttccagatccgcagacgcacccgcttaccaacaagggcagaaccaactctacaatgaacttaatttggggcggagggaagagtacgacgttctggacaaaaggaggggacgagatcccgagatgggcggaaagcctcagcgaaggaagaatccgcaagaggggctttataacgaactccagaaagataaaatggcagaagcctatagtgagattgggatgaagggagaaaggaggaggggtaaaggtcacgatgggttgtaccaaggattgagcacagccactaaagatacctatgatgcgctccacatgcaggccctgccgccaaga

SEQ ID NO: 4868 - DNA, 3105 bp, Artificial Sequence
  Synthetic Polynucloetide
atggccttaccagtgaccgccttgctcctgccgctggccttgctgctccacgccgccaggccggacatccagatgacacagagccctagcagcctgtctgccagcgtgggagacagagtgaccatcacatgcaaggccagcgaccacatcaacaactggctggcctggtatcagcagaagcctggacaggcccctaagctgctgatctacggcgctaccacactggaaacaggcgtgcccagcagattttctggcagcggctctggcaccgactacaccctgacaatatccagcctccagcctgaggacttcgccacctactactgtcagcagagctggaacaccccttggacattcggccagggcaccaagctggaaatcaagagactcgagcagagcttcggcctgctggaccccaagctgtgctacctgctggatggcatcctgttcatctacggcgtgatcctgaccgccctgttcctgagagtgaagttcagcagaagcgccgacgcccctgcctaccagcagggacagaaccaactgtacaacgagctgaacctgggcagacgggaagagtacgacgtgctggacaagcggagaggcagggaccctgagatgggcggaaagccccagcggagaaagaacccccaggaaggactgtataacgaactccagaaagacaagatggccgaagcctacagcgagatcggcatgaagggcgagcggagaagaggcaagggccacgatggcctgtaccagggcctgagcaccgccaccaaggacacctatgacgccctgcacatgcaggccctgcctccaagaagggccaagcgatctggatctggagcaacaaacttctcactactcaaacaagcaggtgacgtggaggagaatcccgggcctactagtatggactggatttggcgcatccttttccttgtcggcgctgctaccggcgcccattccgggcccggcatgagaaccgaggacctgcctaaggccgtggtgttcctggaaccccagtggtacagagtgctggaaaaggacagcgtgaccctgaagtgccagggcgcctacagccccgaggacaatagcacccagtggttccacaacgagagcctgatctccagccaggccagcagctacttcatcgacgccgccaccgtggacgacagcggcgagtatagatgccagaccaacctgagcaccctgagcgaccccgtgcagctggaagtgcacatcggatggctgctgctgcaggcccccagatgggtgttcaaagaagaggaccccatccacctgagatgccactcttggaagaacaccgccctgcacaaagtgacctacctgcagaacggcaagggcagaaagtacttccaccacaacagcgacttctacatccccaaggccaccctgaaggactccggctcctacttctgcagaggcctcgtgggcagcaagaacgtgtccagcgagacagtgaacatcaccatcacccagggcctggccgtgtctaccatcagcagctttttcccacccggctaccagggatccggcggcggaggatctggcggaggcggatctgggggcggaggctctttcgaacaagttcagcttcaacagcctggcgctgagctggtcaaacctggcgcttctgtgaagatgagctgcaaagccagcggctacgccttcagcagctactggatcaactggatgaagcagaaacccggccagggactcgaatggatcggccaaatctatcccggcgacggcgacaccaactacaacggcaagttcaagggcagagccacactgaccgccgatacctctagcagcacagcctacatgcagctgagcagcctgaccagcgaagatagcgccgtgtacttctgtgcccggtccatcacaacagtcgtgggctgcgctatggactattggggccagggaacaagcgtgaccgtgtctagtacgcgtcagagttttgggttgttggaccctaaattgtgctatctgttggacggaatcctgttcatttacggagtgatcctgaccgcattgttcctgcgggttaagttttccagatccgcagacgcacccgcttaccaacaagggcagaaccaactctacaatgaacttaatttggggcggagggaagagtacgacgttctggacaaaaggaggggacgagatcccgagatgggcggaaagcctcagcgaaggaagaatccgcaagaggggctttataacgaactccagaaagataaaatggcagaagcctatagtgagattgggatgaagggagaaaggaggaggggtaaaggtcacgatgggttgtaccaaggattgagcacagccactaaagatacctatgatgcgctccacatgcaggccctgccgccaagacgcgccaagagaagcggatctggcgtgaagcagaccctgaatttcgacctgctgaagctggctggcgacgtggaatccaacccaggcccttctagaggccatatgaccgagtacaagcccacggtgcgcctcgccacccgcgacgacgtccccagggccgtacgcaccctcgccgccgcgttcgccgactaccccgccacgcgccacaccgtcgatccggaccgccacatcgagcgggtcaccgagctgcaagaactcttcctcacgcgcgtcgggctcgacatcggcaaggtgtgggtcgcggacgacggcgccgcggtggcggtctggaccacgccggagagcgtcgaagcgggggcggtgttcgccgagatcggcccgcgcatggccgagttgagcggttcccggctggccgcgcagcaacagatggaaggcctcctggcgccgcaccggcccaaggagcccgcgtggttcctggccaccgtcggcgtctcgcccgaccaccagggcaagggtctgggcagcgccgtcgtgctccccggagtggaggcggccgagcgcgccggggtgcccgccttcctggagacctccgcgccccgcaacctccccttctacgagcggctcggcttcaccgtcaccgccgacgtcgaggtgcccgaaggaccgcgcacctggtgcatgacccgcaagcccggtgcctga

SEQ ID NO: 4869 - DNA, 2577 bp, Artificial Sequence
  Synthetic Polynucloetide
atggccttaccagtgaccgccttgctcctgccgctggccttgctgctccacgccgccaggccggacatccagatgacacagagccctagcagcctgtctgccagcgtgggagacagagtgaccatcacatgcaaggccagcgaccacatcaacaactggctggcctggtatcagcagaagcctggacaggcccctaagctgctgatctacggcgctaccacactggaaacaggcgtgcccagcagattttctggcagcggctctggcaccgactacaccctgacaatatccagcctccagcctgaggacttcgccacctactactgtcagcagagctggaacaccccttggacattcggccagggcaccaagctggaaatcaagagactcgagggacagcctaaggccaatcctaccgtgacactgttccctccaagcagcgaagaactccaggccaacaaggccacacttgtgtgcctgatctccgacttctaccctggggctgtgacagtggcttggaaggccgatggatctcctgtgaaagccggcgtggaaaccaccaagccatccaagcagagcaacaacaaatacgccgccagctcctacctgagcctgacacctgagcagtggaagtcccacagatcctacagctgccaagtgacccacgaaggcagcaccgtggaaaagacagtggcccctacagagtgcagccccatcaagaccgatgtgattacaatggaccccaaggacaactgctccaaggacgccaacgataccctgctgctccagctgaccaacaccagcgcctactacatgtacttgttgctgctgctgaagtccgtggtgtacttcgccatcatcacatgctgcctgctgcggagaaccgccttctgctgcaacggcgagaagtctagggccaagcgatctggatctggagcaacaaacttctcactactcaaacaagcaggtgacgtggaggagaatcccgggcctactagtatggactggatttggcgcatccttttccttgtcggcgctgctaccggcgcccattccgggcccggcatgagaaccgaggacctgcctaaggccgtggtgttcctggaaccccagtggtacagagtgctggaaaaggacagcgtgaccctgaagtgccagggcgcctacagccccgaggacaatagcacccagtggttccacaacgagagcctgatctccagccaggccagcagctacttcatcgacgccgccaccgtggacgacagcggcgagtatagatgccagaccaacctgagcaccctgagcgaccccgtgcagctggaagtgcacatcggatggctgctgctgcaggcccccagatgggtgttcaaagaagaggaccccatccacctgagatgccactcttggaagaacaccgccctgcacaaagtgacctacctgcagaacggcaagggcagaaagtacttccaccacaacagcgacttctacatccccaaggccaccctgaaggactccggctcctacttctgcagaggcctcgtgggcagcaagaacgtgtccagcgagacagtgaacatcaccatcacccagggcctggccgtgtctaccatcagcagctttttcccacccggctaccagggatccggcggcggaggatctggcggaggcggatctgggggcggaggctctttcgaacaagttcagcttcaacagcctggcgctgagctggtcaaacctggcgcttctgtgaagatgagctgcaaagccagcggctacgccttcagcagctactggatcaactggatgaagcagaaacccggccagggactcgaatggatcggccaaatctatcccggcgacggcgacaccaactacaacggcaagttcaagggcagagccacactgaccgccgatacctctagcagcacagcctacatgcagctgagcagcctgaccagcgaagatagcgccgtgtacttctgtgcccggtccatcacaacagtcgtgggctgcgctatggactattggggccagggaacaagcgtgaccgtgtctagtacgcgtgcctctacaaagggaccctccgtgtttcctctggctcccagcagcaagtctacaagcggaggaacagccgctctgggctgcctggtcaaggattactttcccgagcctgtgaccgtgtcctggaatagcggagcactgacaagcggcgtgcacacctttccagccgtgctgcaaagcagcggcctgtactctctgagcagcgtggtcacagtgcctagctctagcctgggcacccagacctacatctgcaatgtgaaccacaagcctagcaacaccaaggtggacaagagagtggaacccaagagctgtgaagtgaaaaccgactccaccgaccacgtgaagcccaaagagacagagaacaccaagcagcccagcaagagctgccacaagcccaaggccatcgtgcacaccgagaaagtgaacatgatgagcctgaccgtgctgggcctgcggatgctgttcgccaaaaccgtggccgtgaacttcctgctgaccgccaagctgttcttcctc

SEQ ID NO: 4870 - DNA, 2511 bp, Artificial Sequence
  Synthetic Polynucloetide
atggccttaccagtgaccgccttgctcctgccgctggccttgctgctccacgccgccaggccggacatccagatgacacagagccctagcagcctgtctgccagcgtgggagacagagtgaccatcacatgcaaggccagcgaccacatcaacaactggctggcctggtatcagcagaagcctggacaggcccctaagctgctgatctacggcgctaccacactggaaacaggcgtgcccagcagattttctggcagcggctctggcaccgactacaccctgacaatatccagcctccagcctgaggacttcgccacctactactgtcagcagagctggaacaccccttggacattcggccagggcaccaagctggaaatcaagagactcgagggacagcctaaggccaatcctaccgtgacactgttccctccaagcagcgaagaactccaggccaacaaggccacacttgtgtgcctgatctccgacttctaccctggggctgtgacagtggcttggaaggccgatggatctcctgtgaaagccggcgtggaaaccaccaagccatccaagcagagcaacaacaaatacgccgccagctcctacctgagcctgacacctgagcagtggaagtcccacagatcctacagctgccaagtgacccacgaaggcagcaccgtggaaaagacagtggcccctacagagtgcagcggcagagccgattgcggcatcaccagcgccagctaccaccagggcgtgctgagcgccaccatcctgtacgagatcctgctgggcaaggccaccctgtacgccgtgctggtgtctgccctggtgctgatggctatggtcaagcggaaggacagccggggaagggccaagcgatctggatctggagcaacaaacttctcactactcaaacaagcaggtgacgtggaggagaatcccgggcctactagtatggactggatttggcgcatccttttccttgtcggcgctgctaccggcgcccattccgggcccggcatgagaaccgaggacctgcctaaggccgtggtgttcctggaaccccagtggtacagagtgctggaaaaggacagcgtgaccctgaagtgccagggcgcctacagccccgaggacaatagcacccagtggttccacaacgagagcctgatctccagccaggccagcagctacttcatcgacgccgccaccgtggacgacagcggcgagtatagatgccagaccaacctgagcaccctgagcgaccccgtgcagctggaagtgcacatcggatggctgctgctgcaggcccccagatgggtgttcaaagaagaggaccccatccacctgagatgccactcttggaagaacaccgccctgcacaaagtgacctacctgcagaacggcaagggcagaaagtacttccaccacaacagcgacttctacatccccaaggccaccctgaaggactccggctcctacttctgcagaggcctcgtgggcagcaagaacgtgtccagcgagacagtgaacatcaccatcacccagggcctggccgtgtctaccatcagcagctttttcccacccggctaccagggatccggcggcggaggatctggcggaggcggatctgggggcggaggctctttcgaacaagttcagcttcaacagcctggcgctgagctggtcaaacctggcgcttctgtgaagatgagctgcaaagccagcggctacgccttcagcagctactggatcaactggatgaagcagaaacccggccagggactcgaatggatcggccaaatctatcccggcgacggcgacaccaactacaacggcaagttcaagggcagagccacactgaccgccgatacctctagcagcacagcctacatgcagctgagcagcctgaccagcgaagatagcgccgtgtacttctgtgcccggtccatcacaacagtcgtgggctgcgctatggactattggggccagggaacaagcgtgaccgtgtctagtacgcgtgcctctacaaagggaccctccgtgtttcctctggctcccagcagcaagtctacaagcggaggaacagccgctctgggctgcctggtcaaggattactttcccgagcctgtgaccgtgtcctggaatagcggagcactgacaagcggcgtgcacacctttccagccgtgctgcaaagcagcggcctgtactctctgagcagcgtggtcacagtgcctagctctagcctgggcacccagacctacatctgcaatgtgaaccacaagcctagcaacaccaaggtggacaagagagtggaacccaagagctgtatccccgaggacacattcttcccaagcagcgacgtgccctgcgacgtgaagctggtggaaaagagcttcgagacagacaccaacctgaacttccagaacctgagcgtgatcggcttcagaatcctgctgctgaaagtggccggctttaacctgctgatgaccctgcggctgtggtccagc

SEQ ID NO: 4871 - DNA, 2511 bp, Artificial Sequence
  Synthetic Polynucloetide
atggccttaccagtgaccgccttgctcctgccgctggccttgctgctccacgccgccaggccggacatccagatgacacagagccctagcagcctgtctgccagcgtgggagacagagtgaccatcacatgcaaggccagcgaccacatcaacaactggctggcctggtatcagcagaagcctggacaggcccctaagctgctgatctacggcgctaccacactggaaacaggcgtgcccagcagattttctggcagcggctctggcaccgactacaccctgacaatatccagcctccagcctgaggacttcgccacctactactgtcagcagagctggaacaccccttggacattcggccagggcaccaagctggaaatcaagagactcgagggacagcctaaggccaatcctaccgtgacactgttccctccaagcagcgaagaactccaggccaacaaggccacacttgtgtgcctgatctccgacttctaccctggggctgtgacagtggcttggaaggccgatggatctcctgtgaaagccggcgtggaaaccaccaagccatccaagcagagcaacaacaaatacgccgccagctcctacctgagcctgacacctgagcagtggaagtcccacagatcctacagctgccaagtgacccacgaaggcagcaccgtggaaaagacagtggcccctacagagtgcagcggcagagccgattgcggctttaccagcgagagctaccagcagggcgtgctgagcgccaccatcctgtacgagatcctgctgggcaaggccaccctgtacgccgtgctggtgtctgccctggtgctgatggctatggtcaagcggaaggacagccggggaagggccaagcgatctggatctggagcaacaaacttctcactactcaaacaagcaggtgacgtggaggagaatcccgggcctactagtatggactggatttggcgcatccttttccttgtcggcgctgctaccggcgcccattccgggcccggcatgagaaccgaggacctgcctaaggccgtggtgttcctggaaccccagtggtacagagtgctggaaaaggacagcgtgaccctgaagtgccagggcgcctacagccccgaggacaatagcacccagtggttccacaacgagagcctgatctccagccaggccagcagctacttcatcgacgccgccaccgtggacgacagcggcgagtatagatgccagaccaacctgagcaccctgagcgaccccgtgcagctggaagtgcacatcggatggctgctgctgcaggcccccagatgggtgttcaaagaagaggaccccatccacctgagatgccactcttggaagaacaccgccctgcacaaagtgacctacctgcagaacggcaagggcagaaagtacttccaccacaacagcgacttctacatccccaaggccaccctgaaggactccggctcctacttctgcagaggcctcgtgggcagcaagaacgtgtccagcgagacagtgaacatcaccatcacccagggcctggccgtgtctaccatcagcagctttttcccacccggctaccagggatccggcggcggaggatctggcggaggcggatctgggggcggaggctctttcgaacaagttcagcttcaacagcctggcgctgagctggtcaaacctggcgcttctgtgaagatgagctgcaaagccagcggctacgccttcagcagctactggatcaactggatgaagcagaaacccggccagggactcgaatggatcggccaaatctatcccggcgacggcgacaccaactacaacggcaagttcaagggcagagccacactgaccgccgatacctctagcagcacagcctacatgcagctgagcagcctgaccagcgaagatagcgccgtgtacttctgtgcccggtccatcacaacagtcgtgggctgcgctatggactattggggccagggaacaagcgtgaccgtgtctagtacgcgtgcctctacaaagggaccctccgtgtttcctctggctcccagcagcaagtctacaagcggaggaacagccgctctgggctgcctggtcaaggattactttcccgagcctgtgaccgtgtcctggaatagcggagcactgacaagcggcgtgcacacctttccagccgtgctgcaaagcagcggcctgtactctctgagcagcgtggtcacagtgcctagctctagcctgggcacccagacctacatctgcaatgtgaaccacaagcctagcaacaccaaggtggacaagagagtggaacccaagagctgtatccccgaggacacattcttcccaagccccgagagcagctgcgacgtgaagctggtggaaaagagcttcgagacagacaccaacctgaacttccagaacctgagcgtgatcggcttcagaatcctgctgctgaaagtggccggctttaacctgctgatgaccctgcggctgtggtccagc

SEQ ID NO: 4872 - DNA, 2001 bp, Artificial Sequence
  Synthetic Polynucloetide
atggactggatttggcgcatccttttccttgtcggcgctgctaccggcgcccattccgggcccggcatgagaaccgaggacctgcctaaggccgtggtgttcctggaaccccagtggtacagagtgctggaaaaggacagcgtgaccctgaagtgccagggcgcctacagccccgaggacaatagcacccagtggttccacaacgagagcctgatctccagccaggccagcagctacttcatcgacgccgccaccgtggacgacagcggcgagtatagatgccagaccaacctgagcaccctgagcgaccccgtgcagctggaagtgcacatcggatggctgctgctgcaggcccccagatgggtgttcaaagaagaggaccccatccacctgagatgccactcttggaagaacaccgccctgcacaaagtgacctacctgcagaacggcaagggcagaaagtacttccaccacaacagcgacttctacatccccaaggccaccctgaaggactccggctcctacttctgcagaggcctcgtgggcagcaagaacgtgtccagcgagacagtgaacatcaccatcacccagggcctggccgtgtctaccatcagcagctttttcccacccggctaccagggatccggcggcggaggatctggcggaggcggatctgggggcggaggctctttcgaacaagttcagcttcaacagcctggcgctgagctggtcaaacctggcgcttctgtgaagatgagctgcaaagccagcggctacgccttcagcagctactggatcaactggatgaagcagaaacccggccagggactcgaatggatcggccaaatctatcccggcgacggcgacaccaactacaacggcaagttcaagggcagagccacactgaccgccgatacctctagcagcacagcctacatgcagctgagcagcctgaccagcgaagatagcgccgtgtacttctgtgcccggtccatcacaacagtcgtgggctgcgctatggactattggggccagggaacaagcgtgaccgtgtctagtggcggaggcggaagtggaggcggaggatctggcggcggaggctctgacatccagatgacacagagccctagcagcctgtctgccagcgtgggagacagagtgaccatcacatgcaaggccagcgaccacatcaacaactggctggcctggtatcagcagaagcctggacaggcccctaagctgctgatctacggcgctaccacactggaaacaggcgtgcccagcagattttctggcagcggctctggcaccgactacaccctgacaatatccagcctccagcctgaggacttcgccacctactactgtcagcagagctggaacaccccttggacattcggccagggcaccaagctggaaatcaagagaacgcgtggcggaggcagcgacggtaacgaggagatgggaggaatcactcaaaccccttacaaagtctcaatttcaggaacaactgttatccttacatgtccccagtatcctggcagcgagatcctttggcagcataacgacaagaatatagggggagatgaagacgataagaatatcggatctgacgaggatcacttgagcctgaaagagttctccgagcttgaacaaagcggatattatgtgtgctatccgcgcgggtcaaagccggaagacgctaacttttacctttatctccgagccagagtgtgcgaaaattgcatggaaatggacgttatgtccgttgctacaatagttatcgtagatatatgcatcacgggtggactgcttctgctggtttattattggtccaagaatagaaaggccaaagctaaacccgtgaccagaggcgctggcgcaggcggaaggcaaaggggacaaaacaaagaacggccaccaccagtgccaaatccagattatgagcctattcggaaaggacagagggacctgtactctggcctgaatcagagaagaatc

SEQ ID NO: 4873 - DNA, 1896 bp, Artificial Sequence
  Synthetic Polynucloetide
atggactggatttggcgcatccttttccttgtcggcgctgctaccggcgcccattccgggcccggcatgagaaccgaggacctgcctaaggccgtggtgttcctggaaccccagtggtacagagtgctggaaaaggacagcgtgaccctgaagtgccagggcgcctacagccccgaggacaatagcacccagtggttccacaacgagagcctgatctccagccaggccagcagctacttcatcgacgccgccaccgtggacgacagcggcgagtatagatgccagaccaacctgagcaccctgagcgaccccgtgcagctggaagtgcacatcggatggctgctgctgcaggcccccagatgggtgttcaaagaagaggaccccatccacctgagatgccactcttggaagaacaccgccctgcacaaagtgacctacctgcagaacggcaagggcagaaagtacttccaccacaacagcgacttctacatccccaaggccaccctgaaggactccggctcctacttctgcagaggcctcgtgggcagcaagaacgtgtccagcgagacagtgaacatcaccatcacccagggcctggccgtgtctaccatcagcagctttttcccacccggctaccagggatccggcggcggaggatctggcggaggcggatctgggggcggaggctctttcgaacaagttcagcttcaacagcctggcgctgagctggtcaaacctggcgcttctgtgaagatgagctgcaaagccagcggctacgccttcagcagctactggatcaactggatgaagcagaaacccggccagggactcgaatggatcggccaaatctatcccggcgacggcgacaccaactacaacggcaagttcaagggcagagccacactgaccgccgatacctctagcagcacagcctacatgcagctgagcagcctgaccagcgaagatagcgccgtgtacttctgtgcccggtccatcacaacagtcgtgggctgcgctatggactattggggccagggaacaagcgtgaccgtgtctagtggcggaggcggaagtggaggcggaggatctggcggcggaggctctgacatccagatgacacagagccctagcagcctgtctgccagcgtgggagacagagtgaccatcacatgcaaggccagcgaccacatcaacaactggctggcctggtatcagcagaagcctggacaggcccctaagctgctgatctacggcgctaccacactggaaacaggcgtgcccagcagattttctggcagcggctctggcaccgactacaccctgacaatatccagcctccagcctgaggacttcgccacctactactgtcagcagagctggaacaccccttggacattcggccagggcaccaagctggaaatcaagagaacgcgtggcggaggcagcttcaagatccccatcgaggaactggaagatcgggtgttcgtgaactgcaacacctctatcacctgggtggaaggcaccgtgggaacactgctgagcgacatcaccagactggacctcggcaagcggattctggaccctcggggcatctacagatgcaacggcaccgacatctacaaggacaaagaaagcaccgtgcaggtccactacagaatgtgccagtcctgcgtggaactggaccctgctacagtggccggcatcatcgtgaccgatgtgatcgctactctgctgctggctctgggagtgttctgcttcgccggacacgaaacaggcagactgtctggcgctgccgatacacaggccctgctgagaaacgaccaagtgtatcagcccctgcgcgacagagatgatgcccagtattctcacctcggcggcaactgggctagaaacaag

SEQ ID NO: 4874 - DNA, 1926 bp, Artificial Sequence
  Synthetic Polynucloetide
atggactggatttggcgcatccttttccttgtcggcgctgctaccggcgcccattccgggcccggcatgagaaccgaggacctgcctaaggccgtggtgttcctggaaccccagtggtacagagtgctggaaaaggacagcgtgaccctgaagtgccagggcgcctacagccccgaggacaatagcacccagtggttccacaacgagagcctgatctccagccaggccagcagctacttcatcgacgccgccaccgtggacgacagcggcgagtatagatgccagaccaacctgagcaccctgagcgaccccgtgcagctggaagtgcacatcggatggctgctgctgcaggcccccagatgggtgttcaaagaagaggaccccatccacctgagatgccactcttggaagaacaccgccctgcacaaagtgacctacctgcagaacggcaagggcagaaagtacttccaccacaacagcgacttctacatccccaaggccaccctgaaggactccggctcctacttctgcagaggcctcgtgggcagcaagaacgtgtccagcgagacagtgaacatcaccatcacccagggcctggccgtgtctaccatcagcagctttttcccacccggctaccagggatccggcggcggaggatctggcggaggcggatctgggggcggaggctctttcgaacaagttcagcttcaacagcctggcgctgagctggtcaaacctggcgcttctgtgaagatgagctgcaaagccagcggctacgccttcagcagctactggatcaactggatgaagcagaaacccggccagggactcgaatggatcggccaaatctatcccggcgacggcgacaccaactacaacggcaagttcaagggcagagccacactgaccgccgatacctctagcagcacagcctacatgcagctgagcagcctgaccagcgaagatagcgccgtgtacttctgtgcccggtccatcacaacagtcgtgggctgcgctatggactattggggccagggaacaagcgtgaccgtgtctagtggcggaggcggaagtggaggcggaggatctggcggcggaggctctgacatccagatgacacagagccctagcagcctgtctgccagcgtgggagacagagtgaccatcacatgcaaggccagcgaccacatcaacaactggctggcctggtatcagcagaagcctggacaggcccctaagctgctgatctacggcgctaccacactggaaacaggcgtgcccagcagattttctggcagcggctctggcaccgactacaccctgacaatatccagcctccagcctgaggacttcgccacctactactgtcagcagagctggaacaccccttggacattcggccagggcaccaagctggaaatcaagagaacgcgtggcggaggcagccagagcatcaagggcaaccacctggtcaaggtgtacgactaccaagaggacggcagcgtgctgctgacatgtgatgccgaggccaagaacatcacctggtttaaggacggcaagatgatcggcttcctgaccgaggacaagaagaagtggaacctgggcagcaacgctaaggaccccagaggcatgtatcagtgcaagggcagccagaacaagagcaagcccctccaggtgtactaccggatgtgccagaactgcatcgagctgaacgccgctaccatcagcggctttctgttcgccgagatcgtgtccatcttcgtgctggccgtgggcgtgtactttatcgctggacaggatggcgtgcggcagagcagagcttccgataagcaaaccctgctgcctaacgaccagctgtaccagcctctgaaggacagagaggacgaccagtacagccacctccagggcaatcagctgagaagaaac

SEQ ID NO: 4875 - DNA, 1875 bp, Artificial Sequence
  Synthetic Polynucloetide
atggactggatttggcgcatccttttccttgtcggcgctgctaccggcgcccattccgggcccggcatgagaaccgaggacctgcctaaggccgtggtgttcctggaaccccagtggtacagagtgctggaaaaggacagcgtgaccctgaagtgccagggcgcctacagccccgaggacaatagcacccagtggttccacaacgagagcctgatctccagccaggccagcagctacttcatcgacgccgccaccgtggacgacagcggcgagtatagatgccagaccaacctgagcaccctgagcgaccccgtgcagctggaagtgcacatcggatggctgctgctgcaggcccccagatgggtgttcaaagaagaggaccccatccacctgagatgccactcttggaagaacaccgccctgcacaaagtgacctacctgcagaacggcaagggcagaaagtacttccaccacaacagcgacttctacatccccaaggccaccctgaaggactccggctcctacttctgcagaggcctcgtgggcagcaagaacgtgtccagcgagacagtgaacatcaccatcacccagggcctggccgtgtctaccatcagcagctttttcccacccggctaccagggatccggcggcggaggatctggcggaggcggatctgggggcggaggctctttcgaacaagttcagcttcaacagcctggcgctgagctggtcaaacctggcgcttctgtgaagatgagctgcaaagccagcggctacgccttcagcagctactggatcaactggatgaagcagaaacccggccagggactcgaatggatcggccaaatctatcccggcgacggcgacaccaactacaacggcaagttcaagggcagagccacactgaccgccgatacctctagcagcacagcctacatgcagctgagcagcctgaccagcgaagatagcgccgtgtacttctgtgcccggtccatcacaacagtcgtgggctgcgctatggactattggggccagggaacaagcgtgaccgtgtctagtggcggaggcggaagtggaggcggaggatctggcggcggaggctctgacatccagatgacacagagccctagcagcctgtctgccagcgtgggagacagagtgaccatcacatgcaaggccagcgaccacatcaacaactggctggcctggtatcagcagaagcctggacaggcccctaagctgctgatctacggcgctaccacactggaaacaggcgtgcccagcagattttctggcagcggctctggcaccgactacaccctgacaatatccagcctccagcctgaggacttcgccacctactactgtcagcagagctggaacaccccttggacattcggccagggcaccaagctggaaatcaagagaacgcgtggcggaggcagccagagttttgggttgttggaccctaaattgtgctatctgttggacggaatcctgttcatttacggagtgatcctgaccgcattgttcctgcgggttaagttttccagatccgcagacgcacccgcttaccaacaagggcagaaccaactctacaatgaacttaatttggggcggagggaagagtacgacgttctggacaaaaggaggggacgagatcccgagatgggcggaaagcctcagcgaaggaagaatccgcaagaggggctttataacgaactccagaaagataaaatggcagaagcctatagtgagattgggatgaagggagaaaggaggaggggtaaaggtcacgatgggttgtaccaaggattgagcacagccactaaagatacctatgatgcgctccacatgcaggccctgccgccaaga

SEQ ID NO: 4876 - DNA, 1986 bp, Artificial Sequence
  Synthetic Polynucloetide
atggactggatttggcgcatccttttccttgtcggcgctgctaccggcgcccattccgggcccggcatgagaaccgaggacctgcctaaggccgtggtgttcctggaaccccagtggtacagagtgctggaaaaggacagcgtgaccctgaagtgccagggcgcctacagccccgaggacaatagcacccagtggttccacaacgagagcctgatctccagccaggccagcagctacttcatcgacgccgccaccgtggacgacagcggcgagtatagatgccagaccaacctgagcaccctgagcgaccccgtgcagctggaagtgcacatcggatggctgctgctgcaggcccccagatgggtgttcaaagaagaggaccccatccacctgagatgccactcttggaagaacaccgccctgcacaaagtgacctacctgcagaacggcaagggcagaaagtacttccaccacaacagcgacttctacatccccaaggccaccctgaaggactccggctcctacttctgcagaggcctcgtgggcagcaagaacgtgtccagcgagacagtgaacatcaccatcacccagggcctggccgtgtctaccatcagcagctttttcccacccggctaccagggatccggcggcggaggatctggcggaggcggatctgggggcggaggctctttcgaacaagttcagcttcaacagcctggcgctgagctggtcaaacctggcgcttctgtgaagatgagctgcaaagccagcggctacgccttcagcagctactggatcaactggatgaagcagaaacccggccagggactcgaatggatcggccaaatctatcccggcgacggcgacaccaactacaacggcaagttcaagggcagagccacactgaccgccgatacctctagcagcacagcctacatgcagctgagcagcctgaccagcgaagatagcgccgtgtacttctgtgcccggtccatcacaacagtcgtgggctgcgctatggactattggggccagggaacaagcgtgaccgtgtctagtacgcgtatccagaaccctgatcctgccgtgtaccagctgcgggatagcaagagcagcgacaagagcgtgtgtctgttcaccgacttcgacagccagaccaacgtgtcccagagcaaggactccgacgtgtacatcaccgataagaccgtgctggacatgcggagcatggacttcaagagcaactccgccgtggcctggtccaacaagtccgatttcgcctgcgccaacgccttcaacaacagcattatccccgaggacacattcttcccaagccccgagagcagctgcgacgtgaagctggtggaaaagagcttcgagacagacaccaacctgaacttccagaacctgagcgtgatcggcttcagaatcctgctgctgaaagtggccggctttaacctgctgatgaccctgcggctgtggtccagccgcgccaagagaagcggatctggcgtgaagcagaccctgaatttcgacctgctgaagctggctggcgacgtggaatccaacccaggcccttctagaggccatatggccaagcctttgtctcaagaagaatccaccctcattgaaagagcaacggctacaatcaacagcatccccatctctgaagactacagcgtcgccagcgcagctctctctagcgacggccgcatcttcactggtgtcaatgtatatcattttactgggggaccttgtgcagaactcgtggtgctgggcactgctgctgctgcggcagctggcaacctgacttgtatcgtcgcgatcggaaatgagaacaggggcatcttgagcccctgcggacggtgccgacaggtgcttctcgatctgcatcctgggatcaaagccatagtgaaggacagtgatggacagccgacggcagttgggattcgtgaattgctgccctctggttatgtgtgggagggctga

SEQ ID NO: 4877 - DNA, 1485 bp, Artificial Sequence
  Synthetic Polynucloetide
atggactggatttggcgcatccttttccttgtcggcgctgctaccggcgcccattccgggcccggcatgagaaccgaggacctgcctaaggccgtggtgttcctggaaccccagtggtacagagtgctggaaaaggacagcgtgaccctgaagtgccagggcgcctacagccccgaggacaatagcacccagtggttccacaacgagagcctgatctccagccaggccagcagctacttcatcgacgccgccaccgtggacgacagcggcgagtatagatgccagaccaacctgagcaccctgagcgaccccgtgcagctggaagtgcacatcggatggctgctgctgcaggcccccagatgggtgttcaaagaagaggaccccatccacctgagatgccactcttggaagaacaccgccctgcacaaagtgacctacctgcagaacggcaagggcagaaagtacttccaccacaacagcgacttctacatccccaaggccaccctgaaggactccggctcctacttctgcagaggcctcgtgggcagcaagaacgtgtccagcgagacagtgaacatcaccatcacccagggcctggccgtgtctaccatcagcagctttttcccacccggctaccagggatccggcggcggaggatctggcggaggcggatctgggggcggaggctctttcgaacaagttcagcttcaacagcctggcgctgagctggtcaaacctggcgcttctgtgaagatgagctgcaaagccagcggctacgccttcagcagctactggatcaactggatgaagcagaaacccggccagggactcgaatggatcggccaaatctatcccggcgacggcgacaccaactacaacggcaagttcaagggcagagccacactgaccgccgatacctctagcagcacagcctacatgcagctgagcagcctgaccagcgaagatagcgccgtgtacttctgtgcccggtccatcacaacagtcgtgggctgcgctatggactattggggccagggaacaagcgtgaccgtgtctagtacgcgtatccagaaccctgatcctgccgtgtaccagctgcgggatagcaagagcagcgacaagagcgtgtgtctgttcaccgacttcgacagccagaccaacgtgtcccagagcaaggactccgacgtgtacatcaccgataagaccgtgctggacatgcggagcatggacttcaagagcaactccgccgtggcctggtccaacaagtccgatttcgcctgcgccaacgccttcaacaacagcattatccccgaggacacattcttcccaagccccgagagcagctgcgacgtgaagctggtggaaaagagcttcgagacagacaccaacctgaacttccagaacctgagcgtgatcggcttcagaatcctgctgctgaaagtggccggctttaacctgctgatgaccctgcggctgtggtccagc

SEQ ID NO: 4878 - DNA, 2022 bp, Artificial Sequence
  Synthetic Polynucloetide
atggactggatttggcgcatccttttccttgtcggcgctgctaccggcgcccattccgggcccggcatgagaaccgaggacctgcctaaggccgtggtgttcctggaaccccagtggtacagagtgctggaaaaggacagcgtgaccctgaagtgccagggcgcctacagccccgaggacaatagcacccagtggttccacaacgagagcctgatctccagccaggccagcagctacttcatcgacgccgccaccgtggacgacagcggcgagtatagatgccagaccaacctgagcaccctgagcgaccccgtgcagctggaagtgcacatcggatggctgctgctgcaggcccccagatgggtgttcaaagaagaggaccccatccacctgagatgccactcttggaagaacaccgccctgcacaaagtgacctacctgcagaacggcaagggcagaaagtacttccaccacaacagcgacttctacatccccaaggccaccctgaaggactccggctcctacttctgcagaggcctcgtgggcagcaagaacgtgtccagcgagacagtgaacatcaccatcacccagggcctggccgtgtctaccatcagcagctttttcccacccggctaccagggatccggcggcggaggatctggcggaggcggatctgggggcggaggctctttcgaacaagttcagcttcaacagcctggcgctgagctggtcaaacctggcgcttctgtgaagatgagctgcaaagccagcggctacgccttcagcagctactggatcaactggatgaagcagaaacccggccagggactcgaatggatcggccaaatctatcccggcgacggcgacaccaactacaacggcaagttcaagggcagagccacactgaccgccgatacctctagcagcacagcctacatgcagctgagcagcctgaccagcgaagatagcgccgtgtacttctgtgcccggtccatcacaacagtcgtgggctgcgctatggactattggggccagggaacaagcgtgaccgtgtctagtacgcgtgagcagaaactgatctcggaagaggatgggagcggcatccagaaccctgatcctgccgtgtaccagctgcgggatagcaagagcagcgacaagagcgtgtgtctgttcaccgacttcgacagccagaccaacgtgtcccagagcaaggactccgacgtgtacatcaccgataagtgcgtgctggacatgcggagcatggacttcaagagcaactccgccgtggcctggtccaacaagtccgatttcgcctgcgccaacgccttcaacaacagcattatccccgaggacacattcttcccaagccccgagagcagctgcgacgtgaagctggtggaaaagagcttcgagacagacaccaacctgaacttccagaacctgagcgtgatcggcttcagaatcctgctgctgaaagtggccggctttaacctgctgatgaccctgcggctgtggtccagccgcgccaagagaagcggatctggcgtgaagcagaccctgaatttcgacctgctgaagctggctggcgacgtggaatccaacccaggcccttctagaggccatatggccaagcctttgtctcaagaagaatccaccctcattgaaagagcaacggctacaatcaacagcatccccatctctgaagactacagcgtcgccagcgcagctctctctagcgacggccgcatcttcactggtgtcaatgtatatcattttactgggggaccttgtgcagaactcgtggtgctgggcactgctgctgctgcggcagctggcaacctgacttgtatcgtcgcgatcggaaatgagaacaggggcatcttgagcccctgcggacggtgccgacaggtgcttctcgatctgcatcctgggatcaaagccatagtgaaggacagtgatggacagccgacggcagttgggattcgtgaattgctgccctctggttatgtgtgggagggctga

SEQ ID NO: 4879 - DNA, 1524 bp, Artificial Sequence
  Synthetic Polynucloetide
atggactggatttggcgcatccttttccttgtcggcgctgctaccggcgcccattccgggcccggcatgagaaccgaggacctgcctaaggccgtggtgttcctggaaccccagtggtacagagtgctggaaaaggacagcgtgaccctgaagtgccagggcgcctacagccccgaggacaatagcacccagtggttccacaacgagagcctgatctccagccaggccagcagctacttcatcgacgccgccaccgtggacgacagcggcgagtatagatgccagaccaacctgagcaccctgagcgaccccgtgcagctggaagtgcacatcggatggctgctgctgcaggcccccagatgggtgttcaaagaagaggaccccatccacctgagatgccactcttggaagaacaccgccctgcacaaagtgacctacctgcagaacggcaagggcagaaagtacttccaccacaacagcgacttctacatccccaaggccaccctgaaggactccggctcctacttctgcagaggcctcgtgggcagcaagaacgtgtccagcgagacagtgaacatcaccatcacccagggcctggccgtgtctaccatcagcagctttttcccacccggctaccagggatccggcggcggaggatctggcggaggcggatctgggggcggaggctctttcgaacaagttcagcttcaacagcctggcgctgagctggtcaaacctggcgcttctgtgaagatgagctgcaaagccagcggctacgccttcagcagctactggatcaactggatgaagcagaaacccggccagggactcgaatggatcggccaaatctatcccggcgacggcgacaccaactacaacggcaagttcaagggcagagccacactgaccgccgatacctctagcagcacagcctacatgcagctgagcagcctgaccagcgaagatagcgccgtgtacttctgtgcccggtccatcacaacagtcgtgggctgcgctatggactattggggccagggaacaagcgtgaccgtgtctagtacgcgtgagcagaaactgatctcggaagaggatgggagcggcatccagaaccctgatcctgccgtgtaccagctgcgggatagcaagagcagcgacaagagcgtgtgtctgttcaccgacttcgacagccagaccaacgtgtcccagagcaaggactccgacgtgtacatcaccgataagtgcgtgctggacatgcggagcatggacttcaagagcaactccgccgtggcctggtccaacaagtccgatttcgcctgcgccaacgccttcaacaacagcattatccccgaggacacattcttcccaagccccgagagcagctgcgacgtgaagctggtggaaaagagcttcgagacagacaccaacctgaacttccagaacctgagcgtgatcggcttcagaatcctgctgctgaaagtggccggctttaacctgctgatgaccctgcggctgtggtccagctga

SEQ ID NO: 4880 - DNA, 2124 bp, Artificial Sequence; identical to SEQ ID NO: 4753
  Synthetic Polynucloetide

SEQ ID NO: 4881 - DNA, 2145 bp, Artificial Sequence; identical to SEQ ID NO: 4754
  Synthetic Polynucloetide

SEQ ID NO: 4882 - DNA, 3384 bp, Artificial Sequence; identical to SEQ ID NO: 4755
  Synthetic Polynucloetide

SEQ ID NO: 4883 - DNA, 3204 bp, Artificial Sequence; identical to SEQ ID NO: 4756
  Synthetic Polynucloetide

SEQ ID NO: 4884 - DNA, 3201 bp, Artificial Sequence; identical to SEQ ID NO: 4757
  Synthetic Polynucloetide

SEQ ID NO: 4885 - DNA, 2499 bp, Artificial Sequence; identical to SEQ ID NO: 4758
  Synthetic Polynucloetide

SEQ ID NO: 4886 - DNA, 3174 bp, Artificial Sequence; identical to SEQ ID NO: 4759
  Synthetic Polynucloetide

SEQ ID NO: 4887 - DNA, 2511 bp, Artificial Sequence; identical to SEQ ID NO: 4760
  Synthetic Polynucloetide

SEQ ID NO: 4888 - DNA, 3177 bp, Artificial Sequence; identical to SEQ ID NO: 4761
  Synthetic Polynucloetide

SEQ ID NO: 4889 - DNA, 3336 bp, Artificial Sequence; identical to SEQ ID NO: 4762
  Synthetic Polynucloetide

SEQ ID NO: 4890 - DNA, 3339 bp, Artificial Sequence; identical to SEQ ID NO: 4763
  Synthetic Polynucloetide

SEQ ID NO: 4891 - DNA, 3201 bp, Artificial Sequence; identical to SEQ ID NO: 4764
  Synthetic Polynucloetide

SEQ ID NO: 4892 - DNA, 3447 bp, Artificial Sequence; identical to SEQ ID NO: 4765
  Synthetic Polynucloetide

SEQ ID NO: 4893 - DNA, 3501 bp, Artificial Sequence; identical to SEQ ID NO: 4766
  Synthetic Polynucloetide

SEQ ID NO: 4894 - DNA, 3312 bp, Artificial Sequence; identical to SEQ ID NO: 4767
  Synthetic Polynucloetide

SEQ ID NO: 4895 - DNA, 2523 bp, Artificial Sequence; identical to SEQ ID NO: 4768
  Synthetic Polynucloetide

SEQ ID NO: 4896 - DNA, 3357 bp, Artificial Sequence; identical to SEQ ID NO: 4769
  Synthetic Polynucloetide

SEQ ID NO: 4897 - DNA, 3732 bp, Artificial Sequence; identical to SEQ ID NO: 4770
  Synthetic Polynucloetide

SEQ ID NO: 4898 - DNA, 3087 bp, Artificial Sequence; identical to SEQ ID NO: 4771
  Synthetic Polynucloetide

SEQ ID NO: 4899 - DNA, 3087 bp, Artificial Sequence; identical to SEQ ID NO: 4772
  Synthetic Polynucloetide

SEQ ID NO: 4900 - DNA, 3300 bp, Artificial Sequence; identical to SEQ ID NO: 4773
  Synthetic Polynucloetide

SEQ ID NO: 4901 - DNA, 3423 bp, Artificial Sequence; identical to SEQ ID NO: 4774
  Synthetic Polynucloetide

SEQ ID NO: 4902 - DNA, 3306 bp, Artificial Sequence; identical to SEQ ID NO: 4775
  Synthetic Polynucloetide

SEQ ID NO: 4903 - DNA, 3432 bp, Artificial Sequence; identical to SEQ ID NO: 4776
  Synthetic Polynucloetide

SEQ ID NO: 4904 - DNA, 3105 bp, Artificial Sequence; identical to SEQ ID NO: 4777
  Synthetic Polynucloetide

SEQ ID NO: 4905 - DNA, 2577 bp, Artificial Sequence; identical to SEQ ID NO: 4778
  Synthetic Polynucloetide

SEQ ID NO: 4906 - DNA, 2511 bp, Artificial Sequence; identical to SEQ ID NO: 4779
  Synthetic Polynucloetide

SEQ ID NO: 4907 - DNA, 2511 bp, Artificial Sequence; identical to SEQ ID NO: 4780
  Synthetic Polynucloetide

SEQ ID NO: 4908 - DNA, 1989 bp, Artificial Sequence; identical to SEQ ID NO: 4781
  Synthetic Polynucloetide

SEQ ID NO: 4909 - DNA, 1884 bp, Artificial Sequence; identical to SEQ ID NO: 4782
  Synthetic Polynucloetide

SEQ ID NO: 4910 - DNA, 1914 bp, Artificial Sequence; identical to SEQ ID NO: 4783
  Synthetic Polynucloetide

SEQ ID NO: 4911 - DNA, 1863 bp, Artificial Sequence; identical to SEQ ID NO: 4784
  Synthetic Polynucloetide

SEQ ID NO: 4912 - DNA, 2565 bp, Artificial Sequence; identical to SEQ ID NO: 4785
  Synthetic Polynucloetide

SEQ ID NO: 4913 - DNA, 2661 bp, Artificial Sequence; identical to SEQ ID NO: 4786
  Synthetic Polynucloetide

SEQ ID NO: 4914 - DNA, 2811 bp, Artificial Sequence; identical to SEQ ID NO: 4787
  Synthetic Polynucloetide

SEQ ID NO: 4915 - DNA, 2253 bp, Artificial Sequence; identical to SEQ ID NO: 4788
  Synthetic Polynucloetide

SEQ ID NO: 4916 - DNA, 1560 bp, Artificial Sequence; identical to SEQ ID NO: 4789
  Synthetic Polynucloetide

SEQ ID NO: 4917 - DNA, 1353 bp, Artificial Sequence; identical to SEQ ID NO: 4155
  Synthetic Polynucloetide

SEQ ID NO: 4918 - DNA, 852 bp, Artificial Sequence; identical to SEQ ID NO: 4156
  Synthetic Polynucloetide

SEQ ID NO: 4919 - DNA, 2307 bp, Artificial Sequence; identical to SEQ ID NO: 4792
  Synthetic Polynucloetide

SEQ ID NO: 4920 - DNA, 1617 bp, Artificial Sequence; identical to SEQ ID NO: 4793
  Synthetic Polynucloetide

SEQ ID NO: 4921 - DNA, 1389 bp, Artificial Sequence; identical to SEQ ID NO: 4159
  Synthetic Polynucloetide

SEQ ID NO: 4922 - DNA, 891 bp, Artificial Sequence; identical to SEQ ID NO: 4160
  Synthetic Polynucloetide

SEQ ID NO: 4923 - DNA, 2565 bp, Artificial Sequence; identical to SEQ ID NO: 4796
  Synthetic Polynucloetide

SEQ ID NO: 4924 - DNA, 2661 bp, Artificial Sequence; identical to SEQ ID NO: 4797
  Synthetic Polynucloetide

SEQ ID NO: 4925 - DNA, 3837 bp, Artificial Sequence
  Synthetic Polynucloetide
atggccttaccagtgaccgccttgctcctgccgctggccttgctgctccacgccgccaggccgggcatgcggactgaagacctcccaaaggctgtggtgttcctggagcctcaatggtacagggtgctggagaaggacagtgtgactctgaagtgccagggagcctactcccctgaggacaattccacacagtggtttcacaatgagagcctcatctcaagccaggcctccagctacttcattgacgctgccacagtggacgacagtggagagtacaggtgccagacaaacctctccaccctcagtgacccggtgcagctagaagtccatatcggctggctgttgctccaggcccctcggtgggtgttcaaggaggaagaccctattcacctgaggtgtcacagctggaagaacactgctctgcataaggtcacatatttacagaatggcaaaggcaggaagtattttcatcataattctgacttctacattccaaaagccacactcaaagacagcggctcctacttctgcagggggcttgttgggagtaaaaatgtgtcttcagagactgtgaacatcaccatcactcaaggtttggcagtgtcaaccatctcatcattctttccacctggctaccaaggtaccggcggaggcggatctggcggcggaggtagcggtggcggaggatctgaattcgacatccagatgacacagagccctagcagcctgtctgccagcgtgggagacagagtgaccatcacatgcaaggccagcgaccacatcaacaactggctggcctggtatcagcagaagcctggacaggcccctaagctgctgatctacggcgctaccacactggaaacaggcgtgcccagcagattttctggcagcggctctggcaccgactacaccctgacaatatccagcctccagcctgaggacttcgccacctactactgtcagcagagctggaacaccccttggacattcggccagggcaccaagctggaaatcaagagactcgagatccagaaccctgatcctgccgtgtaccagctgcgggatagcaagagcagcgacaagagcgtgtgtctgttcaccgacttcgacagccagaccaacgtgtcccagagcaaggactccgacgtgtacatcaccgataagtgcgtgctggacatgcggagcatggacttcaagagcaactccgccgtggcctggtccaacaagtccgatttcgcctgcgccaacgccttcaacaacagcattatccccgaggacacattcttcccaagcagcgacgtgccctgcgacgtgaagctggtggaaaagagcttcgagacagacaccaacctgaacttccagaacctgagcgtgatcggcttcagaatcctgctgctgaaagtggccggctttaacctgctgatgaccctgcggctgtggtccagccgcgccaagagaagcggatctggcgtgaagcagaccctgaatttcgacctgctgaagctggctggcgacgtggaatccaacccaggccctactagtatggactggatttggcgcatccttttccttgtcggcgctgctaccggcgcccattccgggcccggcatgagaaccgaggacctgcctaaggccgtggtgttcctggaaccccagtggtacagagtgctggaaaaggacagcgtgaccctgaagtgccagggcgcctacagccccgaggacaatagcacccagtggttccacaacgagagcctgatctccagccaggccagcagctacttcatcgacgccgccaccgtggacgacagcggcgagtatagatgccagaccaacctgagcaccctgagcgaccccgtgcagctggaagtgcacatcggatggctgctgctgcaggcccccagatgggtgttcaaagaagaggaccccatccacctgagatgccactcttggaagaacaccgccctgcacaaagtgacctacctgcagaacggcaagggcagaaagtacttccaccacaacagcgacttctacatccccaaggccaccctgaaggactccggctcctacttctgcagaggcctcgtgggcagcaagaacgtgtccagcgagacagtgaacatcaccatcacccagggcctggccgtgtctaccatcagcagctttttcccacccggctaccagggatccggcggcggaggatctggcggaggcggatctgggggcggaggctctttcgaacaagttcagcttcaacagcctggcgctgagctggtcaaacctggcgcttctgtgaagatgagctgcaaagccagcggctacgccttcagcagctactggatcaactggatgaagcagaaacccggccagggactcgaatggatcggccaaatctatcccggcgacggcgacaccaactacaacggcaagttcaagggcagagccacactgaccgccgatacctctagcagcacagcctacatgcagctgagcagcctgaccagcgaagatagcgccgtgtacttctgtgcccggtccatcacaacagtcgtgggctgcgctatggactattggggccagggaacaagcgtgaccgtgtctagtacgcgtgaggacctgaagaacgtgttcccacctgaggtggccgtgttcgagcctagcaaggccgagatcgcccacacccagaaagccaccctcgtgtgcctggctaccggcttctaccccgaccatgtggaactgtcttggtgggtcaacggcaaagaggtgcacagcggcgtgtgtaccgacccccagccactgaaagaacagcccgccctgaacgacagccggtactgcctgagcagcagactgagagtgtccgccaccttctggcagaacccccggaaccacttcagatgccaggtgcagttctacggcctgagcgagaacgacgagtggacccaggacagagccaagcccgtgacccagatcgtgtctgccgaagcctggggcagagccgattgcggcatcaccagcgccagctaccaccagggcgtgctgagcgccaccatcctgtacgagatcctgctgggcaaggccaccctgtacgccgtgctggtgtctgccctggtgctgatggctatggtcaagcggaaggacagccggggaagggccaagcgatctggatctggagcaacaaacttctcactactcaaacaagcaggtgacgtggaggagaatcccgggccttctagaggccatatgaccgagtacaagcccacggtgcgcctcgccacccgcgacgacgtccccagggccgtacgcaccctcgccgccgcgttcgccgactaccccgccacgcgccacaccgtcgatccggaccgccacatcgagcgggtcaccgagctgcaagaactcttcctcacgcgcgtcgggctcgacatcggcaaggtgtgggtcgcggacgacggcgccgcggtggcggtctggaccacgccggagagcgtcgaagcgggggcggtgttcgccgagatcggcccgcgcatggccgagttgagcggttcccggctggccgcgcagcaacagatggaaggcctcctggcgccgcaccggcccaaggagcccgcgtggttcctggccaccgtcggcgtctcgcccgaccaccagggcaagggtctgggcagcgccgtcgtgctccccggagtggaggcggccgagcgcgccggggtgcccgccttcctggagacctccgcgccccgcaacctccccttctacgagcggctcggcttcaccgtcaccgccgacgtcgaggtgcccgaaggaccgcgcacctggtgcatgacccgcaagcccggtgcctga

SEQ ID NO: 4926 - DNA, 3834 bp, Artificial Sequence
  Synthetic Polynucloetide
atggccttaccagtgaccgccttgctcctgccgctggccttgctgctccacgccgccaggccgggcatgcggactgaagacctcccaaaggctgtggtgttcctggagcctcaatggtacagggtgctggagaaggacagtgtgactctgaagtgccagggagcctactcccctgaggacaattccacacagtggtttcacaatgagagcctcatctcaagccaggcctccagctacttcattgacgctgccacagtggacgacagtggagagtacaggtgccagacaaacctctccaccctcagtgacccggtgcagctagaagtccatatcggctggctgttgctccaggcccctcggtgggtgttcaaggaggaagaccctattcacctgaggtgtcacagctggaagaacactgctctgcataaggtcacatatttacagaatggcaaaggcaggaagtattttcatcataattctgacttctacattccaaaagccacactcaaagacagcggctcctacttctgcagggggcttgttgggagtaaaaatgtgtcttcagagactgtgaacatcaccatcactcaaggtttggcagtgtcaaccatctcatcattctttccacctggctaccaaggtaccggcggaggcggatctggcggcggaggtagcggtggcggaggatctgaattcgacatccagatgacacagagccctagcagcctgtctgccagcgtgggagacagagtgaccatcacatgcaaggccagcgaccacatcaacaactggctggcctggtatcagcagaagcctggacaggcccctaagctgctgatctacggcgctaccacactggaaacaggcgtgcccagcagattttctggcagcggctctggcaccgactacaccctgacaatatccagcctccagcctgaggacttcgccacctactactgtcagcagagctggaacaccccttggacattcggccagggcaccaagctggaaatcaagagactcgaggacctgaagaacgtgttcccacctgaggtggccgtgttcgagcctagcaaggccgagatcgcccacacccagaaagccaccctcgtgtgcctggctaccggcttctaccccgaccatgtggaactgtcttggtgggtcaacggcaaagaggtgcacagcggcgtgtgtaccgacccccagccactgaaagaacagcccgccctgaacgacagccggtactgcctgagcagcagactgagagtgtccgccaccttctggcagaacccccggaaccacttcagatgccaggtgcagttctacggcctgagcgagaacgacgagtggacccaggacagagccaagcccgtgacccagatcgtgtctgccgaagcctggggcagagccgattgcggcatcaccagcgccagctaccaccagggcgtgctgagcgccaccatcctgtacgagatcctgctgggcaaggccaccctgtacgccgtgctggtgtctgccctggtgctgatggctatggtcaagcggaaggacagccggggaagggccaagcgatctggatctggagcaacaaacttctcactactcaaacaagcaggtgacgtggaggagaatcccgggcctactagtatggactggatttggcgcatccttttccttgtcggcgctgctaccggcgcccattccgggcccggcatgagaaccgaggacctgcctaaggccgtggtgttcctggaaccccagtggtacagagtgctggaaaaggacagcgtgaccctgaagtgccagggcgcctacagccccgaggacaatagcacccagtggttccacaacgagagcctgatctccagccaggccagcagctacttcatcgacgccgccaccgtggacgacagcggcgagtatagatgccagaccaacctgagcaccctgagcgaccccgtgcagctggaagtgcacatcggatggctgctgctgcaggcccccagatgggtgttcaaagaagaggaccccatccacctgagatgccactcttggaagaacaccgccctgcacaaagtgacctacctgcagaacggcaagggcagaaagtacttccaccacaacagcgacttctacatccccaaggccaccctgaaggactccggctcctacttctgcagaggcctcgtgggcagcaagaacgtgtccagcgagacagtgaacatcaccatcacccagggcctggccgtgtctaccatcagcagctttttcccacccggctaccagggatccggcggcggaggatctggcggaggcggatctgggggcggaggctctttcgaacaagttcagcttcaacagcctggcgctgagctggtcaaacctggcgcttctgtgaagatgagctgcaaagccagcggctacgccttcagcagctactggatcaactggatgaagcagaaacccggccagggactcgaatggatcggccaaatctatcccggcgacggcgacaccaactacaacggcaagttcaagggcagagccacactgaccgccgatacctctagcagcacagcctacatgcagctgagcagcctgaccagcgaagatagcgccgtgtacttctgtgcccggtccatcacaacagtcgtgggctgcgctatggactattggggccagggaacaagcgtgaccgtgtctagtacgcgtatccagaaccctgatcctgccgtgtaccagctgcgggatagcaagagcagcgacaagagcgtgtgtctgttcaccgacttcgacagccagaccaacgtgtcccagagcaaggactccgacgtgtacatcaccgataagtgcgtgctggacatgcggagcatggacttcaagagcaactccgccgtggcctggtccaacaagtccgatttcgcctgcgccaacgccttcaacaacagcattatccccgaggacacattcttcccaagcagcgacgtgccctgcgacgtgaagctggtggaaaagagcttcgagacagacaccaacctgaacttccagaacctgagcgtgatcggcttcagaatcctgctgctgaaagtggccggctttaacctgctgatgaccctgcggctgtggtccagccgcgccaagagaagcggatctggcgtgaagcagaccctgaatttcgacctgctgaagctggctggcgacgtggaatccaacccaggcccttctagaggccatatgaccgagtacaagcccacggtgcgcctcgccacccgcgacgacgtccccagggccgtacgcaccctcgccgccgcgttcgccgactaccccgccacgcgccacaccgtcgatccggaccgccacatcgagcgggtcaccgagctgcaagaactcttcctcacgcgcgtcgggctcgacatcggcaaggtgtgggtcgcggacgacggcgccgcggtggcggtctggaccacgccggagagcgtcgaagcgggggcggtgttcgccgagatcggcccgcgcatggccgagttgagcggttcccggctggccgcgcagcaacagatggaaggcctcctggcgccgcaccggcccaaggagcccgcgtggttcctggccaccgtcggcgtctcgcccgaccaccagggcaagggtctgggcagcgccgtcgtgctccccggagtggaggcggccgagcgcgccggggtgcccgccttcctggagacctccgcgccccgcaacctccccttctacgagcggctcggcttcaccgtcaccgccgacgtcgaggtgcccgaaggaccgcgcacctggtgcatgacccgcaagcccggtgcctga

SEQ ID NO: 4927 - DNA, 3834 bp, Artificial Sequence
  Synthetic Polynucloetide
atggccttaccagtgaccgccttgctcctgccgctggccttgctgctccacgccgccaggccgggcatgcggactgaagacctcccaaaggctgtggtgttcctggagcctcaatggtacagggtgctggagaaggacagtgtgactctgaagtgccagggagcctactcccctgaggacaattccacacagtggtttcacaatgagagcctcatctcaagccaggcctccagctacttcattgacgctgccacagtggacgacagtggagagtacaggtgccagacaaacctctccaccctcagtgacccggtgcagctagaagtccatatcggctggctgttgctccaggcccctcggtgggtgttcaaggaggaagaccctattcacctgaggtgtcacagctggaagaacactgctctgcataaggtcacatatttacagaatggcaaaggcaggaagtattttcatcataattctgacttctacattccaaaagccacactcaaagacagcggctcctacttctgcagggggcttgttgggagtaaaaatgtgtcttcagagactgtgaacatcaccatcactcaaggtttggcagtgtcaaccatctcatcattctttccacctggctaccaaggtaccggcggaggcggatctggcggcggaggtagcggtggcggaggatctgaattcgacatccagatgacacagagccctagcagcctgtctgccagcgtgggagacagagtgaccatcacatgcaaggccagcgaccacatcaacaactggctggcctggtatcagcagaagcctggacaggcccctaagctgctgatctacggcgctaccacactggaaacaggcgtgcccagcagattttctggcagcggctctggcaccgactacaccctgacaatatccagcctccagcctgaggacttcgccacctactactgtcagcagagctggaacaccccttggacattcggccagggcaccaagctggaaatcaagagactcgaggacctgaagaacgtgttcccacctgaggtggccgtgttcgagcctagcgaggccgagatcagccacacccagaaagccaccctcgtgtgcctggctaccggcttctaccccgaccatgtggaactgtcttggtgggtcaacggcaaagaggtgcacagcggcgtgtgtaccgacccccagccactgaaagaacagcccgccctgaacgacagccggtactgcctgagcagcagactgagagtgtccgccaccttctggcagaacccccggaaccacttcagatgccaggtgcagttctacggcctgagcgagaacgacgagtggacccaggacagagccaagcccgtgacccagatcgtgtctgccgaagcctggggcagagccgattgcggctttaccagcgagagctaccagcagggcgtgctgagcgccaccatcctgtacgagatcctgctgggcaaggccaccctgtacgccgtgctggtgtctgccctggtgctgatggctatggtcaagcggaaggacagccggggaagggccaagcgatctggatctggagcaacaaacttctcactactcaaacaagcaggtgacgtggaggagaatcccgggcctactagtatggactggatttggcgcatccttttccttgtcggcgctgctaccggcgcccattccgggcccggcatgagaaccgaggacctgcctaaggccgtggtgttcctggaaccccagtggtacagagtgctggaaaaggacagcgtgaccctgaagtgccagggcgcctacagccccgaggacaatagcacccagtggttccacaacgagagcctgatctccagccaggccagcagctacttcatcgacgccgccaccgtggacgacagcggcgagtatagatgccagaccaacctgagcaccctgagcgaccccgtgcagctggaagtgcacatcggatggctgctgctgcaggcccccagatgggtgttcaaagaagaggaccccatccacctgagatgccactcttggaagaacaccgccctgcacaaagtgacctacctgcagaacggcaagggcagaaagtacttccaccacaacagcgacttctacatccccaaggccaccctgaaggactccggctcctacttctgcagaggcctcgtgggcagcaagaacgtgtccagcgagacagtgaacatcaccatcacccagggcctggccgtgtctaccatcagcagctttttcccacccggctaccagggatccggcggcggaggatctggcggaggcggatctgggggcggaggctctttcgaacaagttcagcttcaacagcctggcgctgagctggtcaaacctggcgcttctgtgaagatgagctgcaaagccagcggctacgccttcagcagctactggatcaactggatgaagcagaaacccggccagggactcgaatggatcggccaaatctatcccggcgacggcgacaccaactacaacggcaagttcaagggcagagccacactgaccgccgatacctctagcagcacagcctacatgcagctgagcagcctgaccagcgaagatagcgccgtgtacttctgtgcccggtccatcacaacagtcgtgggctgcgctatggactattggggccagggaacaagcgtgaccgtgtctagtacgcgtatccagaaccctgatcctgccgtgtaccagctgcgggatagcaagagcagcgacaagagcgtgtgtctgttcaccgacttcgacagccagaccaacgtgtcccagagcaaggactccgacgtgtacatcaccgataagtgcgtgctggacatgcggagcatggacttcaagagcaactccgccgtggcctggtccaacaagtccgatttcgcctgcgccaacgccttcaacaacagcattatccccgaggacacattcttcccaagccccgagagcagctgcgacgtgaagctggtggaaaagagcttcgagacagacaccaacctgaacttccagaacctgagcgtgatcggcttcagaatcctgctgctgaaagtggccggctttaacctgctgatgaccctgcggctgtggtccagccgcgccaagagaagcggatctggcgtgaagcagaccctgaatttcgacctgctgaagctggctggcgacgtggaatccaacccaggcccttctagaggccatatgaccgagtacaagcccacggtgcgcctcgccacccgcgacgacgtccccagggccgtacgcaccctcgccgccgcgttcgccgactaccccgccacgcgccacaccgtcgatccggaccgccacatcgagcgggtcaccgagctgcaagaactcttcctcacgcgcgtcgggctcgacatcggcaaggtgtgggtcgcggacgacggcgccgcggtggcggtctggaccacgccggagagcgtcgaagcgggggcggtgttcgccgagatcggcccgcgcatggccgagttgagcggttcccggctggccgcgcagcaacagatggaaggcctcctggcgccgcaccggcccaaggagcccgcgtggttcctggccaccgtcggcgtctcgcccgaccaccagggcaagggtctgggcagcgccgtcgtgctccccggagtggaggcggccgagcgcgccggggtgcccgccttcctggagacctccgcgccccgcaacctccccttctacgagcggctcggcttcaccgtcaccgccgacgtcgaggtgcccgaaggaccgcgcacctggtgcatgacccgcaagcccggtgcctga

SEQ ID NO: 4928 - DNA, 3132 bp, Artificial Sequence
  Synthetic Polynucloetide
atggccttaccagtgaccgccttgctcctgccgctggccttgctgctccacgccgccaggccgggcatgcggactgaagacctcccaaaggctgtggtgttcctggagcctcaatggtacagggtgctggagaaggacagtgtgactctgaagtgccagggagcctactcccctgaggacaattccacacagtggtttcacaatgagagcctcatctcaagccaggcctccagctacttcattgacgctgccacagtggacgacagtggagagtacaggtgccagacaaacctctccaccctcagtgacccggtgcagctagaagtccatatcggctggctgttgctccaggcccctcggtgggtgttcaaggaggaagaccctattcacctgaggtgtcacagctggaagaacactgctctgcataaggtcacatatttacagaatggcaaaggcaggaagtattttcatcataattctgacttctacattccaaaagccacactcaaagacagcggctcctacttctgcagggggcttgttgggagtaaaaatgtgtcttcagagactgtgaacatcaccatcactcaaggtttggcagtgtcaaccatctcatcattctttccacctggctaccaaggtaccggcggaggcggatctggcggcggaggtagcggtggcggaggatctgaattcgacatccagatgacacagagccctagcagcctgtctgccagcgtgggagacagagtgaccatcacatgcaaggccagcgaccacatcaacaactggctggcctggtatcagcagaagcctggacaggcccctaagctgctgatctacggcgctaccacactggaaacaggcgtgcccagcagattttctggcagcggctctggcaccgactacaccctgacaatatccagcctccagcctgaggacttcgccacctactactgtcagcagagctggaacaccccttggacattcggccagggcaccaagctggaaatcaagagactcgaggacctgaagaacgtgttcccacctgaggtggccgtgttcgagcctagcgaggccgagatcagccacacccagaaagccaccctcgtgtgcctggctaccggcttctaccccgaccatgtggaactgtcttggtgggtcaacggcaaagaggtgcacagcggcgtgtgtaccgacccccagccactgaaagaacagcccgccctgaacgacagccggtactgcctgagcagcagactgagagtgtccgccaccttctggcagaacccccggaaccacttcagatgccaggtgcagttctacggcctgagcgagaacgacgagtggacccaggacagagccaagcccgtgacccagatcgtgtctgccgaagcctggggcagagccgattgcggctttaccagcgagagctaccagcagggcgtgctgagcgccaccatcctgtacgagatcctgctgggcaaggccaccctgtacgccgtgctggtgtctgccctggtgctgatggctatggtcaagcggaaggacagccggggaagggccaagcgatctggatctggagcaacaaacttctcactactcaaacaagcaggtgacgtggaggagaatcccgggcctactagtatggactggatttggcgcatccttttccttgtcggcgctgctaccggcgcccattccgggcccggcatgagaaccgaggacctgcctaaggccgtggtgttcctggaaccccagtggtacagagtgctggaaaaggacagcgtgaccctgaagtgccagggcgcctacagccccgaggacaatagcacccagtggttccacaacgagagcctgatctccagccaggccagcagctacttcatcgacgccgccaccgtggacgacagcggcgagtatagatgccagaccaacctgagcaccctgagcgaccccgtgcagctggaagtgcacatcggatggctgctgctgcaggcccccagatgggtgttcaaagaagaggaccccatccacctgagatgccactcttggaagaacaccgccctgcacaaagtgacctacctgcagaacggcaagggcagaaagtacttccaccacaacagcgacttctacatccccaaggccaccctgaaggactccggctcctacttctgcagaggcctcgtgggcagcaagaacgtgtccagcgagacagtgaacatcaccatcacccagggcctggccgtgtctaccatcagcagctttttcccacccggctaccagggatccggcggcggaggatctggcggaggcggatctgggggcggaggctctttcgaacaagttcagcttcaacagcctggcgctgagctggtcaaacctggcgcttctgtgaagatgagctgcaaagccagcggctacgccttcagcagctactggatcaactggatgaagcagaaacccggccagggactcgaatggatcggccaaatctatcccggcgacggcgacaccaactacaacggcaagttcaagggcagagccacactgaccgccgatacctctagcagcacagcctacatgcagctgagcagcctgaccagcgaagatagcgccgtgtacttctgtgcccggtccatcacaacagtcgtgggctgcgctatggactattggggccagggaacaagcgtgaccgtgtctagtacgcgtatccagaaccctgatcctgccgtgtaccagctgcgggatagcaagagcagcgacaagagcgtgtgtctgttcaccgacttcgacagccagaccaacgtgtcccagagcaaggactccgacgtgtacatcaccgataagtgcgtgctggacatgcggagcatggacttcaagagcaactccgccgtggcctggtccaacaagtccgatttcgcctgcgccaacgccttcaacaacagcattatccccgaggacacattcttcccaagccccgagagcagctgcgacgtgaagctggtggaaaagagcttcgagacagacaccaacctgaacttccagaacctgagcgtgatcggcttcagaatcctgctgctgaaagtggccggctttaacctgctgatgaccctgcggctgtggtccagc

SEQ ID NO: 4929 - DNA, 3807 bp, Artificial Sequence
  Synthetic Polynucloetide
atggccttaccagtgaccgccttgctcctgccgctggccttgctgctccacgccgccaggccgggcatgcggactgaagacctcccaaaggctgtggtgttcctggagcctcaatggtacagggtgctggagaaggacagtgtgactctgaagtgccagggagcctactcccctgaggacaattccacacagtggtttcacaatgagagcctcatctcaagccaggcctccagctacttcattgacgctgccacagtggacgacagtggagagtacaggtgccagacaaacctctccaccctcagtgacccggtgcagctagaagtccatatcggctggctgttgctccaggcccctcggtgggtgttcaaggaggaagaccctattcacctgaggtgtcacagctggaagaacactgctctgcataaggtcacatatttacagaatggcaaaggcaggaagtattttcatcataattctgacttctacattccaaaagccacactcaaagacagcggctcctacttctgcagggggcttgttgggagtaaaaatgtgtcttcagagactgtgaacatcaccatcactcaaggtttggcagtgtcaaccatctcatcattctttccacctggctaccaaggtaccggcggaggcggatctggcggcggaggtagcggtggcggaggatctgaattcgacatccagatgacacagagccctagcagcctgtctgccagcgtgggagacagagtgaccatcacatgcaaggccagcgaccacatcaacaactggctggcctggtatcagcagaagcctggacaggcccctaagctgctgatctacggcgctaccacactggaaacaggcgtgcccagcagattttctggcagcggctctggcaccgactacaccctgacaatatccagcctccagcctgaggacttcgccacctactactgtcagcagagctggaacaccccttggacattcggccagggcaccaagctggaaatcaagagactcgaggacctgaagaacgtgttcccacctgaggtggccgtgttcgagcctagcgaggccgagatcagccacacccagaaagccaccctcgtgtgcctggctaccggcttctaccccgaccatgtggaactgtcttggtgggtcaacggcaaagaggtgcacagcggcgtgtgtaccgacccccagccactgaaagaacagcccgccctgaacgacagccggtactgcctgagcagcagactgagagtgtccgccaccttctggcagaacccccggaaccacttcagatgccaggtgcagttctacggcctgagcgagaacgacgagtggacccaggacagagccaagcccgtgacccagatcgtgtctgccgaagcctggggcagagccgattgcggctttaccagcgagagctaccagcagggcgtgctgagcgccaccatcctgtacgagatcctgctgggcaaggccaccctgtacgccgtgctggtgtctgccctggtgctgatggctatggtcaagcggaaggacagccggggaagggccaagcgatctggatctggagcaacaaacttctcactactcaaacaagcaggtgacgtggaggagaatcccgggcctactagtatggactggatttggcgcatccttttccttgtcggcgctgctaccggcgcccattccgggcccggcatgagaaccgaggacctgcctaaggccgtggtgttcctggaaccccagtggtacagagtgctggaaaaggacagcgtgaccctgaagtgccagggcgcctacagccccgaggacaatagcacccagtggttccacaacgagagcctgatctccagccaggccagcagctacttcatcgacgccgccaccgtggacgacagcggcgagtatagatgccagaccaacctgagcaccctgagcgaccccgtgcagctggaagtgcacatcggatggctgctgctgcaggcccccagatgggtgttcaaagaagaggaccccatccacctgagatgccactcttggaagaacaccgccctgcacaaagtgacctacctgcagaacggcaagggcagaaagtacttccaccacaacagcgacttctacatccccaaggccaccctgaaggactccggctcctacttctgcagaggcctcgtgggcagcaagaacgtgtccagcgagacagtgaacatcaccatcacccagggcctggccgtgtctaccatcagcagctttttcccacccggctaccagggatccggcggcggaggatctggcggaggcggatctgggggcggaggctctttcgaacaagttcagcttcaacagcctggcgctgagctggtcaaacctggcgcttctgtgaagatgagctgcaaagccagcggctacgccttcagcagctactggatcaactggatgaagcagaaacccggccagggactcgaatggatcggccaaatctatcccggcgacggcgacaccaactacaacggcaagttcaagggcagagccacactgaccgccgatacctctagcagcacagcctacatgcagctgagcagcctgaccagcgaagatagcgccgtgtacttctgtgcccggtccatcacaacagtcgtgggctgcgctatggactattggggccagggaacaagcgtgaccgtgtctagtacgcgtatccagaaccctgatcctgccgtgtaccagctgcgggatagcaagagcagcgacaagagcgtgtgtctgttcaccgacttcgacagccagaccaacgtgtcccagagcaaggactccgacgtgtacatcaccgataagtgcgtgctggacatgcggagcatggacttcaagagcaactccgccgtggcctggtccaacaagtccgatttcgcctgcgccaacgccttcaacaacagcattatccccgaggacacattcttcccaagccccgagagcagctgcgacgtgaagctggtggaaaagagcttcgagacagacaccaacctgaacttccagaacctgagcgtgatcggcttcagaatcctgctgctgaaagtggccggctttaacctgctgatgaccctgcggctgtggtccagccgcgccaagagaagcggatctggcgtgaagcagaccctgaatttcgacctgctgaagctggctggcgacgtggaatccaacccaggcccttctagaggcgggatccacaccatggctacctacgaggtgctgtgcgaggtggcaagaaagctgggcaccgacgacagagaagtggtgctgttcctgctgaacgtgttcatccctcagcctacactggcccagctgatcggtgcactgagagccctgaaagaggaaggccggctgacctttcctctgctggccgaatgcctgttcagagccggaagaagggatctgctgcgggacctgctgcatctggaccccagatttctggaaagacacctggccggcaccatgagctacttcagcccttaccagctgaccgtgctgcacgttgacggcgaactgtgcgccagagatattcggagcctgatcttcctgagcaaggacaccatcggcagccggtctacccctcagacatttctgcactgggtgtactgcatggaaaacctggacctgctcggccccacagatgtggatgccctgatgtccatgctgagaagcctgagcagagtggacctccagagacaggtgcagacactgatgggactgcacctgagcggacctagccacagccagcactacagacacacccct

SEQ ID NO: 4930 - DNA, 3144 bp, Artificial Sequence
  Synthetic Polynucloetide
atggccttaccagtgaccgccttgctcctgccgctggccttgctgctccacgccgccaggccgggcatgcggactgaagacctcccaaaggctgtggtgttcctggagcctcaatggtacagggtgctggagaaggacagtgtgactctgaagtgccagggagcctactcccctgaggacaattccacacagtggtttcacaatgagagcctcatctcaagccaggcctccagctacttcattgacgctgccacagtggacgacagtggagagtacaggtgccagacaaacctctccaccctcagtgacccggtgcagctagaagtccatatcggctggctgttgctccaggcccctcggtgggtgttcaaggaggaagaccctattcacctgaggtgtcacagctggaagaacactgctctgcataaggtcacatatttacagaatggcaaaggcaggaagtattttcatcataattctgacttctacattccaaaagccacactcaaagacagcggctcctacttctgcagggggcttgttgggagtaaaaatgtgtcttcagagactgtgaacatcaccatcactcaaggtttggcagtgtcaaccatctcatcattctttccacctggctaccaaggtaccggcggaggcggatctggcggcggaggtagcggtggcggaggatctgaattcgacatccagatgacacagagccctagcagcctgtctgccagcgtgggagacagagtgaccatcacatgcaaggccagcgaccacatcaacaactggctggcctggtatcagcagaagcctggacaggcccctaagctgctgatctacggcgctaccacactggaaacaggcgtgcccagcagattttctggcagcggctctggcaccgactacaccctgacaatatccagcctccagcctgaggacttcgccacctactactgtcagcagagctggaacaccccttggacattcggccagggcaccaagctggaaatcaagagactcgagatccagaaccctgatcctgccgtgtaccagctgcgggatagcaagagcagcgacaagagcgtgtgtctgttcaccgacttcgacagccagaccaacgtgtcccagagcaaggactccgacgtgtacatcaccgataagtgcgtgctggacatgcggagcatggacttcaagagcaactccgccgtggcctggtccaacaagtccgatttcgcctgcgccaacgccttcaacaacagcattatccccgaggacacattcttcccaagccccgagagcagctgcgacgtgaagctggtggaaaagagcttcgagacagacaccaacctgaacttccagaacctgagcgtgatcggcttcagaatcctgctgctgaaagtggccggctttaacctgctgatgaccctgcggctgtggtccagccgcgccaagagaagcggatctggcgtgaagcagaccctgaatttcgacctgctgaagctggctggcgacgtggaatccaacccaggccctactagtatggactggatttggcgcatccttttccttgtcggcgctgctaccggcgcccattccgggcccggcatgagaaccgaggacctgcctaaggccgtggtgttcctggaaccccagtggtacagagtgctggaaaaggacagcgtgaccctgaagtgccagggcgcctacagccccgaggacaatagcacccagtggttccacaacgagagcctgatctccagccaggccagcagctacttcatcgacgccgccaccgtggacgacagcggcgagtatagatgccagaccaacctgagcaccctgagcgaccccgtgcagctggaagtgcacatcggatggctgctgctgcaggcccccagatgggtgttcaaagaagaggaccccatccacctgagatgccactcttggaagaacaccgccctgcacaaagtgacctacctgcagaacggcaagggcagaaagtacttccaccacaacagcgacttctacatccccaaggccaccctgaaggactccggctcctacttctgcagaggcctcgtgggcagcaagaacgtgtccagcgagacagtgaacatcaccatcacccagggcctggccgtgtctaccatcagcagctttttcccacccggctaccagggatccggcggcggaggatctggcggaggcggatctgggggcggaggctctttcgaacaagttcagcttcaacagcctggcgctgagctggtcaaacctggcgcttctgtgaagatgagctgcaaagccagcggctacgccttcagcagctactggatcaactggatgaagcagaaacccggccagggactcgaatggatcggccaaatctatcccggcgacggcgacaccaactacaacggcaagttcaagggcagagccacactgaccgccgatacctctagcagcacagcctacatgcagctgagcagcctgaccagcgaagatagcgccgtgtacttctgtgcccggtccatcacaacagtcgtgggctgcgctatggactattggggccagggaacaagcgtgaccgtgtctagtacgcgtgaggacctgaagaacgtgttcccacctgaggtggccgtgttcgagcctagcgaggccgagatcagccacacccagaaagccaccctcgtgtgcctggctaccggcttctaccccgaccatgtggaactgtcttggtgggtcaacggcaaagaggtgcacagcggcgtgtgtaccgacccccagccactgaaagaacagcccgccctgaacgacagccggtactgcctgagcagcagactgagagtgtccgccaccttctggcagaacccccggaaccacttcagatgccaggtgcagttctacggcctgagcgagaacgacgagtggacccaggacagagccaagcccgtgacccagatcgtgtctgccgaagcctggggcagagccgattgcggctttaccagcgagagctaccagcagggcgtgctgagcgccaccatcctgtacgagatcctgctgggcaaggccaccctgtacgccgtgctggtgtctgccctggtgctgatggctatggtcaagcggaaggacagccgggga

SEQ ID NO: 4931 - DNA, 3810 bp, Artificial Sequence
  Synthetic Polynucloetide
atggccttaccagtgaccgccttgctcctgccgctggccttgctgctccacgccgccaggccgggcatgcggactgaagacctcccaaaggctgtggtgttcctggagcctcaatggtacagggtgctggagaaggacagtgtgactctgaagtgccagggagcctactcccctgaggacaattccacacagtggtttcacaatgagagcctcatctcaagccaggcctccagctacttcattgacgctgccacagtggacgacagtggagagtacaggtgccagacaaacctctccaccctcagtgacccggtgcagctagaagtccatatcggctggctgttgctccaggcccctcggtgggtgttcaaggaggaagaccctattcacctgaggtgtcacagctggaagaacactgctctgcataaggtcacatatttacagaatggcaaaggcaggaagtattttcatcataattctgacttctacattccaaaagccacactcaaagacagcggctcctacttctgcagggggcttgttgggagtaaaaatgtgtcttcagagactgtgaacatcaccatcactcaaggtttggcagtgtcaaccatctcatcattctttccacctggctaccaaggtaccggcggaggcggatctggcggcggaggtagcggtggcggaggatctgaattcgacatccagatgacacagagccctagcagcctgtctgccagcgtgggagacagagtgaccatcacatgcaaggccagcgaccacatcaacaactggctggcctggtatcagcagaagcctggacaggcccctaagctgctgatctacggcgctaccacactggaaacaggcgtgcccagcagattttctggcagcggctctggcaccgactacaccctgacaatatccagcctccagcctgaggacttcgccacctactactgtcagcagagctggaacaccccttggacattcggccagggcaccaagctggaaatcaagagactcgagatccagaaccctgatcctgccgtgtaccagctgcgggatagcaagagcagcgacaagagcgtgtgtctgttcaccgacttcgacagccagaccaacgtgtcccagagcaaggactccgacgtgtacatcaccgataagtgcgtgctggacatgcggagcatggacttcaagagcaactccgccgtggcctggtccaacaagtccgatttcgcctgcgccaacgccttcaacaacagcattatccccgaggacacattcttcccaagccccgagagcagctgcgacgtgaagctggtggaaaagagcttcgagacagacaccaacctgaacttccagaacctgagcgtgatcggcttcagaatcctgctgctgaaagtggccggctttaacctgctgatgaccctgcggctgtggtccagccgcgccaagagaagcggatctggcgtgaagcagaccctgaatttcgacctgctgaagctggctggcgacgtggaatccaacccaggccctactagtatggactggatttggcgcatccttttccttgtcggcgctgctaccggcgcccattccgggcccggcatgagaaccgaggacctgcctaaggccgtggtgttcctggaaccccagtggtacagagtgctggaaaaggacagcgtgaccctgaagtgccagggcgcctacagccccgaggacaatagcacccagtggttccacaacgagagcctgatctccagccaggccagcagctacttcatcgacgccgccaccgtggacgacagcggcgagtatagatgccagaccaacctgagcaccctgagcgaccccgtgcagctggaagtgcacatcggatggctgctgctgcaggcccccagatgggtgttcaaagaagaggaccccatccacctgagatgccactcttggaagaacaccgccctgcacaaagtgacctacctgcagaacggcaagggcagaaagtacttccaccacaacagcgacttctacatccccaaggccaccctgaaggactccggctcctacttctgcagaggcctcgtgggcagcaagaacgtgtccagcgagacagtgaacatcaccatcacccagggcctggccgtgtctaccatcagcagctttttcccacccggctaccagggatccggcggcggaggatctggcggaggcggatctgggggcggaggctctttcgaacaagttcagcttcaacagcctggcgctgagctggtcaaacctggcgcttctgtgaagatgagctgcaaagccagcggctacgccttcagcagctactggatcaactggatgaagcagaaacccggccagggactcgaatggatcggccaaatctatcccggcgacggcgacaccaactacaacggcaagttcaagggcagagccacactgaccgccgatacctctagcagcacagcctacatgcagctgagcagcctgaccagcgaagatagcgccgtgtacttctgtgcccggtccatcacaacagtcgtgggctgcgctatggactattggggccagggaacaagcgtgaccgtgtctagtacgcgtgaggacctgaagaacgtgttcccacctgaggtggccgtgttcgagcctagcgaggccgagatcagccacacccagaaagccaccctcgtgtgcctggctaccggcttctaccccgaccatgtggaactgtcttggtgggtcaacggcaaagaggtgcacagcggcgtgtgtaccgacccccagccactgaaagaacagcccgccctgaacgacagccggtactgcctgagcagcagactgagagtgtccgccaccttctggcagaacccccggaaccacttcagatgccaggtgcagttctacggcctgagcgagaacgacgagtggacccaggacagagccaagcccgtgacccagatcgtgtctgccgaagcctggggcagagccgattgcggctttaccagcgagagctaccagcagggcgtgctgagcgccaccatcctgtacgagatcctgctgggcaaggccaccctgtacgccgtgctggtgtctgccctggtgctgatggctatggtcaagcggaaggacagccggggaagggccaagcgatctggatctggagcaacaaacttctcactactcaaacaagcaggtgacgtggaggagaatcccgggccttctagaggcgggatccacaccatggctacctacgaggtgctgtgcgaggtggcaagaaagctgggcaccgacgacagagaagtggtgctgttcctgctgaacgtgttcatccctcagcctacactggcccagctgatcggtgcactgagagccctgaaagaggaaggccggctgacctttcctctgctggccgaatgcctgttcagagccggaagaagggatctgctgcgggacctgctgcatctggaccccagatttctggaaagacacctggccggcaccatgagctacttcagcccttaccagctgaccgtgctgcacgttgacggcgaactgtgcgccagagatattcggagcctgatcttcctgagcaaggacaccatcggcagccggtctacccctcagacatttctgcactgggtgtactgcatggaaaacctggacctgctcggccccacagatgtggatgccctgatgtccatgctgagaagcctgagcagagtggacctccagagacaggtgcagacactgatgggactgcacctgagcggacctagccacagccagcactacagacacacccct

SEQ ID NO: 4932 - DNA, 3834 bp, Artificial Sequence
  Synthetic Polynucloetide
atggccttaccagtgaccgccttgctcctgccgctggccttgctgctccacgccgccaggccgggcatgcggactgaagacctcccaaaggctgtggtgttcctggagcctcaatggtacagggtgctggagaaggacagtgtgactctgaagtgccagggagcctactcccctgaggacaattccacacagtggtttcacaatgagagcctcatctcaagccaggcctccagctacttcattgacgctgccacagtggacgacagtggagagtacaggtgccagacaaacctctccaccctcagtgacccggtgcagctagaagtccatatcggctggctgttgctccaggcccctcggtgggtgttcaaggaggaagaccctattcacctgaggtgtcacagctggaagaacactgctctgcataaggtcacatatttacagaatggcaaaggcaggaagtattttcatcataattctgacttctacattccaaaagccacactcaaagacagcggctcctacttctgcagggggcttgttgggagtaaaaatgtgtcttcagagactgtgaacatcaccatcactcaaggtttggcagtgtcaaccatctcatcattctttccacctggctaccaaggtaccggcggaggcggatctggcggcggaggtagcggtggcggaggatctgaattcgacatccagatgacacagagccctagcagcctgtctgccagcgtgggagacagagtgaccatcacatgcaaggccagcgaccacatcaacaactggctggcctggtatcagcagaagcctggacaggcccctaagctgctgatctacggcgctaccacactggaaacaggcgtgcccagcagattttctggcagcggctctggcaccgactacaccctgacaatatccagcctccagcctgaggacttcgccacctactactgtcagcagagctggaacaccccttggacattcggccagggcaccaagctggaaatcaagagactcgaggacctgaagaacgtgttcccacctgaggtggccgtgttcgagcctagcgaggccgagatcagccacacccagaaagccaccctcgtgtgcctggctaccggcttctaccccgaccatgtggaactgtcttggtgggtcaacggcaaagaggtgcacagcggcgtgtctaccgacccccagccactgaaagaacagcccgccctgaacgacagccggtactgcctgagcagcagactgagagtgtccgccaccttctggcagaacccccggaaccacttcagatgccaggtgcagttctacggcctgagcgagaacgacgagtggacccaggacagagccaagcccgtgacccagatcgtgtctgccgaagcctggggcagagccgattgcggctttaccagcgagagctaccagcagggcgtgctgagcgccaccatcctgtacgagatcctgctgggcaaggccaccctgtacgccgtgctggtgtctgccctggtgctgatggctatggtcaagcggaaggacagccggggaagggccaagcgatctggatctggagcaacaaacttctcactactcaaacaagcaggtgacgtggaggagaatcccgggcctactagtatggactggatttggcgcatccttttccttgtcggcgctgctaccggcgcccattccgggcccggcatgagaaccgaggacctgcctaaggccgtggtgttcctggaaccccagtggtacagagtgctggaaaaggacagcgtgaccctgaagtgccagggcgcctacagccccgaggacaatagcacccagtggttccacaacgagagcctgatctccagccaggccagcagctacttcatcgacgccgccaccgtggacgacagcggcgagtatagatgccagaccaacctgagcaccctgagcgaccccgtgcagctggaagtgcacatcggatggctgctgctgcaggcccccagatgggtgttcaaagaagaggaccccatccacctgagatgccactcttggaagaacaccgccctgcacaaagtgacctacctgcagaacggcaagggcagaaagtacttccaccacaacagcgacttctacatccccaaggccaccctgaaggactccggctcctacttctgcagaggcctcgtgggcagcaagaacgtgtccagcgagacagtgaacatcaccatcacccagggcctggccgtgtctaccatcagcagctttttcccacccggctaccagggatccggcggcggaggatctggcggaggcggatctgggggcggaggctctttcgaacaagttcagcttcaacagcctggcgctgagctggtcaaacctggcgcttctgtgaagatgagctgcaaagccagcggctacgccttcagcagctactggatcaactggatgaagcagaaacccggccagggactcgaatggatcggccaaatctatcccggcgacggcgacaccaactacaacggcaagttcaagggcagagccacactgaccgccgatacctctagcagcacagcctacatgcagctgagcagcctgaccagcgaagatagcgccgtgtacttctgtgcccggtccatcacaacagtcgtgggctgcgctatggactattggggccagggaacaagcgtgaccgtgtctagtacgcgtatccagaaccctgatcctgccgtgtaccagctgcgggatagcaagagcagcgacaagagcgtgtgtctgttcaccgacttcgacagccagaccaacgtgtcccagagcaaggactccgacgtgtacatcaccgataagaccgtgctggacatgcggagcatggacttcaagagcaactccgccgtggcctggtccaacaagtccgatttcgcctgcgccaacgccttcaacaacagcattatccccgaggacacattcttcccaagccccgagagcagctgcgacgtgaagctggtggaaaagagcttcgagacagacaccaacctgaacttccagaacctgagcgtgatcggcttcagaatcctgctgctgaaagtggccggctttaacctgctgatgaccctgcggctgtggtccagccgcgccaagagaagcggatctggcgtgaagcagaccctgaatttcgacctgctgaagctggctggcgacgtggaatccaacccaggcccttctagaggccatatgaccgagtacaagcccacggtgcgcctcgccacccgcgacgacgtccccagggccgtacgcaccctcgccgccgcgttcgccgactaccccgccacgcgccacaccgtcgatccggaccgccacatcgagcgggtcaccgagctgcaagaactcttcctcacgcgcgtcgggctcgacatcggcaaggtgtgggtcgcggacgacggcgccgcggtggcggtctggaccacgccggagagcgtcgaagcgggggcggtgttcgccgagatcggcccgcgcatggccgagttgagcggttcccggctggccgcgcagcaacagatggaaggcctcctggcgccgcaccggcccaaggagcccgcgtggttcctggccaccgtcggcgtctcgcccgaccaccagggcaagggtctgggcagcgccgtcgtgctccccggagtggaggcggccgagcgcgccggggtgcccgccttcctggagacctccgcgccccgcaacctccccttctacgagcggctcggcttcaccgtcaccgccgacgtcgaggtgcccgaaggaccgcgcacctggtgcatgacccgcaagcccggtgcctga

SEQ ID NO: 4933 - DNA, 4080 bp, Artificial Sequence
  Synthetic Polynucloetide
atggccttaccagtgaccgccttgctcctgccgctggccttgctgctccacgccgccaggccgggcatgcggactgaagacctcccaaaggctgtggtgttcctggagcctcaatggtacagggtgctggagaaggacagtgtgactctgaagtgccagggagcctactcccctgaggacaattccacacagtggtttcacaatgagagcctcatctcaagccaggcctccagctacttcattgacgctgccacagtggacgacagtggagagtacaggtgccagacaaacctctccaccctcagtgacccggtgcagctagaagtccatatcggctggctgttgctccaggcccctcggtgggtgttcaaggaggaagaccctattcacctgaggtgtcacagctggaagaacactgctctgcataaggtcacatatttacagaatggcaaaggcaggaagtattttcatcataattctgacttctacattccaaaagccacactcaaagacagcggctcctacttctgcagggggcttgttgggagtaaaaatgtgtcttcagagactgtgaacatcaccatcactcaaggtttggcagtgtcaaccatctcatcattctttccacctggctaccaaggtaccggcggaggcggatctggcggcggaggtagcggtggcggaggatctgaattcgacatccagatgacacagagccctagcagcctgtctgccagcgtgggagacagagtgaccatcacatgcaaggccagcgaccacatcaacaactggctggcctggtatcagcagaagcctggacaggcccctaagctgctgatctacggcgctaccacactggaaacaggcgtgcccagcagattttctggcagcggctctggcaccgactacaccctgacaatatccagcctccagcctgaggacttcgccacctactactgtcagcagagctggaacaccccttggacattcggccagggcaccaagctggaaatcaagagactcgaggacctgaagaacgtgttcccacctgaggtggccgtgttcgagcctagcgaggccgagatcagccacacccagaaagccaccctcgtgtgcctggctaccggcttctaccccgaccatgtggaactgtcttggtgggtcaacggcaaagaggtgcacagcggcgtgtctaccgacccccagccactgaaagaacagcccgccctgaacgacagccggtactgcctgagcagcagactgagagtgtccgccaccttctggcagaacccccggaaccacttcagatgccaggtgcagttctacggcctgagcgagaacgacgagtggacccaggacagagccaagcccgtgacccagatcgtgtctgccgaagcctggggcagagccgattgcggctttaccagcgagagctaccagcagggcgtgctgagcgccaccatcctgtacgagatcctgctgggcaaggccaccctgtacgccgtgctggtgtctgccctggtgctgatggctatggtcaagcggaaggacagccggggaagggccaagcgatctggatctggagcaacaaacttctcactactcaaacaagcaggtgacgtggaggagaatcccgggcctactagtatggactggatttggcgcatccttttccttgtcggcgctgctaccggcgcccattccgggcccggcatgagaaccgaggacctgcctaaggccgtggtgttcctggaaccccagtggtacagagtgctggaaaaggacagcgtgaccctgaagtgccagggcgcctacagccccgaggacaatagcacccagtggttccacaacgagagcctgatctccagccaggccagcagctacttcatcgacgccgccaccgtggacgacagcggcgagtatagatgccagaccaacctgagcaccctgagcgaccccgtgcagctggaagtgcacatcggatggctgctgctgcaggcccccagatgggtgttcaaagaagaggaccccatccacctgagatgccactcttggaagaacaccgccctgcacaaagtgacctacctgcagaacggcaagggcagaaagtacttccaccacaacagcgacttctacatccccaaggccaccctgaaggactccggctcctacttctgcagaggcctcgtgggcagcaagaacgtgtccagcgagacagtgaacatcaccatcacccagggcctggccgtgtctaccatcagcagctttttcccacccggctaccagggatccggcggcggaggatctggcggaggcggatctgggggcggaggctctttcgaacaagttcagcttcaacagcctggcgctgagctggtcaaacctggcgcttctgtgaagatgagctgcaaagccagcggctacgccttcagcagctactggatcaactggatgaagcagaaacccggccagggactcgaatggatcggccaaatctatcccggcgacggcgacaccaactacaacggcaagttcaagggcagagccacactgaccgccgatacctctagcagcacagcctacatgcagctgagcagcctgaccagcgaagatagcgccgtgtacttctgtgcccggtccatcacaacagtcgtgggctgcgctatggactattggggccagggaacaagcgtgaccgtgtctagtacgcgtgagcagaaactgatctcggaagaggatgggagcggcaccccattcccttctctggcccctcccatcatgctgctggtggacggcaagcagcagatggtggtcgtgtgcctggtgctggatgtggccccacctggactggacagccccatctggtttagcgccggcaatggctctgccctggacgcctttacctacggcccaagccctgccaccgatggcacctggacaaatctggcccacctgagcctgcccagcgaggaactggcttcttgggagcctctcgtgtgccacacaggacctggcgctgagggacacagcagatccacccagcctatgcacctgtctggcgaggccagcaccgccagaacctgtcctcaggaacctctgagaggcacccctggcggagcactgtggctgggagtgctgagactgctgctgttcaagctgctgctgtttgacctgctgctgacctgctcctgtctgtgcgatcctgccggccctctgccttctcctgccaccaccacaagactgagagccctgggcagccacagactgcaccctgccacagagacaggcggcagagaggccacaagcagccctagaccccagcccagagacagaagatggggcgataccccccctggcagaaagcctggatctccagtccgcgccaagagaagcggatctggcgtgaagcagaccctgaatttcgacctgctgaagctggctggcgacgtggaatccaacccaggcccttctagaggccatatgaccgagtacaagcccacggtgcgcctcgccacccgcgacgacgtccccagggccgtacgcaccctcgccgccgcgttcgccgactaccccgccacgcgccacaccgtcgatccggaccgccacatcgagcgggtcaccgagctgcaagaactcttcctcacgcgcgtcgggctcgacatcggcaaggtgtgggtcgcggacgacggcgccgcggtggcggtctggaccacgccggagagcgtcgaagcgggggcggtgttcgccgagatcggcccgcgcatggccgagttgagcggttcccggctggccgcgcagcaacagatggaaggcctcctggcgccgcaccggcccaaggagcccgcgtggttcctggccaccgtcggcgtctcgcccgaccaccagggcaagggtctgggcagcgccgtcgtgctccccggagtggaggcggccgagcgcgccggggtgcccgccttcctggagacctccgcgccccgcaacctccccttctacgagcggctcggcttcaccgtcaccgccgacgtcgaggtgcccgaaggaccgcgcacctggtgcatgacccgcaagcccggtgcctga

SEQ ID NO: 4934 - DNA, 3945 bp, Artificial Sequence
  Synthetic Polynucloetide
atggccttaccagtgaccgccttgctcctgccgctggccttgctgctccacgccgccaggccgggcatgcggactgaagacctcccaaaggctgtggtgttcctggagcctcaatggtacagggtgctggagaaggacagtgtgactctgaagtgccagggagcctactcccctgaggacaattccacacagtggtttcacaatgagagcctcatctcaagccaggcctccagctacttcattgacgctgccacagtggacgacagtggagagtacaggtgccagacaaacctctccaccctcagtgacccggtgcagctagaagtccatatcggctggctgttgctccaggcccctcggtgggtgttcaaggaggaagaccctattcacctgaggtgtcacagctggaagaacactgctctgcataaggtcacatatttacagaatggcaaaggcaggaagtattttcatcataattctgacttctacattccaaaagccacactcaaagacagcggctcctacttctgcagggggcttgttgggagtaaaaatgtgtcttcagagactgtgaacatcaccatcactcaaggtttggcagtgtcaaccatctcatcattctttccacctggctaccaaggtaccggcggaggcggatctggcggcggaggtagcggtggcggaggatctgaattcgacatccagatgacacagagccctagcagcctgtctgccagcgtgggagacagagtgaccatcacatgcaaggccagcgaccacatcaacaactggctggcctggtatcagcagaagcctggacaggcccctaagctgctgatctacggcgctaccacactggaaacaggcgtgcccagcagattttctggcagcggctctggcaccgactacaccctgacaatatccagcctccagcctgaggacttcgccacctactactgtcagcagagctggaacaccccttggacattcggccagggcaccaagctggaaatcaagagactcgaggggaaaccaattcccaaccctcttctgggactggattcaaccggcagcggcgacaagcagctggacgccgacgtgtcccccaagcctaccatcttcctgccctctatcgccgagacaaagctccagaaggccggcacctacctgtgcctgctggaaaagttcttcccagatgtgattaagatccactggcaggaaaagaagtccaacaccatcctgggcagccaggaaggcaacaccatgaagaccaacgacacctacatgaagttcagctggctgaccgtgcccgagaagtccctggacaaagaacacagatgcatcgtgcggcacgaaaacaacaagaacggcgtggaccaggaaatcatcttcccacccatcaagaccgatgtgattacaatggaccccaaggacaactgctccaaggacgccaacgataccctgctgctccagctgaccaacaccagcgcctactacatgtacttgttgctgctgctgaagtccgtggtgtacttcgccatcatcacatgctgcctgctgcggagaaccgccttctgctgcaacggcgagaagtctagggccaagcgatctggatctggagcaacaaacttctcactactcaaacaagcaggtgacgtggaggagaatcccgggcctactagtatggactggatttggcgcatccttttccttgtcggcgctgctaccggcgcccattccgggcccggcatgagaaccgaggacctgcctaaggccgtggtgttcctggaaccccagtggtacagagtgctggaaaaggacagcgtgaccctgaagtgccagggcgcctacagccccgaggacaatagcacccagtggttccacaacgagagcctgatctccagccaggccagcagctacttcatcgacgccgccaccgtggacgacagcggcgagtatagatgccagaccaacctgagcaccctgagcgaccccgtgcagctggaagtgcacatcggatggctgctgctgcaggcccccagatgggtgttcaaagaagaggaccccatccacctgagatgccactcttggaagaacaccgccctgcacaaagtgacctacctgcagaacggcaagggcagaaagtacttccaccacaacagcgacttctacatccccaaggccaccctgaaggactccggctcctacttctgcagaggcctcgtgggcagcaagaacgtgtccagcgagacagtgaacatcaccatcacccagggcctggccgtgtctaccatcagcagctttttcccacccggctaccagggatccggcggcggaggatctggcggaggcggatctgggggcggaggctctttcgaacaagttcagcttcaacagcctggcgctgagctggtcaaacctggcgcttctgtgaagatgagctgcaaagccagcggctacgccttcagcagctactggatcaactggatgaagcagaaacccggccagggactcgaatggatcggccaaatctatcccggcgacggcgacaccaactacaacggcaagttcaagggcagagccacactgaccgccgatacctctagcagcacagcctacatgcagctgagcagcctgaccagcgaagatagcgccgtgtacttctgtgcccggtccatcacaacagtcgtgggctgcgctatggactattggggccagggaacaagcgtgaccgtgtctagtacgcgtgagcagaaactgatctcggaagaggatgggagcggcagccagcctcacaccaagcccagcgtgttcgtgatgaagaacggcaccaacgtggcctgcctcgtgaaagagttctaccccaaggacatcaggatcaacctggtgtccagcaagaagatcaccgagttcgaccccgccatcgtgatctcccccagcggcaagtacaacgccgtgaagctggggaagtacgaggacagcaacagcgtgacctgctccgtgcagcacgacaacaagaccgtgcacagcaccgactttgaagtgaaaaccgactccaccgaccacgtgaagcccaaagagacagagaacaccaagcagcccagcaagagctgccacaagcccaaggccatcgtgcacaccgagaaagtgaacatgatgagcctgaccgtgctgggcctgcggatgctgttcgccaaaaccgtggccgtgaacttcctgctgaccgccaagctgttcttcctccgcgccaagagaagcggatctggcgtgaagcagaccctgaatttcgacctgctgaagctggctggcgacgtggaatccaacccaggcccttctagaggccatatgaccgagtacaagcccacggtgcgcctcgccacccgcgacgacgtccccagggccgtacgcaccctcgccgccgcgttcgccgactaccccgccacgcgccacaccgtcgatccggaccgccacatcgagcgggtcaccgagctgcaagaactcttcctcacgcgcgtcgggctcgacatcggcaaggtgtgggtcgcggacgacggcgccgcggtggcggtctggaccacgccggagagcgtcgaagcgggggcggtgttcgccgagatcggcccgcgcatggccgagttgagcggttcccggctggccgcgcagcaacagatggaaggcctcctggcgccgcaccggcccaaggagcccgcgtggttcctggccaccgtcggcgtctcgcccgaccaccagggcaagggtctgggcagcgccgtcgtgctccccggagtggaggcggccgagcgcgccggggtgcccgccttcctggagacctccgcgccccgcaacctccccttctacgagcggctcggcttcaccgtcaccgccgacgtcgaggtgcccgaaggaccgcgcacctggtgcatgacccgcaagcccggtgcctga

SEQ ID NO: 4935 - DNA, 3156 bp, Artificial Sequence
  Synthetic Polynucloetide
atggccttaccagtgaccgccttgctcctgccgctggccttgctgctccacgccgccaggccgggcatgcggactgaagacctcccaaaggctgtggtgttcctggagcctcaatggtacagggtgctggagaaggacagtgtgactctgaagtgccagggagcctactcccctgaggacaattccacacagtggtttcacaatgagagcctcatctcaagccaggcctccagctacttcattgacgctgccacagtggacgacagtggagagtacaggtgccagacaaacctctccaccctcagtgacccggtgcagctagaagtccatatcggctggctgttgctccaggcccctcggtgggtgttcaaggaggaagaccctattcacctgaggtgtcacagctggaagaacactgctctgcataaggtcacatatttacagaatggcaaaggcaggaagtattttcatcataattctgacttctacattccaaaagccacactcaaagacagcggctcctacttctgcagggggcttgttgggagtaaaaatgtgtcttcagagactgtgaacatcaccatcactcaaggtttggcagtgtcaaccatctcatcattctttccacctggctaccaaggtaccggcggaggcggatctggcggcggaggtagcggtggcggaggatctgaattcgacatccagatgacacagagccctagcagcctgtctgccagcgtgggagacagagtgaccatcacatgcaaggccagcgaccacatcaacaactggctggcctggtatcagcagaagcctggacaggcccctaagctgctgatctacggcgctaccacactggaaacaggcgtgcccagcagattttctggcagcggctctggcaccgactacaccctgacaatatccagcctccagcctgaggacttcgccacctactactgtcagcagagctggaacaccccttggacattcggccagggcaccaagctggaaatcaagagactcgagagccagcctcacaccaagcccagcgtgttcgtgatgaagaacggcaccaacgtggcctgcctcgtgaaagagttctaccccaaggacatcaggatcaacctggtgtccagcaagaagatcaccgagttcgaccccgccatcgtgatctcccccagcggcaagtacaacgccgtgaagctggggaagtacgaggacagcaacagcgtgacctgctccgtgcagcacgacaacaagaccgtgcacagcaccgactttgaagtgaaaaccgactccaccgaccacgtgaagcccaaagagacagagaacaccaagcagcccagcaagagctgccacaagcccaaggccatcgtgcacaccgagaaagtgaacatgatgagcctgaccgtgctgggcctgcggatgctgttcgccaaaaccgtggccgtgaacttcctgctgaccgccaagctgttcttcctcagggccaagcgatctggatctggagcaacaaacttctcactactcaaacaagcaggtgacgtggaggagaatcccgggcctactagtatggactggatttggcgcatccttttccttgtcggcgctgctaccggcgcccattccgggcccggcatgagaaccgaggacctgcctaaggccgtggtgttcctggaaccccagtggtacagagtgctggaaaaggacagcgtgaccctgaagtgccagggcgcctacagccccgaggacaatagcacccagtggttccacaacgagagcctgatctccagccaggccagcagctacttcatcgacgccgccaccgtggacgacagcggcgagtatagatgccagaccaacctgagcaccctgagcgaccccgtgcagctggaagtgcacatcggatggctgctgctgcaggcccccagatgggtgttcaaagaagaggaccccatccacctgagatgccactcttggaagaacaccgccctgcacaaagtgacctacctgcagaacggcaagggcagaaagtacttccaccacaacagcgacttctacatccccaaggccaccctgaaggactccggctcctacttctgcagaggcctcgtgggcagcaagaacgtgtccagcgagacagtgaacatcaccatcacccagggcctggccgtgtctaccatcagcagctttttcccacccggctaccagggatccggcggcggaggatctggcggaggcggatctgggggcggaggctctttcgaacaagttcagcttcaacagcctggcgctgagctggtcaaacctggcgcttctgtgaagatgagctgcaaagccagcggctacgccttcagcagctactggatcaactggatgaagcagaaacccggccagggactcgaatggatcggccaaatctatcccggcgacggcgacaccaactacaacggcaagttcaagggcagagccacactgaccgccgatacctctagcagcacagcctacatgcagctgagcagcctgaccagcgaagatagcgccgtgtacttctgtgcccggtccatcacaacagtcgtgggctgcgctatggactattggggccagggaacaagcgtgaccgtgtctagtacgcgtgacaagcagctggacgccgacgtgtcccccaagcctaccatcttcctgccctctatcgccgagacaaagctccagaaggccggcacctacctgtgcctgctggaaaagttcttcccagatgtgattaagatccactggcaggaaaagaagtccaacaccatcctgggcagccaggaaggcaacaccatgaagaccaacgacacctacatgaagttcagctggctgaccgtgcccgagaagtccctggacaaagaacacagatgcatcgtgcggcacgaaaacaacaagaacggcgtggaccaggaaatcatcttcccacccatcaagaccgatgtgattacaatggaccccaaggacaactgctccaaggacgccaacgataccctgctgctccagctgaccaacaccagcgcctactacatgtacttgttgctgctgctgaagtccgtggtgtacttcgccatcatcacatgctgcctgctgcggagaaccgccttctgctgcaacggcgagaagtct

SEQ ID NO: 4936 - DNA, 4365 bp, Artificial Sequence
  Synthetic Polynucloetide
atggccttaccagtgaccgccttgctcctgccgctggccttgctgctccacgccgccaggccgggcatgcggactgaagacctcccaaaggctgtggtgttcctggagcctcaatggtacagggtgctggagaaggacagtgtgactctgaagtgccagggagcctactcccctgaggacaattccacacagtggtttcacaatgagagcctcatctcaagccaggcctccagctacttcattgacgctgccacagtggacgacagtggagagtacaggtgccagacaaacctctccaccctcagtgacccggtgcagctagaagtccatatcggctggctgttgctccaggcccctcggtgggtgttcaaggaggaagaccctattcacctgaggtgtcacagctggaagaacactgctctgcataaggtcacatatttacagaatggcaaaggcaggaagtattttcatcataattctgacttctacattccaaaagccacactcaaagacagcggctcctacttctgcagggggcttgttgggagtaaaaatgtgtcttcagagactgtgaacatcaccatcactcaaggtttggcagtgtcaaccatctcatcattctttccacctggctaccaaggtaccggcggaggcggatctggcggcggaggtagcggtggcggaggatctgaattcgacatccagatgacacagagccctagcagcctgtctgccagcgtgggagacagagtgaccatcacatgcaaggccagcgaccacatcaacaactggctggcctggtatcagcagaagcctggacaggcccctaagctgctgatctacggcgctaccacactggaaacaggcgtgcccagcagattttctggcagcggctctggcaccgactacaccctgacaatatccagcctccagcctgaggacttcgccacctactactgtcagcagagctggaacaccccttggacattcggccagggcaccaagctggaaatcaagagaggacagcctaaggccaatcctaccgtgacactgttccctccaagcagcgaagaactccaggccaacaaggccacacttgtgtgcctgatctccgacttctaccctggggctgtgacagtggcttggaaggccgatggatctcctgtgaaagccggcgtggaaaccaccaagccatccaagcagagcaacaacaaatacgccgccagctcctacctgagcctgacacctgagcagtggaagtcccacagatcctacagctgccaagtgacccacgaaggcagcaccgtggaaaagacagtggcccctacagagtgcagcggatcccagagcttcggcctgctggaccccaagctgtgctacctgctggatggcatcctgttcatctacggcgtgatcctgaccgccctgttcctgagagtgaagttcagcagaagcgccgacgcccctgcctaccagcagggacagaaccaactgtacaacgagctgaacctgggcagacgggaagagtacgacgtgctggacaagcggagaggcagggaccctgagatgggcggaaagccccagcggagaaagaacccccaggaaggactgtataacgaactccagaaagacaagatggccgaagcctacagcgagatcggcatgaagggcgagcggagaagaggcaagggccacgatggcctgtaccagggcctgagcaccgccaccaaggacacctatgacgccctgcacatgcaggccctgcctccaagaagggccaagcgatctggatctggagcaacaaacttctcactactcaaacaagcaggtgacgtggaggagaatcccgggcctactagtatggactggatttggcgcatccttttccttgtcggcgctgctaccggcgcccattccgggcccggcatgagaaccgaggacctgcctaaggccgtggtgttcctggaaccccagtggtacagagtgctggaaaaggacagcgtgaccctgaagtgccagggcgcctacagccccgaggacaatagcacccagtggttccacaacgagagcctgatctccagccaggccagcagctacttcatcgacgccgccaccgtggacgacagcggcgagtatagatgccagaccaacctgagcaccctgagcgaccccgtgcagctggaagtgcacatcggatggctgctgctgcaggcccccagatgggtgttcaaagaagaggaccccatccacctgagatgccactcttggaagaacaccgccctgcacaaagtgacctacctgcagaacggcaagggcagaaagtacttccaccacaacagcgacttctacatccccaaggccaccctgaaggactccggctcctacttctgcagaggcctcgtgggcagcaagaacgtgtccagcgagacagtgaacatcaccatcacccagggcctggccgtgtctaccatcagcagctttttcccacccggctaccagggatccggcggcggaggatctggcggaggcggatctgggggcggaggctctttcgaacaagttcagcttcaacagcctggcgctgagctggtcaaacctggcgcttctgtgaagatgagctgcaaagccagcggctacgccttcagcagctactggatcaactggatgaagcagaaacccggccagggactcgaatggatcggccaaatctatcccggcgacggcgacaccaactacaacggcaagttcaagggcagagccacactgaccgccgatacctctagcagcacagcctacatgcagctgagcagcctgaccagcgaagatagcgccgtgtacttctgtgcccggtccatcacaacagtcgtgggctgcgctatggactattggggccagggaacaagcgtgaccgtgtctagtgcctctacaaagggaccctccgtgtttcctctggctcccagcagcaagtctacaagcggaggaacagccgctctgggctgcctggtcaaggattactttcccgagcctgtgaccgtgtcctggaatagcggagcactgacaagcggcgtgcacacctttccagccgtgctgcaaagcagcggcctgtactctctgagcagcgtggtcacagtgcctagctctagcctgggcacccagacctacatctgcaatgtgaaccacaagcctagcaacaccaaggtggacaagagagtggaacccaagagctgtggtacccagagttttgggttgttggaccctaaattgtgctatctgttggacggaatcctgttcatttacggagtgatcctgaccgcattgttcctgcgggttaagttttccagatccgcagacgcacccgcttaccaacaagggcagaaccaactctacaatgaacttaatttggggcggagggaagagtacgacgttctggacaaaaggaggggacgagatcccgagatgggcggaaagcctcagcgaaggaagaatccgcaagaggggctttataacgaactccagaaagataaaatggcagaagcctatagtgagattgggatgaagggagaaaggaggaggggtaaaggtcacgatgggttgtaccaaggattgagcacagccactaaagatacctatgatgcgctccacatgcaggccctgccgccaagacgcgccaagagaagcggatctggcgtgaagcagaccctgaatttcgacctgctgaagctggctggcgacgtggaatccaacccaggcccttctagaggccatatgaccgagtacaagcccacggtgcgcctcgccacccgcgacgacgtccccagggccgtacgcaccctcgccgccgcgttcgccgactaccccgccacgcgccacaccgtcgatccggaccgccacatcgagcgggtcaccgagctgcaagaactcttcctcacgcgcgtcgggctcgacatcggcaaggtgtgggtcgcggacgacggcgccgcggtggcggtctggaccacgccggagagcgtcgaagcgggggcggtgttcgccgagatcggcccgcgcatggccgagttgagcggttcccggctggccgcgcagcaacagatggaaggcctcctggcgccgcaccggcccaaggagcccgcgtggttcctggccaccgtcggcgtctcgcccgaccaccagggcaagggtctgggcagcgccgtcgtgctccccggagtggaggcggccgagcgcgccggggtgcccgccttcctggagacctccgcgccccgcaacctccccttctacgagcggctcggcttcaccgtcaccgccgacgtcgaggtgcccgaaggaccgcgcacctggtgcatgacccgcaagcccggtgcctga

SEQ ID NO: 4937 - DNA, 3720 bp, Artificial Sequence
  Synthetic Polynucloetide
atggccttaccagtgaccgccttgctcctgccgctggccttgctgctccacgccgccaggccgggcatgcggactgaagacctcccaaaggctgtggtgttcctggagcctcaatggtacagggtgctggagaaggacagtgtgactctgaagtgccagggagcctactcccctgaggacaattccacacagtggtttcacaatgagagcctcatctcaagccaggcctccagctacttcattgacgctgccacagtggacgacagtggagagtacaggtgccagacaaacctctccaccctcagtgacccggtgcagctagaagtccatatcggctggctgttgctccaggcccctcggtgggtgttcaaggaggaagaccctattcacctgaggtgtcacagctggaagaacactgctctgcataaggtcacatatttacagaatggcaaaggcaggaagtattttcatcataattctgacttctacattccaaaagccacactcaaagacagcggctcctacttctgcagggggcttgttgggagtaaaaatgtgtcttcagagactgtgaacatcaccatcactcaaggtttggcagtgtcaaccatctcatcattctttccacctggctaccaaggtaccggcggaggcggatctggcggcggaggtagcggtggcggaggatctgaattcgacatccagatgacacagagccctagcagcctgtctgccagcgtgggagacagagtgaccatcacatgcaaggccagcgaccacatcaacaactggctggcctggtatcagcagaagcctggacaggcccctaagctgctgatctacggcgctaccacactggaaacaggcgtgcccagcagattttctggcagcggctctggcaccgactacaccctgacaatatccagcctccagcctgaggacttcgccacctactactgtcagcagagctggaacaccccttggacattcggccagggcaccaagctggaaatcaagagactcgaggacctgaagaacgtgttcccacctgaggtggccgtgttcgagcctagcgaggccgagatcagccacacccagaaagccaccctcgtgtgcctggctaccggcttctaccccgaccatgtggaactgtcttggtgggtcaacggcaaagaggtgcacagcggcgtgtctaccgacccccagccactgaaagaacagcccgccctgaacgacagccggtactgcctgagcagcagactgagagtgtccgccaccttctggcagaacccccggaaccacttcagatgccaggtgcagttctacggcctgagcgagaacgacgagtggacccaggacagagccaagcccgtgacccagatcgtgtctgccgaagcctggggcagagccgattgcggatcccagagcttcggcctgctggaccccaagctgtgctacctgctggatggcatcctgttcatctacggcgtgatcctgaccgccctgttcctgagagtgaagttcagcagaagcgccgacgcccctgcctaccagcagggacagaaccaactgtacaacgagctgaacctgggcagacgggaagagtacgacgtgctggacaagcggagaggcagggaccctgagatgggcggaaagccccagcggagaaagaacccccaggaaggactgtataacgaactccagaaagacaagatggccgaagcctacagcgagatcggcatgaagggcgagcggagaagaggcaagggccacgatggcctgtaccagggcctgagcaccgccaccaaggacacctatgacgccctgcacatgcaggccctgcctccaagaagggccaagcgatctggatctggagcaacaaacttctcactactcaaacaagcaggtgacgtggaggagaatcccgggcctactagtatggactggatttggcgcatccttttccttgtcggcgctgctaccggcgcccattccgggcccggcatgagaaccgaggacctgcctaaggccgtggtgttcctggaaccccagtggtacagagtgctggaaaaggacagcgtgaccctgaagtgccagggcgcctacagccccgaggacaatagcacccagtggttccacaacgagagcctgatctccagccaggccagcagctacttcatcgacgccgccaccgtggacgacagcggcgagtatagatgccagaccaacctgagcaccctgagcgaccccgtgcagctggaagtgcacatcggatggctgctgctgcaggcccccagatgggtgttcaaagaagaggaccccatccacctgagatgccactcttggaagaacaccgccctgcacaaagtgacctacctgcagaacggcaagggcagaaagtacttccaccacaacagcgacttctacatccccaaggccaccctgaaggactccggctcctacttctgcagaggcctcgtgggcagcaagaacgtgtccagcgagacagtgaacatcaccatcacccagggcctggccgtgtctaccatcagcagctttttcccacccggctaccagggatccggcggcggaggatctggcggaggcggatctgggggcggaggctctttcgaacaagttcagcttcaacagcctggcgctgagctggtcaaacctggcgcttctgtgaagatgagctgcaaagccagcggctacgccttcagcagctactggatcaactggatgaagcagaaacccggccagggactcgaatggatcggccaaatctatcccggcgacggcgacaccaactacaacggcaagttcaagggcagagccacactgaccgccgatacctctagcagcacagcctacatgcagctgagcagcctgaccagcgaagatagcgccgtgtacttctgtgcccggtccatcacaacagtcgtgggctgcgctatggactattggggccagggaacaagcgtgaccgtgtctagtacgcgtatccagaaccctgatcctgccgtgtaccagctgcgggatagcaagagcagcgacaagagcgtgtgtctgttcaccgacttcgacagccagaccaacgtgtcccagagcaaggactccgacgtgtacatcaccgataagaccgtgctggacatgcggagcatggacttcaagagcaactccgccgtggcctggtccaacaagtccgatttcgcctgcgccaacgccttcaacaacagcattatccccgaggacacattcttcccaagccccgagagcagctgcggtacccagagttttgggttgttggaccctaaattgtgctatctgttggacggaatcctgttcatttacggagtgatcctgaccgcattgttcctgcgggttaagttttccagatccgcagacgcacccgcttaccaacaagggcagaaccaactctacaatgaacttaatttggggcggagggaagagtacgacgttctggacaaaaggaggggacgagatcccgagatgggcggaaagcctcagcgaaggaagaatccgcaagaggggctttataacgaactccagaaagataaaatggcagaagcctatagtgagattgggatgaagggagaaaggaggaggggtaaaggtcacgatgggttgtaccaaggattgagcacagccactaaagatacctatgatgcgctccacatgcaggccctgccgccaaga

SEQ ID NO: 4938 - DNA, 3720 bp, Artificial Sequence
  Synthetic Polynucloetide
atggccttaccagtgaccgccttgctcctgccgctggccttgctgctccacgccgccaggccgggcatgcggactgaagacctcccaaaggctgtggtgttcctggagcctcaatggtacagggtgctggagaaggacagtgtgactctgaagtgccagggagcctactcccctgaggacaattccacacagtggtttcacaatgagagcctcatctcaagccaggcctccagctacttcattgacgctgccacagtggacgacagtggagagtacaggtgccagacaaacctctccaccctcagtgacccggtgcagctagaagtccatatcggctggctgttgctccaggcccctcggtgggtgttcaaggaggaagaccctattcacctgaggtgtcacagctggaagaacactgctctgcataaggtcacatatttacagaatggcaaaggcaggaagtattttcatcataattctgacttctacattccaaaagccacactcaaagacagcggctcctacttctgcagggggcttgttgggagtaaaaatgtgtcttcagagactgtgaacatcaccatcactcaaggtttggcagtgtcaaccatctcatcattctttccacctggctaccaaggtaccggcggaggcggatctggcggcggaggtagcggtggcggaggatctgaattcgacatccagatgacacagagccctagcagcctgtctgccagcgtgggagacagagtgaccatcacatgcaaggccagcgaccacatcaacaactggctggcctggtatcagcagaagcctggacaggcccctaagctgctgatctacggcgctaccacactggaaacaggcgtgcccagcagattttctggcagcggctctggcaccgactacaccctgacaatatccagcctccagcctgaggacttcgccacctactactgtcagcagagctggaacaccccttggacattcggccagggcaccaagctggaaatcaagagactcgaggacctgaagaacgtgttcccacctgaggtggccgtgttcgagcctagcaaggccgagatcgcccacacccagaaagccaccctcgtgtgcctggctaccggcttctaccccgaccatgtggaactgtcttggtgggtcaacggcaaagaggtgcacagcggcgtgtgtaccgacccccagccactgaaagaacagcccgccctgaacgacagccggtactgcctgagcagcagactgagagtgtccgccaccttctggcagaacccccggaaccacttcagatgccaggtgcagttctacggcctgagcgagaacgacgagtggacccaggacagagccaagcccgtgacccagatcgtgtctgccgaagcctggggcagagccgattgcggatcccagagcttcggcctgctggaccccaagctgtgctacctgctggatggcatcctgttcatctacggcgtgatcctgaccgccctgttcctgagagtgaagttcagcagaagcgccgacgcccctgcctaccagcagggacagaaccaactgtacaacgagctgaacctgggcagacgggaagagtacgacgtgctggacaagcggagaggcagggaccctgagatgggcggaaagccccagcggagaaagaacccccaggaaggactgtataacgaactccagaaagacaagatggccgaagcctacagcgagatcggcatgaagggcgagcggagaagaggcaagggccacgatggcctgtaccagggcctgagcaccgccaccaaggacacctatgacgccctgcacatgcaggccctgcctccaagaagggccaagcgatctggatctggagcaacaaacttctcactactcaaacaagcaggtgacgtggaggagaatcccgggcctactagtatggactggatttggcgcatccttttccttgtcggcgctgctaccggcgcccattccgggcccggcatgagaaccgaggacctgcctaaggccgtggtgttcctggaaccccagtggtacagagtgctggaaaaggacagcgtgaccctgaagtgccagggcgcctacagccccgaggacaatagcacccagtggttccacaacgagagcctgatctccagccaggccagcagctacttcatcgacgccgccaccgtggacgacagcggcgagtatagatgccagaccaacctgagcaccctgagcgaccccgtgcagctggaagtgcacatcggatggctgctgctgcaggcccccagatgggtgttcaaagaagaggaccccatccacctgagatgccactcttggaagaacaccgccctgcacaaagtgacctacctgcagaacggcaagggcagaaagtacttccaccacaacagcgacttctacatccccaaggccaccctgaaggactccggctcctacttctgcagaggcctcgtgggcagcaagaacgtgtccagcgagacagtgaacatcaccatcacccagggcctggccgtgtctaccatcagcagctttttcccacccggctaccagggatccggcggcggaggatctggcggaggcggatctgggggcggaggctctttcgaacaagttcagcttcaacagcctggcgctgagctggtcaaacctggcgcttctgtgaagatgagctgcaaagccagcggctacgccttcagcagctactggatcaactggatgaagcagaaacccggccagggactcgaatggatcggccaaatctatcccggcgacggcgacaccaactacaacggcaagttcaagggcagagccacactgaccgccgatacctctagcagcacagcctacatgcagctgagcagcctgaccagcgaagatagcgccgtgtacttctgtgcccggtccatcacaacagtcgtgggctgcgctatggactattggggccagggaacaagcgtgaccgtgtctagtacgcgtatccagaaccctgatcctgccgtgtaccagctgcgggatagcaagagcagcgacaagagcgtgtgtctgttcaccgacttcgacagccagaccaacgtgtcccagagcaaggactccgacgtgtacatcaccgataagtgcgtgctggacatgcggagcatggacttcaagagcaactccgccgtggcctggtccaacaagtccgatttcgcctgcgccaacgccttcaacaacagcattatccccgaggacacattcttcccaagcagcgacgtgccctgcggtacccagagttttgggttgttggaccctaaattgtgctatctgttggacggaatcctgttcatttacggagtgatcctgaccgcattgttcctgcgggttaagttttccagatccgcagacgcacccgcttaccaacaagggcagaaccaactctacaatgaacttaatttggggcggagggaagagtacgacgttctggacaaaaggaggggacgagatcccgagatgggcggaaagcctcagcgaaggaagaatccgcaagaggggctttataacgaactccagaaagataaaatggcagaagcctatagtgagattgggatgaagggagaaaggaggaggggtaaaggtcacgatgggttgtaccaaggattgagcacagccactaaagatacctatgatgcgctccacatgcaggccctgccgccaaga

SEQ ID NO: 4939 - DNA, 3933 bp, Artificial Sequence
  Synthetic Polynucloetide
atggccttaccagtgaccgccttgctcctgccgctggccttgctgctccacgccgccaggccgggcatgcggactgaagacctcccaaaggctgtggtgttcctggagcctcaatggtacagggtgctggagaaggacagtgtgactctgaagtgccagggagcctactcccctgaggacaattccacacagtggtttcacaatgagagcctcatctcaagccaggcctccagctacttcattgacgctgccacagtggacgacagtggagagtacaggtgccagacaaacctctccaccctcagtgacccggtgcagctagaagtccatatcggctggctgttgctccaggcccctcggtgggtgttcaaggaggaagaccctattcacctgaggtgtcacagctggaagaacactgctctgcataaggtcacatatttacagaatggcaaaggcaggaagtattttcatcataattctgacttctacattccaaaagccacactcaaagacagcggctcctacttctgcagggggcttgttgggagtaaaaatgtgtcttcagagactgtgaacatcaccatcactcaaggtttggcagtgtcaaccatctcatcattctttccacctggctaccaaggtaccggcggaggcggatctggcggcggaggtagcggtggcggaggatctgaattcgacatccagatgacacagagccctagcagcctgtctgccagcgtgggagacagagtgaccatcacatgcaaggccagcgaccacatcaacaactggctggcctggtatcagcagaagcctggacaggcccctaagctgctgatctacggcgctaccacactggaaacaggcgtgcccagcagattttctggcagcggctctggcaccgactacaccctgacaatatccagcctccagcctgaggacttcgccacctactactgtcagcagagctggaacaccccttggacattcggccagggcaccaagctggaaatcaagagactcgaggggaaaccaattcccaaccctcttctgggactggattcaaccggcagcggcgaggacctgaagaacgtgttcccacctgaggtggccgtgttcgagcctagcgaggccgagatcagccacacccagaaagccaccctcgtgtgcctggctaccggcttctaccccgaccatgtggaactgtcttggtgggtcaacggcaaagaggtgcacagcggcgtgtctaccgacccccagccactgaaagaacagcccgccctgaacgacagccggtactgcctgagcagcagactgagagtgtccgccaccttctggcagaacccccggaaccacttcagatgccaggtgcagttctacggcctgagcgagaacgacgagtggacccaggacagagccaagcccgtgacccagatcgtgtctgccgaagcctggggcagagccgattgcggatcccagagcttcggcctgctggaccccaagctgtgctacctgctggatggcatcctgttcatctacggcgtgatcctgaccgccctgttcctgagagtgaagttcagcagaagcgccgacgcccctgcctaccagcagggacagaaccaactgtacaacgagctgaacctgggcagacgggaagagtacgacgtgctggacaagcggagaggcagggaccctgagatgggcggaaagccccagcggagaaagaacccccaggaaggactgtataacgaactccagaaagacaagatggccgaagcctacagcgagatcggcatgaagggcgagcggagaagaggcaagggccacgatggcctgtaccagggcctgagcaccgccaccaaggacacctatgacgccctgcacatgcaggccctgcctccaagaagggccaagcgatctggatctggagcaacaaacttctcactactcaaacaagcaggtgacgtggaggagaatcccgggcctactagtatggactggatttggcgcatccttttccttgtcggcgctgctaccggcgcccattccgggcccggcatgagaaccgaggacctgcctaaggccgtggtgttcctggaaccccagtggtacagagtgctggaaaaggacagcgtgaccctgaagtgccagggcgcctacagccccgaggacaatagcacccagtggttccacaacgagagcctgatctccagccaggccagcagctacttcatcgacgccgccaccgtggacgacagcggcgagtatagatgccagaccaacctgagcaccctgagcgaccccgtgcagctggaagtgcacatcggatggctgctgctgcaggcccccagatgggtgttcaaagaagaggaccccatccacctgagatgccactcttggaagaacaccgccctgcacaaagtgacctacctgcagaacggcaagggcagaaagtacttccaccacaacagcgacttctacatccccaaggccaccctgaaggactccggctcctacttctgcagaggcctcgtgggcagcaagaacgtgtccagcgagacagtgaacatcaccatcacccagggcctggccgtgtctaccatcagcagctttttcccacccggctaccagggatccggcggcggaggatctggcggaggcggatctgggggcggaggctctttcgaacaagttcagcttcaacagcctggcgctgagctggtcaaacctggcgcttctgtgaagatgagctgcaaagccagcggctacgccttcagcagctactggatcaactggatgaagcagaaacccggccagggactcgaatggatcggccaaatctatcccggcgacggcgacaccaactacaacggcaagttcaagggcagagccacactgaccgccgatacctctagcagcacagcctacatgcagctgagcagcctgaccagcgaagatagcgccgtgtacttctgtgcccggtccatcacaacagtcgtgggctgcgctatggactattggggccagggaacaagcgtgaccgtgtctagtacgcgtgagcagaaactgatctcggaagaggatgggagcggcatccagaaccctgatcctgccgtgtaccagctgcgggatagcaagagcagcgacaagagcgtgtgtctgttcaccgacttcgacagccagaccaacgtgtcccagagcaaggactccgacgtgtacatcaccgataagaccgtgctggacatgcggagcatggacttcaagagcaactccgccgtggcctggtccaacaagtccgatttcgcctgcgccaacgccttcaacaacagcattatccccgaggacacattcttcccaagccccgagagcagctgcggtacccagagttttgggttgttggaccctaaattgtgctatctgttggacggaatcctgttcatttacggagtgatcctgaccgcattgttcctgaggagcaagcggtcacggctgctccacagcgattacatgaatatgacaccacgaagaccgggtcctactcgcaaacactaccaaccctacgcacctccccgcgactttgcagcgtaccgatctcgggttaagttttccagatccgcagacgcacccgcttaccaacaagggcagaaccaactctacaatgaacttaatttggggcggagggaagagtacgacgttctggacaaaaggaggggacgagatcccgagatgggcggaaagcctcagcgaaggaagaatccgcaagaggggctttataacgaactccagaaagataaaatggcagaagcctatagtgagattgggatgaagggagaaaggaggaggggtaaaggtcacgatgggttgtaccaaggattgagcacagccactaaagatacctatgatgcgctccacatgcaggccctgccgccaaga

SEQ ID NO: 4940 - DNA, 4056 bp, Artificial Sequence
  Synthetic Polynucloetide
atggccttaccagtgaccgccttgctcctgccgctggccttgctgctccacgccgccaggccgggcatgcggactgaagacctcccaaaggctgtggtgttcctggagcctcaatggtacagggtgctggagaaggacagtgtgactctgaagtgccagggagcctactcccctgaggacaattccacacagtggtttcacaatgagagcctcatctcaagccaggcctccagctacttcattgacgctgccacagtggacgacagtggagagtacaggtgccagacaaacctctccaccctcagtgacccggtgcagctagaagtccatatcggctggctgttgctccaggcccctcggtgggtgttcaaggaggaagaccctattcacctgaggtgtcacagctggaagaacactgctctgcataaggtcacatatttacagaatggcaaaggcaggaagtattttcatcataattctgacttctacattccaaaagccacactcaaagacagcggctcctacttctgcagggggcttgttgggagtaaaaatgtgtcttcagagactgtgaacatcaccatcactcaaggtttggcagtgtcaaccatctcatcattctttccacctggctaccaaggtaccggcggaggcggatctggcggcggaggtagcggtggcggaggatctgaattcgacatccagatgacacagagccctagcagcctgtctgccagcgtgggagacagagtgaccatcacatgcaaggccagcgaccacatcaacaactggctggcctggtatcagcagaagcctggacaggcccctaagctgctgatctacggcgctaccacactggaaacaggcgtgcccagcagattttctggcagcggctctggcaccgactacaccctgacaatatccagcctccagcctgaggacttcgccacctactactgtcagcagagctggaacaccccttggacattcggccagggcaccaagctggaaatcaagagactcgaggggaaaccaattcccaaccctcttctgggactggattcaaccggcagcggcgaggacctgaagaacgtgttcccacctgaggtggccgtgttcgagcctagcgaggccgagatcagccacacccagaaagccaccctcgtgtgcctggctaccggcttctaccccgaccatgtggaactgtcttggtgggtcaacggcaaagaggtgcacagcggcgtgtctaccgacccccagccactgaaagaacagcccgccctgaacgacagccggtactgcctgagcagcagactgagagtgtccgccaccttctggcagaacccccggaaccacttcagatgccaggtgcagttctacggcctgagcgagaacgacgagtggacccaggacagagccaagcccgtgacccagatcgtgtctgccgaagcctggggcagagccgattgcggatcccagagcttcggcctgctggaccccaagctgtgctacctgctggatggcatcctgttcatctacggcgtgatcctgaccgccctgttcctgaggagtaagaggagcaggctcctgcacagtgactacatgaacatgactccacgccgccccggacccacccgcaagcattaccagccctatgccccaccacgcgacttcgcagcctatcgctccagagtgaagttcagcagaagcgccgacgcccctgcctaccagcagggacagaaccaactgtacaacgagctgaacctgggcagacgggaagagtacgacgtgctggacaagcggagaggcagggaccctgagatgggcggaaagccccagcggagaaagaacccccaggaaggactgtataacgaactccagaaagacaagatggccgaagcctacagcgagatcggcatgaagggcgagcggagaagaggcaagggccacgatggcctgtaccagggcctgagcaccgccaccaaggacacctatgacgccctgcacatgcaggccctgcctccaagaagggccaagcgatctggatctggagcaacaaacttctcactactcaaacaagcaggtgacgtggaggagaatcccgggcctactagtatggactggatttggcgcatccttttccttgtcggcgctgctaccggcgcccattccgggcccggcatgagaaccgaggacctgcctaaggccgtggtgttcctggaaccccagtggtacagagtgctggaaaaggacagcgtgaccctgaagtgccagggcgcctacagccccgaggacaatagcacccagtggttccacaacgagagcctgatctccagccaggccagcagctacttcatcgacgccgccaccgtggacgacagcggcgagtatagatgccagaccaacctgagcaccctgagcgaccccgtgcagctggaagtgcacatcggatggctgctgctgcaggcccccagatgggtgttcaaagaagaggaccccatccacctgagatgccactcttggaagaacaccgccctgcacaaagtgacctacctgcagaacggcaagggcagaaagtacttccaccacaacagcgacttctacatccccaaggccaccctgaaggactccggctcctacttctgcagaggcctcgtgggcagcaagaacgtgtccagcgagacagtgaacatcaccatcacccagggcctggccgtgtctaccatcagcagctttttcccacccggctaccagggatccggcggcggaggatctggcggaggcggatctgggggcggaggctctttcgaacaagttcagcttcaacagcctggcgctgagctggtcaaacctggcgcttctgtgaagatgagctgcaaagccagcggctacgccttcagcagctactggatcaactggatgaagcagaaacccggccagggactcgaatggatcggccaaatctatcccggcgacggcgacaccaactacaacggcaagttcaagggcagagccacactgaccgccgatacctctagcagcacagcctacatgcagctgagcagcctgaccagcgaagatagcgccgtgtacttctgtgcccggtccatcacaacagtcgtgggctgcgctatggactattggggccagggaacaagcgtgaccgtgtctagtacgcgtgagcagaaactgatctcggaagaggatgggagcggcatccagaaccctgatcctgccgtgtaccagctgcgggatagcaagagcagcgacaagagcgtgtgtctgttcaccgacttcgacagccagaccaacgtgtcccagagcaaggactccgacgtgtacatcaccgataagaccgtgctggacatgcggagcatggacttcaagagcaactccgccgtggcctggtccaacaagtccgatttcgcctgcgccaacgccttcaacaacagcattatccccgaggacacattcttcccaagccccgagagcagctgcggtacccagagttttgggttgttggaccctaaattgtgctatctgttggacggaatcctgttcatttacggagtgatcctgaccgcattgttcctgaggagcaagcggtcacggctgctccacagcgattacatgaatatgacaccacgaagaccgggtcctactcgcaaacactaccaaccctacgcacctccccgcgactttgcagcgtaccgatctcgggttaagttttccagatccgcagacgcacccgcttaccaacaagggcagaaccaactctacaatgaacttaatttggggcggagggaagagtacgacgttctggacaaaaggaggggacgagatcccgagatgggcggaaagcctcagcgaaggaagaatccgcaagaggggctttataacgaactccagaaagataaaatggcagaagcctatagtgagattgggatgaagggagaaaggaggaggggtaaaggtcacgatgggttgtaccaaggattgagcacagccactaaagatacctatgatgcgctccacatgcaggccctgccgccaaga

SEQ ID NO: 4941 - DNA, 3939 bp, Artificial Sequence
  Synthetic Polynucloetide
atggccttaccagtgaccgccttgctcctgccgctggccttgctgctccacgccgccaggccgggcatgcggactgaagacctcccaaaggctgtggtgttcctggagcctcaatggtacagggtgctggagaaggacagtgtgactctgaagtgccagggagcctactcccctgaggacaattccacacagtggtttcacaatgagagcctcatctcaagccaggcctccagctacttcattgacgctgccacagtggacgacagtggagagtacaggtgccagacaaacctctccaccctcagtgacccggtgcagctagaagtccatatcggctggctgttgctccaggcccctcggtgggtgttcaaggaggaagaccctattcacctgaggtgtcacagctggaagaacactgctctgcataaggtcacatatttacagaatggcaaaggcaggaagtattttcatcataattctgacttctacattccaaaagccacactcaaagacagcggctcctacttctgcagggggcttgttgggagtaaaaatgtgtcttcagagactgtgaacatcaccatcactcaaggtttggcagtgtcaaccatctcatcattctttccacctggctaccaaggtaccggcggaggcggatctggcggcggaggtagcggtggcggaggatctgaattcgacatccagatgacacagagccctagcagcctgtctgccagcgtgggagacagagtgaccatcacatgcaaggccagcgaccacatcaacaactggctggcctggtatcagcagaagcctggacaggcccctaagctgctgatctacggcgctaccacactggaaacaggcgtgcccagcagattttctggcagcggctctggcaccgactacaccctgacaatatccagcctccagcctgaggacttcgccacctactactgtcagcagagctggaacaccccttggacattcggccagggcaccaagctggaaatcaagagactcgaggggaaaccaattcccaaccctcttctgggactggattcaaccggcagcggcgaggacctgaagaacgtgttcccacctgaggtggccgtgttcgagcctagcgaggccgagatcagccacacccagaaagccaccctcgtgtgcctggctaccggcttctaccccgaccatgtggaactgtcttggtgggtcaacggcaaagaggtgcacagcggcgtgtctaccgacccccagccactgaaagaacagcccgccctgaacgacagccggtactgcctgagcagcagactgagagtgtccgccaccttctggcagaacccccggaaccacttcagatgccaggtgcagttctacggcctgagcgagaacgacgagtggacccaggacagagccaagcccgtgacccagatcgtgtctgccgaagcctggggcagagccgattgcggatcccagagcttcggcctgctggaccccaagctgtgctacctgctggatggcatcctgttcatctacggcgtgatcctgaccgccctgttcctgagagtgaagttcagcagaagcgccgacgcccctgcctaccagcagggacagaaccaactgtacaacgagctgaacctgggcagacgggaagagtacgacgtgctggacaagcggagaggcagggaccctgagatgggcggaaagccccagcggagaaagaacccccaggaaggactgtataacgaactccagaaagacaagatggccgaagcctacagcgagatcggcatgaagggcgagcggagaagaggcaagggccacgatggcctgtaccagggcctgagcaccgccaccaaggacacctatgacgccctgcacatgcaggccctgcctccaagaagggccaagcgatctggatctggagcaacaaacttctcactactcaaacaagcaggtgacgtggaggagaatcccgggcctactagtatggactggatttggcgcatccttttccttgtcggcgctgctaccggcgcccattccgggcccggcatgagaaccgaggacctgcctaaggccgtggtgttcctggaaccccagtggtacagagtgctggaaaaggacagcgtgaccctgaagtgccagggcgcctacagccccgaggacaatagcacccagtggttccacaacgagagcctgatctccagccaggccagcagctacttcatcgacgccgccaccgtggacgacagcggcgagtatagatgccagaccaacctgagcaccctgagcgaccccgtgcagctggaagtgcacatcggatggctgctgctgcaggcccccagatgggtgttcaaagaagaggaccccatccacctgagatgccactcttggaagaacaccgccctgcacaaagtgacctacctgcagaacggcaagggcagaaagtacttccaccacaacagcgacttctacatccccaaggccaccctgaaggactccggctcctacttctgcagaggcctcgtgggcagcaagaacgtgtccagcgagacagtgaacatcaccatcacccagggcctggccgtgtctaccatcagcagctttttcccacccggctaccagggatccggcggcggaggatctggcggaggcggatctgggggcggaggctctttcgaacaagttcagcttcaacagcctggcgctgagctggtcaaacctggcgcttctgtgaagatgagctgcaaagccagcggctacgccttcagcagctactggatcaactggatgaagcagaaacccggccagggactcgaatggatcggccaaatctatcccggcgacggcgacaccaactacaacggcaagttcaagggcagagccacactgaccgccgatacctctagcagcacagcctacatgcagctgagcagcctgaccagcgaagatagcgccgtgtacttctgtgcccggtccatcacaacagtcgtgggctgcgctatggactattggggccagggaacaagcgtgaccgtgtctagtacgcgtgagcagaaactgatctcggaagaggatctggggagcggcatccagaaccctgatcctgccgtgtaccagctgcgggatagcaagagcagcgacaagagcgtgtgtctgttcaccgacttcgacagccagaccaacgtgtcccagagcaaggactccgacgtgtacatcaccgataagaccgtgctggacatgcggagcatggacttcaagagcaactccgccgtggcctggtccaacaagtccgatttcgcctgcgccaacgccttcaacaacagcattatccccgaggacacattcttcccaagccccgagagcagctgcggtacccagagttttgggttgttggaccctaaattgtgctatctgttggacggaatcctgttcatttacggagtgatcctgaccgcattgttcctgaagagaggccggaagaagctgctgtacatcttcaagcagcctttcatgcggcccgtgcagaccacccaggaagaggacggctgctcctgccggttccccgaggaagaagaaggcggctgcgagctgcgggttaagttttccagatccgcagacgcacccgcttaccaacaagggcagaaccaactctacaatgaacttaatttggggcggagggaagagtacgacgttctggacaaaaggaggggacgagatcccgagatgggcggaaagcctcagcgaaggaagaatccgcaagaggggctttataacgaactccagaaagataaaatggcagaagcctatagtgagattgggatgaagggagaaaggaggaggggtaaaggtcacgatgggttgtaccaaggattgagcacagccactaaagatacctatgatgcgctccacatgcaggccctgccgccaaga

SEQ ID NO: 4942 - DNA, 4065 bp, Artificial Sequence
  Synthetic Polynucloetide
atggccttaccagtgaccgccttgctcctgccgctggccttgctgctccacgccgccaggccgggcatgcggactgaagacctcccaaaggctgtggtgttcctggagcctcaatggtacagggtgctggagaaggacagtgtgactctgaagtgccagggagcctactcccctgaggacaattccacacagtggtttcacaatgagagcctcatctcaagccaggcctccagctacttcattgacgctgccacagtggacgacagtggagagtacaggtgccagacaaacctctccaccctcagtgacccggtgcagctagaagtccatatcggctggctgttgctccaggcccctcggtgggtgttcaaggaggaagaccctattcacctgaggtgtcacagctggaagaacactgctctgcataaggtcacatatttacagaatggcaaaggcaggaagtattttcatcataattctgacttctacattccaaaagccacactcaaagacagcggctcctacttctgcagggggcttgttgggagtaaaaatgtgtcttcagagactgtgaacatcaccatcactcaaggtttggcagtgtcaaccatctcatcattctttccacctggctaccaaggtaccggcggaggcggatctggcggcggaggtagcggtggcggaggatctgaattcgacatccagatgacacagagccctagcagcctgtctgccagcgtgggagacagagtgaccatcacatgcaaggccagcgaccacatcaacaactggctggcctggtatcagcagaagcctggacaggcccctaagctgctgatctacggcgctaccacactggaaacaggcgtgcccagcagattttctggcagcggctctggcaccgactacaccctgacaatatccagcctccagcctgaggacttcgccacctactactgtcagcagagctggaacaccccttggacattcggccagggcaccaagctggaaatcaagagactcgaggggaaaccaattcccaaccctcttctgggactggattcaaccggcagcggcgaggacctgaagaacgtgttcccacctgaggtggccgtgttcgagcctagcgaggccgagatcagccacacccagaaagccaccctcgtgtgcctggctaccggcttctaccccgaccatgtggaactgtcttggtgggtcaacggcaaagaggtgcacagcggcgtgtctaccgacccccagccactgaaagaacagcccgccctgaacgacagccggtactgcctgagcagcagactgagagtgtccgccaccttctggcagaacccccggaaccacttcagatgccaggtgcagttctacggcctgagcgagaacgacgagtggacccaggacagagccaagcccgtgacccagatcgtgtctgccgaagcctggggcagagccgattgcggatcccagagcttcggcctgctggaccccaagctgtgctacctgctggatggcatcctgttcatctacggcgtgatcctgaccgccctgttcctgaaacggggcagaaagaaactcctgtatatattcaaacaaccatttatgagaccagtacaaactactcaagaggaagatggctgtagctgccgatttccagaagaagaagaaggaggatgtgaactgagagtgaagttcagcagaagcgccgacgcccctgcctaccagcagggacagaaccaactgtacaacgagctgaacctgggcagacgggaagagtacgacgtgctggacaagcggagaggcagggaccctgagatgggcggaaagccccagcggagaaagaacccccaggaaggactgtataacgaactccagaaagacaagatggccgaagcctacagcgagatcggcatgaagggcgagcggagaagaggcaagggccacgatggcctgtaccagggcctgagcaccgccaccaaggacacctatgacgccctgcacatgcaggccctgcctccaagaagggccaagcgatctggatctggagcaacaaacttctcactactcaaacaagcaggtgacgtggaggagaatcccgggcctactagtatggactggatttggcgcatccttttccttgtcggcgctgctaccggcgcccattccgggcccggcatgagaaccgaggacctgcctaaggccgtggtgttcctggaaccccagtggtacagagtgctggaaaaggacagcgtgaccctgaagtgccagggcgcctacagccccgaggacaatagcacccagtggttccacaacgagagcctgatctccagccaggccagcagctacttcatcgacgccgccaccgtggacgacagcggcgagtatagatgccagaccaacctgagcaccctgagcgaccccgtgcagctggaagtgcacatcggatggctgctgctgcaggcccccagatgggtgttcaaagaagaggaccccatccacctgagatgccactcttggaagaacaccgccctgcacaaagtgacctacctgcagaacggcaagggcagaaagtacttccaccacaacagcgacttctacatccccaaggccaccctgaaggactccggctcctacttctgcagaggcctcgtgggcagcaagaacgtgtccagcgagacagtgaacatcaccatcacccagggcctggccgtgtctaccatcagcagctttttcccacccggctaccagggatccggcggcggaggatctggcggaggcggatctgggggcggaggctctttcgaacaagttcagcttcaacagcctggcgctgagctggtcaaacctggcgcttctgtgaagatgagctgcaaagccagcggctacgccttcagcagctactggatcaactggatgaagcagaaacccggccagggactcgaatggatcggccaaatctatcccggcgacggcgacaccaactacaacggcaagttcaagggcagagccacactgaccgccgatacctctagcagcacagcctacatgcagctgagcagcctgaccagcgaagatagcgccgtgtacttctgtgcccggtccatcacaacagtcgtgggctgcgctatggactattggggccagggaacaagcgtgaccgtgtctagtacgcgtgagcagaaactgatctcggaagaggatctggggagcggcatccagaaccctgatcctgccgtgtaccagctgcgggatagcaagagcagcgacaagagcgtgtgtctgttcaccgacttcgacagccagaccaacgtgtcccagagcaaggactccgacgtgtacatcaccgataagaccgtgctggacatgcggagcatggacttcaagagcaactccgccgtggcctggtccaacaagtccgatttcgcctgcgccaacgccttcaacaacagcattatccccgaggacacattcttcccaagccccgagagcagctgcggtacccagagttttgggttgttggaccctaaattgtgctatctgttggacggaatcctgttcatttacggagtgatcctgaccgcattgttcctgaagagaggccggaagaagctgctgtacatcttcaagcagcctttcatgcggcccgtgcagaccacccaggaagaggacggctgctcctgccggttccccgaggaagaagaaggcggctgcgagctgcgggttaagttttccagatccgcagacgcacccgcttaccaacaagggcagaaccaactctacaatgaacttaatttggggcggagggaagagtacgacgttctggacaaaaggaggggacgagatcccgagatgggcggaaagcctcagcgaaggaagaatccgcaagaggggctttataacgaactccagaaagataaaatggcagaagcctatagtgagattgggatgaagggagaaaggaggaggggtaaaggtcacgatgggttgtaccaaggattgagcacagccactaaagatacctatgatgcgctccacatgcaggccctgccgccaaga

SEQ ID NO: 4943 - DNA, 3738 bp, Artificial Sequence
  Synthetic Polynucloetide
atggccttaccagtgaccgccttgctcctgccgctggccttgctgctccacgccgccaggccgggcatgcggactgaagacctcccaaaggctgtggtgttcctggagcctcaatggtacagggtgctggagaaggacagtgtgactctgaagtgccagggagcctactcccctgaggacaattccacacagtggtttcacaatgagagcctcatctcaagccaggcctccagctacttcattgacgctgccacagtggacgacagtggagagtacaggtgccagacaaacctctccaccctcagtgacccggtgcagctagaagtccatatcggctggctgttgctccaggcccctcggtgggtgttcaaggaggaagaccctattcacctgaggtgtcacagctggaagaacactgctctgcataaggtcacatatttacagaatggcaaaggcaggaagtattttcatcataattctgacttctacattccaaaagccacactcaaagacagcggctcctacttctgcagggggcttgttgggagtaaaaatgtgtcttcagagactgtgaacatcaccatcactcaaggtttggcagtgtcaaccatctcatcattctttccacctggctaccaaggtaccggcggaggcggatctggcggcggaggtagcggtggcggaggatctgaattcgacatccagatgacacagagccctagcagcctgtctgccagcgtgggagacagagtgaccatcacatgcaaggccagcgaccacatcaacaactggctggcctggtatcagcagaagcctggacaggcccctaagctgctgatctacggcgctaccacactggaaacaggcgtgcccagcagattttctggcagcggctctggcaccgactacaccctgacaatatccagcctccagcctgaggacttcgccacctactactgtcagcagagctggaacaccccttggacattcggccagggcaccaagctggaaatcaagagactcgagcagagcttcggcctgctggaccccaagctgtgctacctgctggatggcatcctgttcatctacggcgtgatcctgaccgccctgttcctgagagtgaagttcagcagaagcgccgacgcccctgcctaccagcagggacagaaccaactgtacaacgagctgaacctgggcagacgggaagagtacgacgtgctggacaagcggagaggcagggaccctgagatgggcggaaagccccagcggagaaagaacccccaggaaggactgtataacgaactccagaaagacaagatggccgaagcctacagcgagatcggcatgaagggcgagcggagaagaggcaagggccacgatggcctgtaccagggcctgagcaccgccaccaaggacacctatgacgccctgcacatgcaggccctgcctccaagaagggccaagcgatctggatctggagcaacaaacttctcactactcaaacaagcaggtgacgtggaggagaatcccgggcctactagtatggactggatttggcgcatccttttccttgtcggcgctgctaccggcgcccattccgggcccggcatgagaaccgaggacctgcctaaggccgtggtgttcctggaaccccagtggtacagagtgctggaaaaggacagcgtgaccctgaagtgccagggcgcctacagccccgaggacaatagcacccagtggttccacaacgagagcctgatctccagccaggccagcagctacttcatcgacgccgccaccgtggacgacagcggcgagtatagatgccagaccaacctgagcaccctgagcgaccccgtgcagctggaagtgcacatcggatggctgctgctgcaggcccccagatgggtgttcaaagaagaggaccccatccacctgagatgccactcttggaagaacaccgccctgcacaaagtgacctacctgcagaacggcaagggcagaaagtacttccaccacaacagcgacttctacatccccaaggccaccctgaaggactccggctcctacttctgcagaggcctcgtgggcagcaagaacgtgtccagcgagacagtgaacatcaccatcacccagggcctggccgtgtctaccatcagcagctttttcccacccggctaccagggatccggcggcggaggatctggcggaggcggatctgggggcggaggctctttcgaacaagttcagcttcaacagcctggcgctgagctggtcaaacctggcgcttctgtgaagatgagctgcaaagccagcggctacgccttcagcagctactggatcaactggatgaagcagaaacccggccagggactcgaatggatcggccaaatctatcccggcgacggcgacaccaactacaacggcaagttcaagggcagagccacactgaccgccgatacctctagcagcacagcctacatgcagctgagcagcctgaccagcgaagatagcgccgtgtacttctgtgcccggtccatcacaacagtcgtgggctgcgctatggactattggggccagggaacaagcgtgaccgtgtctagtacgcgtcagagttttgggttgttggaccctaaattgtgctatctgttggacggaatcctgttcatttacggagtgatcctgaccgcattgttcctgcgggttaagttttccagatccgcagacgcacccgcttaccaacaagggcagaaccaactctacaatgaacttaatttggggcggagggaagagtacgacgttctggacaaaaggaggggacgagatcccgagatgggcggaaagcctcagcgaaggaagaatccgcaagaggggctttataacgaactccagaaagataaaatggcagaagcctatagtgagattgggatgaagggagaaaggaggaggggtaaaggtcacgatgggttgtaccaaggattgagcacagccactaaagatacctatgatgcgctccacatgcaggccctgccgccaagacgcgccaagagaagcggatctggcgtgaagcagaccctgaatttcgacctgctgaagctggctggcgacgtggaatccaacccaggcccttctagaggccatatgaccgagtacaagcccacggtgcgcctcgccacccgcgacgacgtccccagggccgtacgcaccctcgccgccgcgttcgccgactaccccgccacgcgccacaccgtcgatccggaccgccacatcgagcgggtcaccgagctgcaagaactcttcctcacgcgcgtcgggctcgacatcggcaaggtgtgggtcgcggacgacggcgccgcggtggcggtctggaccacgccggagagcgtcgaagcgggggcggtgttcgccgagatcggcccgcgcatggccgagttgagcggttcccggctggccgcgcagcaacagatggaaggcctcctggcgccgcaccggcccaaggagcccgcgtggttcctggccaccgtcggcgtctcgcccgaccaccagggcaagggtctgggcagcgccgtcgtgctccccggagtggaggcggccgagcgcgccggggtgcccgccttcctggagacctccgcgccccgcaacctccccttctacgagcggctcggcttcaccgtcaccgccgacgtcgaggtgcccgaaggaccgcgcacctggtgcatgacccgcaagcccggtgcctga

SEQ ID NO: 4944 - DNA, 3210 bp, Artificial Sequence
  Synthetic Polynucloetide
atggccttaccagtgaccgccttgctcctgccgctggccttgctgctccacgccgccaggccgggcatgcggactgaagacctcccaaaggctgtggtgttcctggagcctcaatggtacagggtgctggagaaggacagtgtgactctgaagtgccagggagcctactcccctgaggacaattccacacagtggtttcacaatgagagcctcatctcaagccaggcctccagctacttcattgacgctgccacagtggacgacagtggagagtacaggtgccagacaaacctctccaccctcagtgacccggtgcagctagaagtccatatcggctggctgttgctccaggcccctcggtgggtgttcaaggaggaagaccctattcacctgaggtgtcacagctggaagaacactgctctgcataaggtcacatatttacagaatggcaaaggcaggaagtattttcatcataattctgacttctacattccaaaagccacactcaaagacagcggctcctacttctgcagggggcttgttgggagtaaaaatgtgtcttcagagactgtgaacatcaccatcactcaaggtttggcagtgtcaaccatctcatcattctttccacctggctaccaaggtaccggcggaggcggatctggcggcggaggtagcggtggcggaggatctgaattcgacatccagatgacacagagccctagcagcctgtctgccagcgtgggagacagagtgaccatcacatgcaaggccagcgaccacatcaacaactggctggcctggtatcagcagaagcctggacaggcccctaagctgctgatctacggcgctaccacactggaaacaggcgtgcccagcagattttctggcagcggctctggcaccgactacaccctgacaatatccagcctccagcctgaggacttcgccacctactactgtcagcagagctggaacaccccttggacattcggccagggcaccaagctggaaatcaagagactcgagggacagcctaaggccaatcctaccgtgacactgttccctccaagcagcgaagaactccaggccaacaaggccacacttgtgtgcctgatctccgacttctaccctggggctgtgacagtggcttggaaggccgatggatctcctgtgaaagccggcgtggaaaccaccaagccatccaagcagagcaacaacaaatacgccgccagctcctacctgagcctgacacctgagcagtggaagtcccacagatcctacagctgccaagtgacccacgaaggcagcaccgtggaaaagacagtggcccctacagagtgcagccccatcaagaccgatgtgattacaatggaccccaaggacaactgctccaaggacgccaacgataccctgctgctccagctgaccaacaccagcgcctactacatgtacttgttgctgctgctgaagtccgtggtgtacttcgccatcatcacatgctgcctgctgcggagaaccgccttctgctgcaacggcgagaagtctagggccaagcgatctggatctggagcaacaaacttctcactactcaaacaagcaggtgacgtggaggagaatcccgggcctactagtatggactggatttggcgcatccttttccttgtcggcgctgctaccggcgcccattccgggcccggcatgagaaccgaggacctgcctaaggccgtggtgttcctggaaccccagtggtacagagtgctggaaaaggacagcgtgaccctgaagtgccagggcgcctacagccccgaggacaatagcacccagtggttccacaacgagagcctgatctccagccaggccagcagctacttcatcgacgccgccaccgtggacgacagcggcgagtatagatgccagaccaacctgagcaccctgagcgaccccgtgcagctggaagtgcacatcggatggctgctgctgcaggcccccagatgggtgttcaaagaagaggaccccatccacctgagatgccactcttggaagaacaccgccctgcacaaagtgacctacctgcagaacggcaagggcagaaagtacttccaccacaacagcgacttctacatccccaaggccaccctgaaggactccggctcctacttctgcagaggcctcgtgggcagcaagaacgtgtccagcgagacagtgaacatcaccatcacccagggcctggccgtgtctaccatcagcagctttttcccacccggctaccagggatccggcggcggaggatctggcggaggcggatctgggggcggaggctctttcgaacaagttcagcttcaacagcctggcgctgagctggtcaaacctggcgcttctgtgaagatgagctgcaaagccagcggctacgccttcagcagctactggatcaactggatgaagcagaaacccggccagggactcgaatggatcggccaaatctatcccggcgacggcgacaccaactacaacggcaagttcaagggcagagccacactgaccgccgatacctctagcagcacagcctacatgcagctgagcagcctgaccagcgaagatagcgccgtgtacttctgtgcccggtccatcacaacagtcgtgggctgcgctatggactattggggccagggaacaagcgtgaccgtgtctagtacgcgtgcctctacaaagggaccctccgtgtttcctctggctcccagcagcaagtctacaagcggaggaacagccgctctgggctgcctggtcaaggattactttcccgagcctgtgaccgtgtcctggaatagcggagcactgacaagcggcgtgcacacctttccagccgtgctgcaaagcagcggcctgtactctctgagcagcgtggtcacagtgcctagctctagcctgggcacccagacctacatctgcaatgtgaaccacaagcctagcaacaccaaggtggacaagagagtggaacccaagagctgtgaagtgaaaaccgactccaccgaccacgtgaagcccaaagagacagagaacaccaagcagcccagcaagagctgccacaagcccaaggccatcgtgcacaccgagaaagtgaacatgatgagcctgaccgtgctgggcctgcggatgctgttcgccaaaaccgtggccgtgaacttcctgctgaccgccaagctgttcttcctc

SEQ ID NO: 4945 - DNA, 3144 bp, Artificial Sequence
  Synthetic Polynucloetide
atggccttaccagtgaccgccttgctcctgccgctggccttgctgctccacgccgccaggccgggcatgcggactgaagacctcccaaaggctgtggtgttcctggagcctcaatggtacagggtgctggagaaggacagtgtgactctgaagtgccagggagcctactcccctgaggacaattccacacagtggtttcacaatgagagcctcatctcaagccaggcctccagctacttcattgacgctgccacagtggacgacagtggagagtacaggtgccagacaaacctctccaccctcagtgacccggtgcagctagaagtccatatcggctggctgttgctccaggcccctcggtgggtgttcaaggaggaagaccctattcacctgaggtgtcacagctggaagaacactgctctgcataaggtcacatatttacagaatggcaaaggcaggaagtattttcatcataattctgacttctacattccaaaagccacactcaaagacagcggctcctacttctgcagggggcttgttgggagtaaaaatgtgtcttcagagactgtgaacatcaccatcactcaaggtttggcagtgtcaaccatctcatcattctttccacctggctaccaaggtaccggcggaggcggatctggcggcggaggtagcggtggcggaggatctgaattcgacatccagatgacacagagccctagcagcctgtctgccagcgtgggagacagagtgaccatcacatgcaaggccagcgaccacatcaacaactggctggcctggtatcagcagaagcctggacaggcccctaagctgctgatctacggcgctaccacactggaaacaggcgtgcccagcagattttctggcagcggctctggcaccgactacaccctgacaatatccagcctccagcctgaggacttcgccacctactactgtcagcagagctggaacaccccttggacattcggccagggcaccaagctggaaatcaagagactcgagggacagcctaaggccaatcctaccgtgacactgttccctccaagcagcgaagaactccaggccaacaaggccacacttgtgtgcctgatctccgacttctaccctggggctgtgacagtggcttggaaggccgatggatctcctgtgaaagccggcgtggaaaccaccaagccatccaagcagagcaacaacaaatacgccgccagctcctacctgagcctgacacctgagcagtggaagtcccacagatcctacagctgccaagtgacccacgaaggcagcaccgtggaaaagacagtggcccctacagagtgcagcggcagagccgattgcggcatcaccagcgccagctaccaccagggcgtgctgagcgccaccatcctgtacgagatcctgctgggcaaggccaccctgtacgccgtgctggtgtctgccctggtgctgatggctatggtcaagcggaaggacagccggggaagggccaagcgatctggatctggagcaacaaacttctcactactcaaacaagcaggtgacgtggaggagaatcccgggcctactagtatggactggatttggcgcatccttttccttgtcggcgctgctaccggcgcccattccgggcccggcatgagaaccgaggacctgcctaaggccgtggtgttcctggaaccccagtggtacagagtgctggaaaaggacagcgtgaccctgaagtgccagggcgcctacagccccgaggacaatagcacccagtggttccacaacgagagcctgatctccagccaggccagcagctacttcatcgacgccgccaccgtggacgacagcggcgagtatagatgccagaccaacctgagcaccctgagcgaccccgtgcagctggaagtgcacatcggatggctgctgctgcaggcccccagatgggtgttcaaagaagaggaccccatccacctgagatgccactcttggaagaacaccgccctgcacaaagtgacctacctgcagaacggcaagggcagaaagtacttccaccacaacagcgacttctacatccccaaggccaccctgaaggactccggctcctacttctgcagaggcctcgtgggcagcaagaacgtgtccagcgagacagtgaacatcaccatcacccagggcctggccgtgtctaccatcagcagctttttcccacccggctaccagggatccggcggcggaggatctggcggaggcggatctgggggcggaggctctttcgaacaagttcagcttcaacagcctggcgctgagctggtcaaacctggcgcttctgtgaagatgagctgcaaagccagcggctacgccttcagcagctactggatcaactggatgaagcagaaacccggccagggactcgaatggatcggccaaatctatcccggcgacggcgacaccaactacaacggcaagttcaagggcagagccacactgaccgccgatacctctagcagcacagcctacatgcagctgagcagcctgaccagcgaagatagcgccgtgtacttctgtgcccggtccatcacaacagtcgtgggctgcgctatggactattggggccagggaacaagcgtgaccgtgtctagtacgcgtgcctctacaaagggaccctccgtgtttcctctggctcccagcagcaagtctacaagcggaggaacagccgctctgggctgcctggtcaaggattactttcccgagcctgtgaccgtgtcctggaatagcggagcactgacaagcggcgtgcacacctttccagccgtgctgcaaagcagcggcctgtactctctgagcagcgtggtcacagtgcctagctctagcctgggcacccagacctacatctgcaatgtgaaccacaagcctagcaacaccaaggtggacaagagagtggaacccaagagctgtatccccgaggacacattcttcccaagcagcgacgtgccctgcgacgtgaagctggtggaaaagagcttcgagacagacaccaacctgaacttccagaacctgagcgtgatcggcttcagaatcctgctgctgaaagtggccggctttaacctgctgatgaccctgcggctgtggtccagc

SEQ ID NO: 4946 - DNA, 3144 bp, Artificial Sequence
  Synthetic Polynucloetide
atggccttaccagtgaccgccttgctcctgccgctggccttgctgctccacgccgccaggccgggcatgcggactgaagacctcccaaaggctgtggtgttcctggagcctcaatggtacagggtgctggagaaggacagtgtgactctgaagtgccagggagcctactcccctgaggacaattccacacagtggtttcacaatgagagcctcatctcaagccaggcctccagctacttcattgacgctgccacagtggacgacagtggagagtacaggtgccagacaaacctctccaccctcagtgacccggtgcagctagaagtccatatcggctggctgttgctccaggcccctcggtgggtgttcaaggaggaagaccctattcacctgaggtgtcacagctggaagaacactgctctgcataaggtcacatatttacagaatggcaaaggcaggaagtattttcatcataattctgacttctacattccaaaagccacactcaaagacagcggctcctacttctgcagggggcttgttgggagtaaaaatgtgtcttcagagactgtgaacatcaccatcactcaaggtttggcagtgtcaaccatctcatcattctttccacctggctaccaaggtaccggcggaggcggatctggcggcggaggtagcggtggcggaggatctgaattcgacatccagatgacacagagccctagcagcctgtctgccagcgtgggagacagagtgaccatcacatgcaaggccagcgaccacatcaacaactggctggcctggtatcagcagaagcctggacaggcccctaagctgctgatctacggcgctaccacactggaaacaggcgtgcccagcagattttctggcagcggctctggcaccgactacaccctgacaatatccagcctccagcctgaggacttcgccacctactactgtcagcagagctggaacaccccttggacattcggccagggcaccaagctggaaatcaagagactcgagggacagcctaaggccaatcctaccgtgacactgttccctccaagcagcgaagaactccaggccaacaaggccacacttgtgtgcctgatctccgacttctaccctggggctgtgacagtggcttggaaggccgatggatctcctgtgaaagccggcgtggaaaccaccaagccatccaagcagagcaacaacaaatacgccgccagctcctacctgagcctgacacctgagcagtggaagtcccacagatcctacagctgccaagtgacccacgaaggcagcaccgtggaaaagacagtggcccctacagagtgcagcggcagagccgattgcggctttaccagcgagagctaccagcagggcgtgctgagcgccaccatcctgtacgagatcctgctgggcaaggccaccctgtacgccgtgctggtgtctgccctggtgctgatggctatggtcaagcggaaggacagccggggaagggccaagcgatctggatctggagcaacaaacttctcactactcaaacaagcaggtgacgtggaggagaatcccgggcctactagtatggactggatttggcgcatccttttccttgtcggcgctgctaccggcgcccattccgggcccggcatgagaaccgaggacctgcctaaggccgtggtgttcctggaaccccagtggtacagagtgctggaaaaggacagcgtgaccctgaagtgccagggcgcctacagccccgaggacaatagcacccagtggttccacaacgagagcctgatctccagccaggccagcagctacttcatcgacgccgccaccgtggacgacagcggcgagtatagatgccagaccaacctgagcaccctgagcgaccccgtgcagctggaagtgcacatcggatggctgctgctgcaggcccccagatgggtgttcaaagaagaggaccccatccacctgagatgccactcttggaagaacaccgccctgcacaaagtgacctacctgcagaacggcaagggcagaaagtacttccaccacaacagcgacttctacatccccaaggccaccctgaaggactccggctcctacttctgcagaggcctcgtgggcagcaagaacgtgtccagcgagacagtgaacatcaccatcacccagggcctggccgtgtctaccatcagcagctttttcccacccggctaccagggatccggcggcggaggatctggcggaggcggatctgggggcggaggctctttcgaacaagttcagcttcaacagcctggcgctgagctggtcaaacctggcgcttctgtgaagatgagctgcaaagccagcggctacgccttcagcagctactggatcaactggatgaagcagaaacccggccagggactcgaatggatcggccaaatctatcccggcgacggcgacaccaactacaacggcaagttcaagggcagagccacactgaccgccgatacctctagcagcacagcctacatgcagctgagcagcctgaccagcgaagatagcgccgtgtacttctgtgcccggtccatcacaacagtcgtgggctgcgctatggactattggggccagggaacaagcgtgaccgtgtctagtacgcgtgcctctacaaagggaccctccgtgtttcctctggctcccagcagcaagtctacaagcggaggaacagccgctctgggctgcctggtcaaggattactttcccgagcctgtgaccgtgtcctggaatagcggagcactgacaagcggcgtgcacacctttccagccgtgctgcaaagcagcggcctgtactctctgagcagcgtggtcacagtgcctagctctagcctgggcacccagacctacatctgcaatgtgaaccacaagcctagcaacaccaaggtggacaagagagtggaacccaagagctgtatccccgaggacacattcttcccaagccccgagagcagctgcgacgtgaagctggtggaaaagagcttcgagacagacaccaacctgaacttccagaacctgagcgtgatcggcttcagaatcctgctgctgaaagtggccggctttaacctgctgatgaccctgcggctgtggtccagc

SEQ ID NO: 4947 - DNA, 3045 bp, Artificial Sequence
  Synthetic Polynucloetide
atggccttaccagtgaccgccttgctcctgccgctggccttgctgctccacgccgccaggccgggcatgcggactgaagacctcccaaaggctgtggtgttcctggagcctcaatggtacagggtgctggagaaggacagtgtgactctgaagtgccagggagcctactcccctgaggacaattccacacagtggtttcacaatgagagcctcatctcaagccaggcctccagctacttcattgacgctgccacagtggacgacagtggagagtacaggtgccagacaaacctctccaccctcagtgacccggtgcagctagaagtccatatcggctggctgttgctccaggcccctcggtgggtgttcaaggaggaagaccctattcacctgaggtgtcacagctggaagaacactgctctgcataaggtcacatatttacagaatggcaaaggcaggaagtattttcatcataattctgacttctacattccaaaagccacactcaaagacagcggctcctacttctgcagggggcttgttgggagtaaaaatgtgtcttcagagactgtgaacatcaccatcactcaaggtttggcagtgtcaaccatctcatcattctttccacctggctaccaactcgagggacagcctaaggccaatcctaccgtgacactgttccctccaagcagcgaagaactccaggccaacaaggccacacttgtgtgcctgatctccgacttctaccctggggctgtgacagtggcttggaaggccgatggatctcctgtgaaagccggcgtggaaaccaccaagccatccaagcagagcaacaacaaatacgccgccagctcctacctgagcctgacacctgagcagtggaagtcccacagatcctacagctgccaagtgacccacgaaggcagcaccgtggaaaagacagtggcccctacagagtgcagcggcagagccgattgcggctttaccagcgagagctaccagcagggcgtgctgagcgccaccatcctgtacgagatcctgctgggcaaggccaccctgtacgccgtgctggtgtctgccctggtgctgatggctatggtcaagcggaaggacagccggggaagggccaagcgatctggatctggagcaacaaacttctcactactcaaacaagcaggtgacgtggaggagaatcccgggcctactagtatggactggatttggcgcatccttttccttgtcggcgctgctaccggcgcgcattccgggcccggcatgagaaccgaggacctgcctaaggccgtggtgttcctggaaccccagtggtacagagtgctggaaaaggacagcgtgaccctgaagtgccagggcgcctacagccccgaggacaatagcacccagtggttccacaacgagagcctgatctccagccaggccagcagctacttcatcgacgccgccaccgtggacgacagcggcgagtatagatgccagaccaacctgagcaccctgagcgaccccgtgcagctggaagtgcacatcggatggctgctgctgcaggcccccagatgggtgttcaaagaagaggaccccatccacctgagatgccactcttggaagaacaccgccctgcacaaagtgacctacctgcagaacggcaagggcagaaagtacttccaccacaacagcgacttctacatccccaaggccaccctgaaggactccggctcctacttctgcagaggcctcgtgggcagcaagaacgtgtccagcgagacagtgaacatcaccatcacccagggcctggccgtgtctaccatcagcagctttttcccacccggctaccagacgcgtgcctctacaaagggaccctccgtgtttcctctggctcccagcagcaagtctacaagcggaggaacagccgctctgggctgcctggtcaaggattactttcccgagcctgtgaccgtgtcctggaatagcggagcactgacaagcggcgtgcacacctttccagccgtgctgcaaagcagcggcctgtactctctgagcagcgtggtcacagtgcctagctctagcctgggcacccagacctacatctgcaatgtgaaccacaagcctagcaacaccaaggtggacaagagagtggaacccaagagctgtatccccgaggacacattcttcccaagccccgagagcagctgcgacgtgaagctggtggaaaagagcttcgagacagacaccaacctgaacttccagaacctgagcgtgatcggcttcagaatcctgctgctgaaagtggccggctttaacctgctgatgaccctgcggctgtggtccagccgcgccaagagaagcggatctggcgtgaagcagaccctgaatttcgacctgctgaagctggctggcgacgtggaatccaacccaggcccttctagaggccatatgaccgagtacaagcccacggtgcgcctcgccacccgcgacgacgtccccagggccgtacgcaccctcgccgccgcgttcgccgactaccccgccacgcgccacaccgtcgatccggaccgccacatcgagcgggtcaccgagctgcaagaactcttcctcacgcgcgtcgggctcgacatcggcaaggtgtgggtcgcggacgacggcgccgcggtggcggtctggaccacgccggagagcgtcgaagcgggggcggtgttcgccgagatcggcccgcgcatggccgagttgagcggttcccggctggccgcgcagcaacagatggaaggcctcctggcgccgcaccggcccaaggagcccgcgtggttcctggccaccgtcggcgtctcgcccgaccaccagggcaagggtctgggcagcgccgtcgtgctccccggagtggaggcggccgagcgcgccggggtgcccgccttcctggagacctccgcgccccgcaacctccccttctacgagcggctcggcttcaccgtcaccgccgacgtcgaggtgcccgaaggaccgcgcacctggtgcatgacccgcaagcccggtgcctga

SEQ ID NO: 4948 - DNA, 2343 bp, Artificial Sequence
  Synthetic Polynucloetide
atggccttaccagtgaccgccttgctcctgccgctggccttgctgctccacgccgccaggccgggcatgcggactgaagacctcccaaaggctgtggtgttcctggagcctcaatggtacagggtgctggagaaggacagtgtgactctgaagtgccagggagcctactcccctgaggacaattccacacagtggtttcacaatgagagcctcatctcaagccaggcctccagctacttcattgacgctgccacagtggacgacagtggagagtacaggtgccagacaaacctctccaccctcagtgacccggtgcagctagaagtccatatcggctggctgttgctccaggcccctcggtgggtgttcaaggaggaagaccctattcacctgaggtgtcacagctggaagaacactgctctgcataaggtcacatatttacagaatggcaaaggcaggaagtattttcatcataattctgacttctacattccaaaagccacactcaaagacagcggctcctacttctgcagggggcttgttgggagtaaaaatgtgtcttcagagactgtgaacatcaccatcactcaaggtttggcagtgtcaaccatctcatcattctttccacctggctaccaactcgagggacagcctaaggccaatcctaccgtgacactgttccctccaagcagcgaagaactccaggccaacaaggccacacttgtgtgcctgatctccgacttctaccctggggctgtgacagtggcttggaaggccgatggatctcctgtgaaagccggcgtggaaaccaccaagccatccaagcagagcaacaacaaatacgccgccagctcctacctgagcctgacacctgagcagtggaagtcccacagatcctacagctgccaagtgacccacgaaggcagcaccgtggaaaagacagtggcccctacagagtgcagcggcagagccgattgcggctttaccagcgagagctaccagcagggcgtgctgagcgccaccatcctgtacgagatcctgctgggcaaggccaccctgtacgccgtgctggtgtctgccctggtgctgatggctatggtcaagcggaaggacagccggggaagggccaagcgatctggatctggagcaacaaacttctcactactcaaacaagcaggtgacgtggaggagaatcccgggcctactagtatggactggatttggcgcatccttttccttgtcggcgctgctaccggcgcgcattccgggcccggcatgagaaccgaggacctgcctaaggccgtggtgttcctggaaccccagtggtacagagtgctggaaaaggacagcgtgaccctgaagtgccagggcgcctacagccccgaggacaatagcacccagtggttccacaacgagagcctgatctccagccaggccagcagctacttcatcgacgccgccaccgtggacgacagcggcgagtatagatgccagaccaacctgagcaccctgagcgaccccgtgcagctggaagtgcacatcggatggctgctgctgcaggcccccagatgggtgttcaaagaagaggaccccatccacctgagatgccactcttggaagaacaccgccctgcacaaagtgacctacctgcagaacggcaagggcagaaagtacttccaccacaacagcgacttctacatccccaaggccaccctgaaggactccggctcctacttctgcagaggcctcgtgggcagcaagaacgtgtccagcgagacagtgaacatcaccatcacccagggcctggccgtgtctaccatcagcagctttttcccacccggctaccagacgcgtgcctctacaaagggaccctccgtgtttcctctggctcccagcagcaagtctacaagcggaggaacagccgctctgggctgcctggtcaaggattactttcccgagcctgtgaccgtgtcctggaatagcggagcactgacaagcggcgtgcacacctttccagccgtgctgcaaagcagcggcctgtactctctgagcagcgtggtcacagtgcctagctctagcctgggcacccagacctacatctgcaatgtgaaccacaagcctagcaacaccaaggtggacaagagagtggaacccaagagctgtatccccgaggacacattcttcccaagccccgagagcagctgcgacgtgaagctggtggaaaagagcttcgagacagacaccaacctgaacttccagaacctgagcgtgatcggcttcagaatcctgctgctgaaagtggccggctttaacctgctgatgaccctgcggctgtggtccagc

SEQ ID NO: 4949 - DNA, 2430 bp, Artificial Sequence
  Synthetic Polynucloetide
atggccttaccagtgaccgccttgctcctgccgctggccttgctgctccacgccgccaggccgggcatgcggactgaagacctcccaaaggctgtggtgttcctggagcctcaatggtacagggtgctggagaaggacagtgtgactctgaagtgccagggagcctactcccctgaggacaattccacacagtggtttcacaatgagagcctcatctcaagccaggcctccagctacttcattgacgctgccacagtggacgacagtggagagtacaggtgccagacaaacctctccaccctcagtgacccggtgcagctagaagtccatatcggctggctgttgctccaggcccctcggtgggtgttcaaggaggaagaccctattcacctgaggtgtcacagctggaagaacactgctctgcataaggtcacatatttacagaatggcaaaggcaggaagtattttcatcataattctgacttctacattccaaaagccacactcaaagacagcggctcctacttctgcagggggcttgttgggagtaaaaatgtgtcttcagagactgtgaacatcaccatcactcaaggtttggcagtgtcaaccatctcatcattctttccacctggctaccaactcgagggatctggcagagccgattgcggctttaccagcgagagctaccagcagggcgtgctgagcgccaccatcctgtacgagatcctgctgggcaaggccaccctgtacgccgtgctggtgtctgccctggtgctgatggctatggtcaagcggaaggacagccggggaagggccaagcgatctggatctggagcaacaaacttctcactactcaaacaagcaggtgacgtggaggagaatcccgggcctactagtatggactggatttggcgcatccttttccttgtcggcgctgctaccggcgcgcattccgggcccggcatgagaaccgaggacctgcctaaggccgtggtgttcctggaaccccagtggtacagagtgctggaaaaggacagcgtgaccctgaagtgccagggcgcctacagccccgaggacaatagcacccagtggttccacaacgagagcctgatctccagccaggccagcagctacttcatcgacgccgccaccgtggacgacagcggcgagtatagatgccagaccaacctgagcaccctgagcgaccccgtgcagctggaagtgcacatcggatggctgctgctgcaggcccccagatgggtgttcaaagaagaggaccccatccacctgagatgccactcttggaagaacaccgccctgcacaaagtgacctacctgcagaacggcaagggcagaaagtacttccaccacaacagcgacttctacatccccaaggccaccctgaaggactccggctcctacttctgcagaggcctcgtgggcagcaagaacgtgtccagcgagacagtgaacatcaccatcacccagggcctggccgtgtctaccatcagcagctttttcccacccggctaccagacgcgtggcagcatccccgaggacacattcttcccaagccccgagagcagctgcgacgtgaagctggtggaaaagagcttcgagacagacaccaacctgaacttccagaacctgagcgtgatcggcttcagaatcctgctgctgaaagtggccggctttaacctgctgatgaccctgcggctgtggtccagccgcgccaagagaagcggatctggcgtgaagcagaccctgaatttcgacctgctgaagctggctggcgacgtggaatccaacccaggcccttctagaggccatatgaccgagtacaagcccacggtgcgcctcgccacccgcgacgacgtccccagggccgtacgcaccctcgccgccgcgttcgccgactaccccgccacgcgccacaccgtcgatccggaccgccacatcgagcgggtcaccgagctgcaagaactcttcctcacgcgcgtcgggctcgacatcggcaaggtgtgggtcgcggacgacggcgccgcggtggcggtctggaccacgccggagagcgtcgaagcgggggcggtgttcgccgagatcggcccgcgcatggccgagttgagcggttcccggctggccgcgcagcaacagatggaaggcctcctggcgccgcaccggcccaaggagcccgcgtggttcctggccaccgtcggcgtctcgcccgaccaccagggcaagggtctgggcagcgccgtcgtgctccccggagtggaggcggccgagcgcgccggggtgcccgccttcctggagacctccgcgccccgcaacctccccttctacgagcggctcggcttcaccgtcaccgccgacgtcgaggtgcccgaaggaccgcgcacctggtgcatgacccgcaagcccggtgcctga

SEQ ID NO: 4950 - DNA, 1728 bp, Artificial Sequence
  Synthetic Polynucloetide
atggccttaccagtgaccgccttgctcctgccgctggccttgctgctccacgccgccaggccgggcatgcggactgaagacctcccaaaggctgtggtgttcctggagcctcaatggtacagggtgctggagaaggacagtgtgactctgaagtgccagggagcctactcccctgaggacaattccacacagtggtttcacaatgagagcctcatctcaagccaggcctccagctacttcattgacgctgccacagtggacgacagtggagagtacaggtgccagacaaacctctccaccctcagtgacccggtgcagctagaagtccatatcggctggctgttgctccaggcccctcggtgggtgttcaaggaggaagaccctattcacctgaggtgtcacagctggaagaacactgctctgcataaggtcacatatttacagaatggcaaaggcaggaagtattttcatcataattctgacttctacattccaaaagccacactcaaagacagcggctcctacttctgcagggggcttgttgggagtaaaaatgtgtcttcagagactgtgaacatcaccatcactcaaggtttggcagtgtcaaccatctcatcattctttccacctggctaccaactcgagggatctggcagagccgattgcggctttaccagcgagagctaccagcagggcgtgctgagcgccaccatcctgtacgagatcctgctgggcaaggccaccctgtacgccgtgctggtgtctgccctggtgctgatggctatggtcaagcggaaggacagccggggaagggccaagcgatctggatctggagcaacaaacttctcactactcaaacaagcaggtgacgtggaggagaatcccgggcctactagtatggactggatttggcgcatccttttccttgtcggcgctgctaccggcgcgcattccgggcccggcatgagaaccgaggacctgcctaaggccgtggtgttcctggaaccccagtggtacagagtgctggaaaaggacagcgtgaccctgaagtgccagggcgcctacagccccgaggacaatagcacccagtggttccacaacgagagcctgatctccagccaggccagcagctacttcatcgacgccgccaccgtggacgacagcggcgagtatagatgccagaccaacctgagcaccctgagcgaccccgtgcagctggaagtgcacatcggatggctgctgctgcaggcccccagatgggtgttcaaagaagaggaccccatccacctgagatgccactcttggaagaacaccgccctgcacaaagtgacctacctgcagaacggcaagggcagaaagtacttccaccacaacagcgacttctacatccccaaggccaccctgaaggactccggctcctacttctgcagaggcctcgtgggcagcaagaacgtgtccagcgagacagtgaacatcaccatcacccagggcctggccgtgtctaccatcagcagctttttcccacccggctaccagacgcgtggcagcatccccgaggacacattcttcccaagccccgagagcagctgcgacgtgaagctggtggaaaagagcttcgagacagacaccaacctgaacttccagaacctgagcgtgatcggcttcagaatcctgctgctgaaagtggccggctttaacctgctgatgaccctgcggctgtggtccagc

SEQ ID NO: 4951 - DNA, 2457 bp, Artificial Sequence
  Synthetic Polynucloetide
atggccttaccagtgaccgccttgctcctgccgctggccttgctgctccacgccgccaggccgggcatgcggactgaagacctcccaaaggctgtggtgttcctggagcctcaatggtacagggtgctggagaaggacagtgtgactctgaagtgccagggagcctactcccctgaggacaattccacacagtggtttcacaatgagagcctcatctcaagccaggcctccagctacttcattgacgctgccacagtggacgacagtggagagtacaggtgccagacaaacctctccaccctcagtgacccggtgcagctagaagtccatatcggctggctgttgctccaggcccctcggtgggtgttcaaggaggaagaccctattcacctgaggtgtcacagctggaagaacactgctctgcataaggtcacatatttacagaatggcaaaggcaggaagtattttcatcataattctgacttctacattccaaaagccacactcaaagacagcggctcctacttctgcagggggcttgttgggagtaaaaatgtgtcttcagagactgtgaacatcaccatcactcaaggtttggcagtgtcaaccatctcatcattctttccacctggctaccaactcgaggacaaaactcacacatgcccaccgtgcccagcaggcagagccgattgcggctttaccagcgagagctaccagcagggcgtgctgagcgccaccatcctgtacgagatcctgctgggcaaggccaccctgtacgccgtgctggtgtctgccctggtgctgatggctatggtcaagcggaaggacagccggggaagggccaagcgatctggatctggagcaacaaacttctcactactcaaacaagcaggtgacgtggaggagaatcccgggcctactagtatggactggatttggcgcatccttttccttgtcggcgctgctaccggcgcgcattccgggcccggcatgagaaccgaggacctgcctaaggccgtggtgttcctggaaccccagtggtacagagtgctggaaaaggacagcgtgaccctgaagtgccagggcgcctacagccccgaggacaatagcacccagtggttccacaacgagagcctgatctccagccaggccagcagctacttcatcgacgccgccaccgtggacgacagcggcgagtatagatgccagaccaacctgagcaccctgagcgaccccgtgcagctggaagtgcacatcggatggctgctgctgcaggcccccagatgggtgttcaaagaagaggaccccatccacctgagatgccactcttggaagaacaccgccctgcacaaagtgacctacctgcagaacggcaagggcagaaagtacttccaccacaacagcgacttctacatccccaaggccaccctgaaggactccggctcctacttctgcagaggcctcgtgggcagcaagaacgtgtccagcgagacagtgaacatcaccatcacccagggcctggccgtgtctaccatcagcagctttttcccacccggctaccagacgcgtggcagcatccccgaggacacattcttcccaagccccgagagcagctgcgacgtgaagctggtggaaaagagcttcgagacagacaccaacctgaacttccagaacctgagcgtgatcggcttcagaatcctgctgctgaaagtggccggctttaacctgctgatgaccctgcggctgtggtccagccgcgccaagagaagcggatctggcgtgaagcagaccctgaatttcgacctgctgaagctggctggcgacgtggaatccaacccaggcccttctagaggccatatgaccgagtacaagcccacggtgcgcctcgccacccgcgacgacgtccccagggccgtacgcaccctcgccgccgcgttcgccgactaccccgccacgcgccacaccgtcgatccggaccgccacatcgagcgggtcaccgagctgcaagaactcttcctcacgcgcgtcgggctcgacatcggcaaggtgtgggtcgcggacgacggcgccgcggtggcggtctggaccacgccggagagcgtcgaagcgggggcggtgttcgccgagatcggcccgcgcatggccgagttgagcggttcccggctggccgcgcagcaacagatggaaggcctcctggcgccgcaccggcccaaggagcccgcgtggttcctggccaccgtcggcgtctcgcccgaccaccagggcaagggtctgggcagcgccgtcgtgctccccggagtggaggcggccgagcgcgccggggtgcccgccttcctggagacctccgcgccccgcaacctccccttctacgagcggctcggcttcaccgtcaccgccgacgtcgaggtgcccgaaggaccgcgcacctggtgcatgacccgcaagcccggtgcctga

SEQ ID NO: 4952 - DNA, 2457 bp, Artificial Sequence
  Synthetic Polynucloetide
atggccttaccagtgaccgccttgctcctgccgctggccttgctgctccacgccgccaggccgggcatgcggactgaagacctcccaaaggctgtggtgttcctggagcctcaatggtacagggtgctggagaaggacagtgtgactctgaagtgccagggagcctactcccctgaggacaattccacacagtggtttcacaatgagagcctcatctcaagccaggcctccagctacttcattgacgctgccacagtggacgacagtggagagtacaggtgccagacaaacctctccaccctcagtgacccggtgcagctagaagtccatatcggctggctgttgctccaggcccctcggtgggtgttcaaggaggaagaccctattcacctgaggtgtcacagctggaagaacactgctctgcataaggtcacatatttacagaatggcaaaggcaggaagtattttcatcataattctgacttctacattccaaaagccacactcaaagacagcggctcctacttctgcagggggcttgttgggagtaaaaatgtgtcttcagagactgtgaacatcaccatcactcaaggtttggcagtgtcaaccatctcatcattctttccacctggctaccaactcgagggatctggcagagccgattgcggctttaccagcgagagctaccagcagggcgtgctgagcgccaccatcctgtacgagatcctgctgggcaaggccaccctgtacgccgtgctggtgtctgccctggtgctgatggctatggtcaagcggaaggacagccggggaagggccaagcgatctggatctggagcaacaaacttctcactactcaaacaagcaggtgacgtggaggagaatcccgggcctactagtatggactggatttggcgcatccttttccttgtcggcgctgctaccggcgcgcattccgggcccggcatgagaaccgaggacctgcctaaggccgtggtgttcctggaaccccagtggtacagagtgctggaaaaggacagcgtgaccctgaagtgccagggcgcctacagccccgaggacaatagcacccagtggttccacaacgagagcctgatctccagccaggccagcagctacttcatcgacgccgccaccgtggacgacagcggcgagtatagatgccagaccaacctgagcaccctgagcgaccccgtgcagctggaagtgcacatcggatggctgctgctgcaggcccccagatgggtgttcaaagaagaggaccccatccacctgagatgccactcttggaagaacaccgccctgcacaaagtgacctacctgcagaacggcaagggcagaaagtacttccaccacaacagcgacttctacatccccaaggccaccctgaaggactccggctcctacttctgcagaggcctcgtgggcagcaagaacgtgtccagcgagacagtgaacatcaccatcacccagggcctggccgtgtctaccatcagcagctttttcccacccggctaccagacgcgtgataaaactcatacctgtccgccatgcccggcaatccccgaggacacattcttcccaagccccgagagcagctgcgacgtgaagctggtggaaaagagcttcgagacagacaccaacctgaacttccagaacctgagcgtgatcggcttcagaatcctgctgctgaaagtggccggctttaacctgctgatgaccctgcggctgtggtccagccgcgccaagagaagcggatctggcgtgaagcagaccctgaatttcgacctgctgaagctggctggcgacgtggaatccaacccaggcccttctagaggccatatgaccgagtacaagcccacggtgcgcctcgccacccgcgacgacgtccccagggccgtacgcaccctcgccgccgcgttcgccgactaccccgccacgcgccacaccgtcgatccggaccgccacatcgagcgggtcaccgagctgcaagaactcttcctcacgcgcgtcgggctcgacatcggcaaggtgtgggtcgcggacgacggcgccgcggtggcggtctggaccacgccggagagcgtcgaagcgggggcggtgttcgccgagatcggcccgcgcatggccgagttgagcggttcccggctggccgcgcagcaacagatggaaggcctcctggcgccgcaccggcccaaggagcccgcgtggttcctggccaccgtcggcgtctcgcccgaccaccagggcaagggtctgggcagcgccgtcgtgctccccggagtggaggcggccgagcgcgccggggtgcccgccttcctggagacctccgcgccccgcaacctccccttctacgagcggctcggcttcaccgtcaccgccgacgtcgaggtgcccgaaggaccgcgcacctggtgcatgacccgcaagcccggtgcctga

SEQ ID NO: 4953 - DNA, 2484 bp, Artificial Sequence
  Synthetic Polynucloetide
atggccttaccagtgaccgccttgctcctgccgctggccttgctgctccacgccgccaggccgggcatgcggactgaagacctcccaaaggctgtggtgttcctggagcctcaatggtacagggtgctggagaaggacagtgtgactctgaagtgccagggagcctactcccctgaggacaattccacacagtggtttcacaatgagagcctcatctcaagccaggcctccagctacttcattgacgctgccacagtggacgacagtggagagtacaggtgccagacaaacctctccaccctcagtgacccggtgcagctagaagtccatatcggctggctgttgctccaggcccctcggtgggtgttcaaggaggaagaccctattcacctgaggtgtcacagctggaagaacactgctctgcataaggtcacatatttacagaatggcaaaggcaggaagtattttcatcataattctgacttctacattccaaaagccacactcaaagacagcggctcctacttctgcagggggcttgttgggagtaaaaatgtgtcttcagagactgtgaacatcaccatcactcaaggtttggcagtgtcaaccatctcatcattctttccacctggctaccaactcgaggacaaaactcacacatgcccaccgtgcccagcaggcagagccgattgcggctttaccagcgagagctaccagcagggcgtgctgagcgccaccatcctgtacgagatcctgctgggcaaggccaccctgtacgccgtgctggtgtctgccctggtgctgatggctatggtcaagcggaaggacagccggggaagggccaagcgatctggatctggagcaacaaacttctcactactcaaacaagcaggtgacgtggaggagaatcccgggcctactagtatggactggatttggcgcatccttttccttgtcggcgctgctaccggcgcgcattccgggcccggcatgagaaccgaggacctgcctaaggccgtggtgttcctggaaccccagtggtacagagtgctggaaaaggacagcgtgaccctgaagtgccagggcgcctacagccccgaggacaatagcacccagtggttccacaacgagagcctgatctccagccaggccagcagctacttcatcgacgccgccaccgtggacgacagcggcgagtatagatgccagaccaacctgagcaccctgagcgaccccgtgcagctggaagtgcacatcggatggctgctgctgcaggcccccagatgggtgttcaaagaagaggaccccatccacctgagatgccactcttggaagaacaccgccctgcacaaagtgacctacctgcagaacggcaagggcagaaagtacttccaccacaacagcgacttctacatccccaaggccaccctgaaggactccggctcctacttctgcagaggcctcgtgggcagcaagaacgtgtccagcgagacagtgaacatcaccatcacccagggcctggccgtgtctaccatcagcagctttttcccacccggctaccagacgcgtgataaaactcatacctgtccgccatgcccggcaatccccgaggacacattcttcccaagccccgagagcagctgcgacgtgaagctggtggaaaagagcttcgagacagacaccaacctgaacttccagaacctgagcgtgatcggcttcagaatcctgctgctgaaagtggccggctttaacctgctgatgaccctgcggctgtggtccagccgcgccaagagaagcggatctggcgtgaagcagaccctgaatttcgacctgctgaagctggctggcgacgtggaatccaacccaggcccttctagaggccatatgaccgagtacaagcccacggtgcgcctcgccacccgcgacgacgtccccagggccgtacgcaccctcgccgccgcgttcgccgactaccccgccacgcgccacaccgtcgatccggaccgccacatcgagcgggtcaccgagctgcaagaactcttcctcacgcgcgtcgggctcgacatcggcaaggtgtgggtcgcggacgacggcgccgcggtggcggtctggaccacgccggagagcgtcgaagcgggggcggtgttcgccgagatcggcccgcgcatggccgagttgagcggttcccggctggccgcgcagcaacagatggaaggcctcctggcgccgcaccggcccaaggagcccgcgtggttcctggccaccgtcggcgtctcgcccgaccaccagggcaagggtctgggcagcgccgtcgtgctccccggagtggaggcggccgagcgcgccggggtgcccgccttcctggagacctccgcgccccgcaacctccccttctacgagcggctcggcttcaccgtcaccgccgacgtcgaggtgcccgaaggaccgcgcacctggtgcatgacccgcaagcccggtgcctga

SEQ ID NO: 4954 - DNA, 1782 bp, Artificial Sequence
  Synthetic Polynucloetide
atggccttaccagtgaccgccttgctcctgccgctggccttgctgctccacgccgccaggccgggcatgcggactgaagacctcccaaaggctgtggtgttcctggagcctcaatggtacagggtgctggagaaggacagtgtgactctgaagtgccagggagcctactcccctgaggacaattccacacagtggtttcacaatgagagcctcatctcaagccaggcctccagctacttcattgacgctgccacagtggacgacagtggagagtacaggtgccagacaaacctctccaccctcagtgacccggtgcagctagaagtccatatcggctggctgttgctccaggcccctcggtgggtgttcaaggaggaagaccctattcacctgaggtgtcacagctggaagaacactgctctgcataaggtcacatatttacagaatggcaaaggcaggaagtattttcatcataattctgacttctacattccaaaagccacactcaaagacagcggctcctacttctgcagggggcttgttgggagtaaaaatgtgtcttcagagactgtgaacatcaccatcactcaaggtttggcagtgtcaaccatctcatcattctttccacctggctaccaactcgaggacaaaactcacacatgcccaccgtgcccagcaggcagagccgattgcggctttaccagcgagagctaccagcagggcgtgctgagcgccaccatcctgtacgagatcctgctgggcaaggccaccctgtacgccgtgctggtgtctgccctggtgctgatggctatggtcaagcggaaggacagccggggaagggccaagcgatctggatctggagcaacaaacttctcactactcaaacaagcaggtgacgtggaggagaatcccgggcctactagtatggactggatttggcgcatccttttccttgtcggcgctgctaccggcgcgcattccgggcccggcatgagaaccgaggacctgcctaaggccgtggtgttcctggaaccccagtggtacagagtgctggaaaaggacagcgtgaccctgaagtgccagggcgcctacagccccgaggacaatagcacccagtggttccacaacgagagcctgatctccagccaggccagcagctacttcatcgacgccgccaccgtggacgacagcggcgagtatagatgccagaccaacctgagcaccctgagcgaccccgtgcagctggaagtgcacatcggatggctgctgctgcaggcccccagatgggtgttcaaagaagaggaccccatccacctgagatgccactcttggaagaacaccgccctgcacaaagtgacctacctgcagaacggcaagggcagaaagtacttccaccacaacagcgacttctacatccccaaggccaccctgaaggactccggctcctacttctgcagaggcctcgtgggcagcaagaacgtgtccagcgagacagtgaacatcaccatcacccagggcctggccgtgtctaccatcagcagctttttcccacccggctaccagacgcgtgataaaactcatacctgtccgccatgcccggcaatccccgaggacacattcttcccaagccccgagagcagctgcgacgtgaagctggtggaaaagagcttcgagacagacaccaacctgaacttccagaacctgagcgtgatcggcttcagaatcctgctgctgaaagtggccggctttaacctgctgatgaccctgcggctgtggtccagc

SEQ ID NO: 4955 - DNA, 1755 bp, Artificial Sequence
  Synthetic Polynucloetide
atggccttaccagtgaccgccttgctcctgccgctggccttgctgctccacgccgccaggccgggcatgcggactgaagacctcccaaaggctgtggtgttcctggagcctcaatggtacagggtgctggagaaggacagtgtgactctgaagtgccagggagcctactcccctgaggacaattccacacagtggtttcacaatgagagcctcatctcaagccaggcctccagctacttcattgacgctgccacagtggacgacagtggagagtacaggtgccagacaaacctctccaccctcagtgacccggtgcagctagaagtccatatcggctggctgttgctccaggcccctcggtgggtgttcaaggaggaagaccctattcacctgaggtgtcacagctggaagaacactgctctgcataaggtcacatatttacagaatggcaaaggcaggaagtattttcatcataattctgacttctacattccaaaagccacactcaaagacagcggctcctacttctgcagggggcttgttgggagtaaaaatgtgtcttcagagactgtgaacatcaccatcactcaaggtttggcagtgtcaaccatctcatcattctttccacctggctaccaactcgagggatctggcagagccgattgcggctttaccagcgagagctaccagcagggcgtgctgagcgccaccatcctgtacgagatcctgctgggcaaggccaccctgtacgccgtgctggtgtctgccctggtgctgatggctatggtcaagcggaaggacagccggggaagggccaagcgatctggatctggagcaacaaacttctcactactcaaacaagcaggtgacgtggaggagaatcccgggcctactagtatggactggatttggcgcatccttttccttgtcggcgctgctaccggcgcgcattccgggcccggcatgagaaccgaggacctgcctaaggccgtggtgttcctggaaccccagtggtacagagtgctggaaaaggacagcgtgaccctgaagtgccagggcgcctacagccccgaggacaatagcacccagtggttccacaacgagagcctgatctccagccaggccagcagctacttcatcgacgccgccaccgtggacgacagcggcgagtatagatgccagaccaacctgagcaccctgagcgaccccgtgcagctggaagtgcacatcggatggctgctgctgcaggcccccagatgggtgttcaaagaagaggaccccatccacctgagatgccactcttggaagaacaccgccctgcacaaagtgacctacctgcagaacggcaagggcagaaagtacttccaccacaacagcgacttctacatccccaaggccaccctgaaggactccggctcctacttctgcagaggcctcgtgggcagcaagaacgtgtccagcgagacagtgaacatcaccatcacccagggcctggccgtgtctaccatcagcagctttttcccacccggctaccagacgcgtgataaaactcatacctgtccgccatgcccggcaatccccgaggacacattcttcccaagccccgagagcagctgcgacgtgaagctggtggaaaagagcttcgagacagacaccaacctgaacttccagaacctgagcgtgatcggcttcagaatcctgctgctgaaagtggccggctttaacctgctgatgaccctgcggctgtggtccagc

SEQ ID NO: 4956 - DNA, 3111 bp, Artificial Sequence
  Synthetic Polynucloetide
atggccttaccagtgaccgccttgctcctgccgctggccttgctgctccacgccgccaggccgggcatgcggactgaagacctcccaaaggctgtggtgttcctggagcctcaatggtacagggtgctggagaaggacagtgtgactctgaagtgccagggagcctactcccctgaggacaattccacacagtggtttcacaatgagagcctcatctcaagccaggcctccagctacttcattgacgctgccacagtggacgacagtggagagtacaggtgccagacaaacctctccaccctcagtgacccggtgcagctagaagtccatatcggctggctgttgctccaggcccctcggtgggtgttcaaggaggaagaccctattcacctgaggtgtcacagctggaagaacactgctctgcataaggtcacatatttacagaatggcaaaggcaggaagtattttcatcataattctgacttctacattccaaaagccacactcaaagacagcggctcctacttctgcagggggcttgttgggagtaaaaatgtgtcttcagagactgtgaacatcaccatcactcaaggtttggcagtgtcaaccatctcatcattctttccacctggctaccaactcgagggacagcctaaggccaatcctaccgtgacactgttccctccaagcagcgaagaactccaggccaacaaggccacacttgtgtgcctgatctccgacttctaccctggggctgtgacagtggcttggaaggccgatggatctcctgtgaaagccggcgtggaaaccaccaagccatccaagcagagcaacaacaaatacgccgccagctcctacctgagcctgacacctgagcagtggaagtcccacagatcctacagctgccaagtgacccacgaaggcagcaccgtggaaaagacagtggcccctacagagtgcagccccatcaagaccgatgtgattacaatggaccccaaggacaactgctccaaggacgccaacgataccctgctgctccagctgaccaacaccagcgcctactacatgtacttgttgctgctgctgaagtccgtggtgtacttcgccatcatcacatgctgcctgctgcggagaaccgccttctgctgcaacggcgagaagtctagggccaagcgatctggatctggagcaacaaacttctcactactcaaacaagcaggtgacgtggaggagaatcccgggcctactagtatggactggatttggcgcatccttttccttgtcggcgctgctaccggcgcgcattccgggcccggcatgagaaccgaggacctgcctaaggccgtggtgttcctggaaccccagtggtacagagtgctggaaaaggacagcgtgaccctgaagtgccagggcgcctacagccccgaggacaatagcacccagtggttccacaacgagagcctgatctccagccaggccagcagctacttcatcgacgccgccaccgtggacgacagcggcgagtatagatgccagaccaacctgagcaccctgagcgaccccgtgcagctggaagtgcacatcggatggctgctgctgcaggcccccagatgggtgttcaaagaagaggaccccatccacctgagatgccactcttggaagaacaccgccctgcacaaagtgacctacctgcagaacggcaagggcagaaagtacttccaccacaacagcgacttctacatccccaaggccaccctgaaggactccggctcctacttctgcagaggcctcgtgggcagcaagaacgtgtccagcgagacagtgaacatcaccatcacccagggcctggccgtgtctaccatcagcagctttttcccacccggctaccagacgcgtgcctctacaaagggaccctccgtgtttcctctggctcccagcagcaagtctacaagcggaggaacagccgctctgggctgcctggtcaaggattactttcccgagcctgtgaccgtgtcctggaatagcggagcactgacaagcggcgtgcacacctttccagccgtgctgcaaagcagcggcctgtactctctgagcagcgtggtcacagtgcctagctctagcctgggcacccagacctacatctgcaatgtgaaccacaagcctagcaacaccaaggtggacaagagagtggaacccaagagctgtgaagtgaaaaccgactccaccgaccacgtgaagcccaaagagacagagaacaccaagcagcccagcaagagctgccacaagcccaaggccatcgtgcacaccgagaaagtgaacatgatgagcctgaccgtgctgggcctgcggatgctgttcgccaaaaccgtggccgtgaacttcctgctgaccgccaagctgttcttcctccgcgccaagagaagcggatctggcgtgaagcagaccctgaatttcgacctgctgaagctggctggcgacgtggaatccaacccaggcccttctagaggccatatgaccgagtacaagcccacggtgcgcctcgccacccgcgacgacgtccccagggccgtacgcaccctcgccgccgcgttcgccgactaccccgccacgcgccacaccgtcgatccggaccgccacatcgagcgggtcaccgagctgcaagaactcttcctcacgcgcgtcgggctcgacatcggcaaggtgtgggtcgcggacgacggcgccgcggtggcggtctggaccacgccggagagcgtcgaagcgggggcggtgttcgccgagatcggcccgcgcatggccgagttgagcggttcccggctggccgcgcagcaacagatggaaggcctcctggcgccgcaccggcccaaggagcccgcgtggttcctggccaccgtcggcgtctcgcccgaccaccagggcaagggtctgggcagcgccgtcgtgctccccggagtggaggcggccgagcgcgccggggtgcccgccttcctggagacctccgcgccccgcaacctccccttctacgagcggctcggcttcaccgtcaccgccgacgtcgaggtgcccgaaggaccgcgcacctggtgcatgacccgcaagcccggtgcctga

SEQ ID NO: 4957 - DNA, 2409 bp, Artificial Sequence
  Synthetic Polynucloetide
atggccttaccagtgaccgccttgctcctgccgctggccttgctgctccacgccgccaggccgggcatgcggactgaagacctcccaaaggctgtggtgttcctggagcctcaatggtacagggtgctggagaaggacagtgtgactctgaagtgccagggagcctactcccctgaggacaattccacacagtggtttcacaatgagagcctcatctcaagccaggcctccagctacttcattgacgctgccacagtggacgacagtggagagtacaggtgccagacaaacctctccaccctcagtgacccggtgcagctagaagtccatatcggctggctgttgctccaggcccctcggtgggtgttcaaggaggaagaccctattcacctgaggtgtcacagctggaagaacactgctctgcataaggtcacatatttacagaatggcaaaggcaggaagtattttcatcataattctgacttctacattccaaaagccacactcaaagacagcggctcctacttctgcagggggcttgttgggagtaaaaatgtgtcttcagagactgtgaacatcaccatcactcaaggtttggcagtgtcaaccatctcatcattctttccacctggctaccaactcgagggacagcctaaggccaatcctaccgtgacactgttccctccaagcagcgaagaactccaggccaacaaggccacacttgtgtgcctgatctccgacttctaccctggggctgtgacagtggcttggaaggccgatggatctcctgtgaaagccggcgtggaaaccaccaagccatccaagcagagcaacaacaaatacgccgccagctcctacctgagcctgacacctgagcagtggaagtcccacagatcctacagctgccaagtgacccacgaaggcagcaccgtggaaaagacagtggcccctacagagtgcagccccatcaagaccgatgtgattacaatggaccccaaggacaactgctccaaggacgccaacgataccctgctgctccagctgaccaacaccagcgcctactacatgtacttgttgctgctgctgaagtccgtggtgtacttcgccatcatcacatgctgcctgctgcggagaaccgccttctgctgcaacggcgagaagtctagggccaagcgatctggatctggagcaacaaacttctcactactcaaacaagcaggtgacgtggaggagaatcccgggcctactagtatggactggatttggcgcatccttttccttgtcggcgctgctaccggcgcgcattccgggcccggcatgagaaccgaggacctgcctaaggccgtggtgttcctggaaccccagtggtacagagtgctggaaaaggacagcgtgaccctgaagtgccagggcgcctacagccccgaggacaatagcacccagtggttccacaacgagagcctgatctccagccaggccagcagctacttcatcgacgccgccaccgtggacgacagcggcgagtatagatgccagaccaacctgagcaccctgagcgaccccgtgcagctggaagtgcacatcggatggctgctgctgcaggcccccagatgggtgttcaaagaagaggaccccatccacctgagatgccactcttggaagaacaccgccctgcacaaagtgacctacctgcagaacggcaagggcagaaagtacttccaccacaacagcgacttctacatccccaaggccaccctgaaggactccggctcctacttctgcagaggcctcgtgggcagcaagaacgtgtccagcgagacagtgaacatcaccatcacccagggcctggccgtgtctaccatcagcagctttttcccacccggctaccagacgcgtgcctctacaaagggaccctccgtgtttcctctggctcccagcagcaagtctacaagcggaggaacagccgctctgggctgcctggtcaaggattactttcccgagcctgtgaccgtgtcctggaatagcggagcactgacaagcggcgtgcacacctttccagccgtgctgcaaagcagcggcctgtactctctgagcagcgtggtcacagtgcctagctctagcctgggcacccagacctacatctgcaatgtgaaccacaagcctagcaacaccaaggtggacaagagagtggaacccaagagctgtgaagtgaaaaccgactccaccgaccacgtgaagcccaaagagacagagaacaccaagcagcccagcaagagctgccacaagcccaaggccatcgtgcacaccgagaaagtgaacatgatgagcctgaccgtgctgggcctgcggatgctgttcgccaaaaccgtggccgtgaacttcctgctgaccgccaagctgttcttcctc

SEQ ID NO: 4958 - DNA, 2496 bp, Artificial Sequence
  Synthetic Polynucloetide
atggccttaccagtgaccgccttgctcctgccgctggccttgctgctccacgccgccaggccgggcatgcggactgaagacctcccaaaggctgtggtgttcctggagcctcaatggtacagggtgctggagaaggacagtgtgactctgaagtgccagggagcctactcccctgaggacaattccacacagtggtttcacaatgagagcctcatctcaagccaggcctccagctacttcattgacgctgccacagtggacgacagtggagagtacaggtgccagacaaacctctccaccctcagtgacccggtgcagctagaagtccatatcggctggctgttgctccaggcccctcggtgggtgttcaaggaggaagaccctattcacctgaggtgtcacagctggaagaacactgctctgcataaggtcacatatttacagaatggcaaaggcaggaagtattttcatcataattctgacttctacattccaaaagccacactcaaagacagcggctcctacttctgcagggggcttgttgggagtaaaaatgtgtcttcagagactgtgaacatcaccatcactcaaggtttggcagtgtcaaccatctcatcattctttccacctggctaccaactcgagggatctcccatcaagaccgatgtgattacaatggaccccaaggacaactgctccaaggacgccaacgataccctgctgctccagctgaccaacaccagcgcctactacatgtacttgttgctgctgctgaagtccgtggtgtacttcgccatcatcacatgctgcctgctgcggagaaccgccttctgctgcaacggcgagaagtctagggccaagcgatctggatctggagcaacaaacttctcactactcaaacaagcaggtgacgtggaggagaatcccgggcctactagtatggactggatttggcgcatccttttccttgtcggcgctgctaccggcgcgcattccgggcccggcatgagaaccgaggacctgcctaaggccgtggtgttcctggaaccccagtggtacagagtgctggaaaaggacagcgtgaccctgaagtgccagggcgcctacagccccgaggacaatagcacccagtggttccacaacgagagcctgatctccagccaggccagcagctacttcatcgacgccgccaccgtggacgacagcggcgagtatagatgccagaccaacctgagcaccctgagcgaccccgtgcagctggaagtgcacatcggatggctgctgctgcaggcccccagatgggtgttcaaagaagaggaccccatccacctgagatgccactcttggaagaacaccgccctgcacaaagtgacctacctgcagaacggcaagggcagaaagtacttccaccacaacagcgacttctacatccccaaggccaccctgaaggactccggctcctacttctgcagaggcctcgtgggcagcaagaacgtgtccagcgagacagtgaacatcaccatcacccagggcctggccgtgtctaccatcagcagctttttcccacccggctaccagacgcgtggcagcgaagtgaaaaccgactccaccgaccacgtgaagcccaaagagacagagaacaccaagcagcccagcaagagctgccacaagcccaaggccatcgtgcacaccgagaaagtgaacatgatgagcctgaccgtgctgggcctgcggatgctgttcgccaaaaccgtggccgtgaacttcctgctgaccgccaagctgttcttcctccgcgccaagagaagcggatctggcgtgaagcagaccctgaatttcgacctgctgaagctggctggcgacgtggaatccaacccaggcccttctagaggccatatgaccgagtacaagcccacggtgcgcctcgccacccgcgacgacgtccccagggccgtacgcaccctcgccgccgcgttcgccgactaccccgccacgcgccacaccgtcgatccggaccgccacatcgagcgggtcaccgagctgcaagaactcttcctcacgcgcgtcgggctcgacatcggcaaggtgtgggtcgcggacgacggcgccgcggtggcggtctggaccacgccggagagcgtcgaagcgggggcggtgttcgccgagatcggcccgcgcatggccgagttgagcggttcccggctggccgcgcagcaacagatggaaggcctcctggcgccgcaccggcccaaggagcccgcgtggttcctggccaccgtcggcgtctcgcccgaccaccagggcaagggtctgggcagcgccgtcgtgctccccggagtggaggcggccgagcgcgccggggtgcccgccttcctggagacctccgcgccccgcaacctccccttctacgagcggctcggcttcaccgtcaccgccgacgtcgaggtgcccgaaggaccgcgcacctggtgcatgacccgcaagcccggtgcctga

SEQ ID NO: 4959 - DNA, 1794 bp, Artificial Sequence
  Synthetic Polynucloetide
atggccttaccagtgaccgccttgctcctgccgctggccttgctgctccacgccgccaggccgggcatgcggactgaagacctcccaaaggctgtggtgttcctggagcctcaatggtacagggtgctggagaaggacagtgtgactctgaagtgccagggagcctactcccctgaggacaattccacacagtggtttcacaatgagagcctcatctcaagccaggcctccagctacttcattgacgctgccacagtggacgacagtggagagtacaggtgccagacaaacctctccaccctcagtgacccggtgcagctagaagtccatatcggctggctgttgctccaggcccctcggtgggtgttcaaggaggaagaccctattcacctgaggtgtcacagctggaagaacactgctctgcataaggtcacatatttacagaatggcaaaggcaggaagtattttcatcataattctgacttctacattccaaaagccacactcaaagacagcggctcctacttctgcagggggcttgttgggagtaaaaatgtgtcttcagagactgtgaacatcaccatcactcaaggtttggcagtgtcaaccatctcatcattctttccacctggctaccaactcgagggatctcccatcaagaccgatgtgattacaatggaccccaaggacaactgctccaaggacgccaacgataccctgctgctccagctgaccaacaccagcgcctactacatgtacttgttgctgctgctgaagtccgtggtgtacttcgccatcatcacatgctgcctgctgcggagaaccgccttctgctgcaacggcgagaagtctagggccaagcgatctggatctggagcaacaaacttctcactactcaaacaagcaggtgacgtggaggagaatcccgggcctactagtatggactggatttggcgcatccttttccttgtcggcgctgctaccggcgcgcattccgggcccggcatgagaaccgaggacctgcctaaggccgtggtgttcctggaaccccagtggtacagagtgctggaaaaggacagcgtgaccctgaagtgccagggcgcctacagccccgaggacaatagcacccagtggttccacaacgagagcctgatctccagccaggccagcagctacttcatcgacgccgccaccgtggacgacagcggcgagtatagatgccagaccaacctgagcaccctgagcgaccccgtgcagctggaagtgcacatcggatggctgctgctgcaggcccccagatgggtgttcaaagaagaggaccccatccacctgagatgccactcttggaagaacaccgccctgcacaaagtgacctacctgcagaacggcaagggcagaaagtacttccaccacaacagcgacttctacatccccaaggccaccctgaaggactccggctcctacttctgcagaggcctcgtgggcagcaagaacgtgtccagcgagacagtgaacatcaccatcacccagggcctggccgtgtctaccatcagcagctttttcccacccggctaccagacgcgtggcagcgaagtgaaaaccgactccaccgaccacgtgaagcccaaagagacagagaacaccaagcagcccagcaagagctgccacaagcccaaggccatcgtgcacaccgagaaagtgaacatgatgagcctgaccgtgctgggcctgcggatgctgttcgccaaaaccgtggccgtgaacttcctgctgaccgccaagctgttcttcctc

SEQ ID NO: 4960 - DNA, 2523 bp, Artificial Sequence
  Synthetic Polynucloetide
atggccttaccagtgaccgccttgctcctgccgctggccttgctgctccacgccgccaggccgggcatgcggactgaagacctcccaaaggctgtggtgttcctggagcctcaatggtacagggtgctggagaaggacagtgtgactctgaagtgccagggagcctactcccctgaggacaattccacacagtggtttcacaatgagagcctcatctcaagccaggcctccagctacttcattgacgctgccacagtggacgacagtggagagtacaggtgccagacaaacctctccaccctcagtgacccggtgcagctagaagtccatatcggctggctgttgctccaggcccctcggtgggtgttcaaggaggaagaccctattcacctgaggtgtcacagctggaagaacactgctctgcataaggtcacatatttacagaatggcaaaggcaggaagtattttcatcataattctgacttctacattccaaaagccacactcaaagacagcggctcctacttctgcagggggcttgttgggagtaaaaatgtgtcttcagagactgtgaacatcaccatcactcaaggtttggcagtgtcaaccatctcatcattctttccacctggctaccaactcgaggacaaaactcacacatgcccaccgtgcccagcacccatcaagaccgatgtgattacaatggaccccaaggacaactgctccaaggacgccaacgataccctgctgctccagctgaccaacaccagcgcctactacatgtacttgttgctgctgctgaagtccgtggtgtacttcgccatcatcacatgctgcctgctgcggagaaccgccttctgctgcaacggcgagaagtctagggccaagcgatctggatctggagcaacaaacttctcactactcaaacaagcaggtgacgtggaggagaatcccgggcctactagtatggactggatttggcgcatccttttccttgtcggcgctgctaccggcgcgcattccgggcccggcatgagaaccgaggacctgcctaaggccgtggtgttcctggaaccccagtggtacagagtgctggaaaaggacagcgtgaccctgaagtgccagggcgcctacagccccgaggacaatagcacccagtggttccacaacgagagcctgatctccagccaggccagcagctacttcatcgacgccgccaccgtggacgacagcggcgagtatagatgccagaccaacctgagcaccctgagcgaccccgtgcagctggaagtgcacatcggatggctgctgctgcaggcccccagatgggtgttcaaagaagaggaccccatccacctgagatgccactcttggaagaacaccgccctgcacaaagtgacctacctgcagaacggcaagggcagaaagtacttccaccacaacagcgacttctacatccccaaggccaccctgaaggactccggctcctacttctgcagaggcctcgtgggcagcaagaacgtgtccagcgagacagtgaacatcaccatcacccagggcctggccgtgtctaccatcagcagctttttcccacccggctaccagacgcgtggcagcgaagtgaaaaccgactccaccgaccacgtgaagcccaaagagacagagaacaccaagcagcccagcaagagctgccacaagcccaaggccatcgtgcacaccgagaaagtgaacatgatgagcctgaccgtgctgggcctgcggatgctgttcgccaaaaccgtggccgtgaacttcctgctgaccgccaagctgttcttcctccgcgccaagagaagcggatctggcgtgaagcagaccctgaatttcgacctgctgaagctggctggcgacgtggaatccaacccaggcccttctagaggccatatgaccgagtacaagcccacggtgcgcctcgccacccgcgacgacgtccccagggccgtacgcaccctcgccgccgcgttcgccgactaccccgccacgcgccacaccgtcgatccggaccgccacatcgagcgggtcaccgagctgcaagaactcttcctcacgcgcgtcgggctcgacatcggcaaggtgtgggtcgcggacgacggcgccgcggtggcggtctggaccacgccggagagcgtcgaagcgggggcggtgttcgccgagatcggcccgcgcatggccgagttgagcggttcccggctggccgcgcagcaacagatggaaggcctcctggcgccgcaccggcccaaggagcccgcgtggttcctggccaccgtcggcgtctcgcccgaccaccagggcaagggtctgggcagcgccgtcgtgctccccggagtggaggcggccgagcgcgccggggtgcccgccttcctggagacctccgcgccccgcaacctccccttctacgagcggctcggcttcaccgtcaccgccgacgtcgaggtgcccgaaggaccgcgcacctggtgcatgacccgcaagcccggtgcctga

SEQ ID NO: 4961 - DNA, 2523 bp, Artificial Sequence
  Synthetic Polynucloetide
atggccttaccagtgaccgccttgctcctgccgctggccttgctgctccacgccgccaggccgggcatgcggactgaagacctcccaaaggctgtggtgttcctggagcctcaatggtacagggtgctggagaaggacagtgtgactctgaagtgccagggagcctactcccctgaggacaattccacacagtggtttcacaatgagagcctcatctcaagccaggcctccagctacttcattgacgctgccacagtggacgacagtggagagtacaggtgccagacaaacctctccaccctcagtgacccggtgcagctagaagtccatatcggctggctgttgctccaggcccctcggtgggtgttcaaggaggaagaccctattcacctgaggtgtcacagctggaagaacactgctctgcataaggtcacatatttacagaatggcaaaggcaggaagtattttcatcataattctgacttctacattccaaaagccacactcaaagacagcggctcctacttctgcagggggcttgttgggagtaaaaatgtgtcttcagagactgtgaacatcaccatcactcaaggtttggcagtgtcaaccatctcatcattctttccacctggctaccaactcgagggatctcccatcaagaccgatgtgattacaatggaccccaaggacaactgctccaaggacgccaacgataccctgctgctccagctgaccaacaccagcgcctactacatgtacttgttgctgctgctgaagtccgtggtgtacttcgccatcatcacatgctgcctgctgcggagaaccgccttctgctgcaacggcgagaagtctagggccaagcgatctggatctggagcaacaaacttctcactactcaaacaagcaggtgacgtggaggagaatcccgggcctactagtatggactggatttggcgcatccttttccttgtcggcgctgctaccggcgcgcattccgggcccggcatgagaaccgaggacctgcctaaggccgtggtgttcctggaaccccagtggtacagagtgctggaaaaggacagcgtgaccctgaagtgccagggcgcctacagccccgaggacaatagcacccagtggttccacaacgagagcctgatctccagccaggccagcagctacttcatcgacgccgccaccgtggacgacagcggcgagtatagatgccagaccaacctgagcaccctgagcgaccccgtgcagctggaagtgcacatcggatggctgctgctgcaggcccccagatgggtgttcaaagaagaggaccccatccacctgagatgccactcttggaagaacaccgccctgcacaaagtgacctacctgcagaacggcaagggcagaaagtacttccaccacaacagcgacttctacatccccaaggccaccctgaaggactccggctcctacttctgcagaggcctcgtgggcagcaagaacgtgtccagcgagacagtgaacatcaccatcacccagggcctggccgtgtctaccatcagcagctttttcccacccggctaccagacgcgtgataaaactcatacctgtccgccatgcccggcagaagtgaaaaccgactccaccgaccacgtgaagcccaaagagacagagaacaccaagcagcccagcaagagctgccacaagcccaaggccatcgtgcacaccgagaaagtgaacatgatgagcctgaccgtgctgggcctgcggatgctgttcgccaaaaccgtggccgtgaacttcctgctgaccgccaagctgttcttcctccgcgccaagagaagcggatctggcgtgaagcagaccctgaatttcgacctgctgaagctggctggcgacgtggaatccaacccaggcccttctagaggccatatgaccgagtacaagcccacggtgcgcctcgccacccgcgacgacgtccccagggccgtacgcaccctcgccgccgcgttcgccgactaccccgccacgcgccacaccgtcgatccggaccgccacatcgagcgggtcaccgagctgcaagaactcttcctcacgcgcgtcgggctcgacatcggcaaggtgtgggtcgcggacgacggcgccgcggtggcggtctggaccacgccggagagcgtcgaagcgggggcggtgttcgccgagatcggcccgcgcatggccgagttgagcggttcccggctggccgcgcagcaacagatggaaggcctcctggcgccgcaccggcccaaggagcccgcgtggttcctggccaccgtcggcgtctcgcccgaccaccagggcaagggtctgggcagcgccgtcgtgctccccggagtggaggcggccgagcgcgccggggtgcccgccttcctggagacctccgcgccccgcaacctccccttctacgagcggctcggcttcaccgtcaccgccgacgtcgaggtgcccgaaggaccgcgcacctggtgcatgacccgcaagcccggtgcctga

SEQ ID NO: 4962 - DNA, 2550 bp, Artificial Sequence
  Synthetic Polynucloetide
atggccttaccagtgaccgccttgctcctgccgctggccttgctgctccacgccgccaggccgggcatgcggactgaagacctcccaaaggctgtggtgttcctggagcctcaatggtacagggtgctggagaaggacagtgtgactctgaagtgccagggagcctactcccctgaggacaattccacacagtggtttcacaatgagagcctcatctcaagccaggcctccagctacttcattgacgctgccacagtggacgacagtggagagtacaggtgccagacaaacctctccaccctcagtgacccggtgcagctagaagtccatatcggctggctgttgctccaggcccctcggtgggtgttcaaggaggaagaccctattcacctgaggtgtcacagctggaagaacactgctctgcataaggtcacatatttacagaatggcaaaggcaggaagtattttcatcataattctgacttctacattccaaaagccacactcaaagacagcggctcctacttctgcagggggcttgttgggagtaaaaatgtgtcttcagagactgtgaacatcaccatcactcaaggtttggcagtgtcaaccatctcatcattctttccacctggctaccaactcgaggacaaaactcacacatgcccaccgtgcccagcacccatcaagaccgatgtgattacaatggaccccaaggacaactgctccaaggacgccaacgataccctgctgctccagctgaccaacaccagcgcctactacatgtacttgttgctgctgctgaagtccgtggtgtacttcgccatcatcacatgctgcctgctgcggagaaccgccttctgctgcaacggcgagaagtctagggccaagcgatctggatctggagcaacaaacttctcactactcaaacaagcaggtgacgtggaggagaatcccgggcctactagtatggactggatttggcgcatccttttccttgtcggcgctgctaccggcgcgcattccgggcccggcatgagaaccgaggacctgcctaaggccgtggtgttcctggaaccccagtggtacagagtgctggaaaaggacagcgtgaccctgaagtgccagggcgcctacagccccgaggacaatagcacccagtggttccacaacgagagcctgatctccagccaggccagcagctacttcatcgacgccgccaccgtggacgacagcggcgagtatagatgccagaccaacctgagcaccctgagcgaccccgtgcagctggaagtgcacatcggatggctgctgctgcaggcccccagatgggtgttcaaagaagaggaccccatccacctgagatgccactcttggaagaacaccgccctgcacaaagtgacctacctgcagaacggcaagggcagaaagtacttccaccacaacagcgacttctacatccccaaggccaccctgaaggactccggctcctacttctgcagaggcctcgtgggcagcaagaacgtgtccagcgagacagtgaacatcaccatcacccagggcctggccgtgtctaccatcagcagctttttcccacccggctaccagacgcgtgataaaactcatacctgtccgccatgcccggcagaagtgaaaaccgactccaccgaccacgtgaagcccaaagagacagagaacaccaagcagcccagcaagagctgccacaagcccaaggccatcgtgcacaccgagaaagtgaacatgatgagcctgaccgtgctgggcctgcggatgctgttcgccaaaaccgtggccgtgaacttcctgctgaccgccaagctgttcttcctccgcgccaagagaagcggatctggcgtgaagcagaccctgaatttcgacctgctgaagctggctggcgacgtggaatccaacccaggcccttctagaggccatatgaccgagtacaagcccacggtgcgcctcgccacccgcgacgacgtccccagggccgtacgcaccctcgccgccgcgttcgccgactaccccgccacgcgccacaccgtcgatccggaccgccacatcgagcgggtcaccgagctgcaagaactcttcctcacgcgcgtcgggctcgacatcggcaaggtgtgggtcgcggacgacggcgccgcggtggcggtctggaccacgccggagagcgtcgaagcgggggcggtgttcgccgagatcggcccgcgcatggccgagttgagcggttcccggctggccgcgcagcaacagatggaaggcctcctggcgccgcaccggcccaaggagcccgcgtggttcctggccaccgtcggcgtctcgcccgaccaccagggcaagggtctgggcagcgccgtcgtgctccccggagtggaggcggccgagcgcgccggggtgcccgccttcctggagacctccgcgccccgcaacctccccttctacgagcggctcggcttcaccgtcaccgccgacgtcgaggtgcccgaaggaccgcgcacctggtgcatgacccgcaagcccggtgcctga

SEQ ID NO: 4963 - DNA, 1848 bp, Artificial Sequence
  Synthetic Polynucloetide
atggccttaccagtgaccgccttgctcctgccgctggccttgctgctccacgccgccaggccgggcatgcggactgaagacctcccaaaggctgtggtgttcctggagcctcaatggtacagggtgctggagaaggacagtgtgactctgaagtgccagggagcctactcccctgaggacaattccacacagtggtttcacaatgagagcctcatctcaagccaggcctccagctacttcattgacgctgccacagtggacgacagtggagagtacaggtgccagacaaacctctccaccctcagtgacccggtgcagctagaagtccatatcggctggctgttgctccaggcccctcggtgggtgttcaaggaggaagaccctattcacctgaggtgtcacagctggaagaacactgctctgcataaggtcacatatttacagaatggcaaaggcaggaagtattttcatcataattctgacttctacattccaaaagccacactcaaagacagcggctcctacttctgcagggggcttgttgggagtaaaaatgtgtcttcagagactgtgaacatcaccatcactcaaggtttggcagtgtcaaccatctcatcattctttccacctggctaccaactcgaggacaaaactcacacatgcccaccgtgcccagcacccatcaagaccgatgtgattacaatggaccccaaggacaactgctccaaggacgccaacgataccctgctgctccagctgaccaacaccagcgcctactacatgtacttgttgctgctgctgaagtccgtggtgtacttcgccatcatcacatgctgcctgctgcggagaaccgccttctgctgcaacggcgagaagtctagggccaagcgatctggatctggagcaacaaacttctcactactcaaacaagcaggtgacgtggaggagaatcccgggcctactagtatggactggatttggcgcatccttttccttgtcggcgctgctaccggcgcgcattccgggcccggcatgagaaccgaggacctgcctaaggccgtggtgttcctggaaccccagtggtacagagtgctggaaaaggacagcgtgaccctgaagtgccagggcgcctacagccccgaggacaatagcacccagtggttccacaacgagagcctgatctccagccaggccagcagctacttcatcgacgccgccaccgtggacgacagcggcgagtatagatgccagaccaacctgagcaccctgagcgaccccgtgcagctggaagtgcacatcggatggctgctgctgcaggcccccagatgggtgttcaaagaagaggaccccatccacctgagatgccactcttggaagaacaccgccctgcacaaagtgacctacctgcagaacggcaagggcagaaagtacttccaccacaacagcgacttctacatccccaaggccaccctgaaggactccggctcctacttctgcagaggcctcgtgggcagcaagaacgtgtccagcgagacagtgaacatcaccatcacccagggcctggccgtgtctaccatcagcagctttttcccacccggctaccagacgcgtgataaaactcatacctgtccgccatgcccggcagaagtgaaaaccgactccaccgaccacgtgaagcccaaagagacagagaacaccaagcagcccagcaagagctgccacaagcccaaggccatcgtgcacaccgagaaagtgaacatgatgagcctgaccgtgctgggcctgcggatgctgttcgccaaaaccgtggccgtgaacttcctgctgaccgccaagctgttcttcctc

SEQ ID NO: 4964 - DNA, 1821 bp, Artificial Sequence
  Synthetic Polynucloetide
atggccttaccagtgaccgccttgctcctgccgctggccttgctgctccacgccgccaggccgggcatgcggactgaagacctcccaaaggctgtggtgttcctggagcctcaatggtacagggtgctggagaaggacagtgtgactctgaagtgccagggagcctactcccctgaggacaattccacacagtggtttcacaatgagagcctcatctcaagccaggcctccagctacttcattgacgctgccacagtggacgacagtggagagtacaggtgccagacaaacctctccaccctcagtgacccggtgcagctagaagtccatatcggctggctgttgctccaggcccctcggtgggtgttcaaggaggaagaccctattcacctgaggtgtcacagctggaagaacactgctctgcataaggtcacatatttacagaatggcaaaggcaggaagtattttcatcataattctgacttctacattccaaaagccacactcaaagacagcggctcctacttctgcagggggcttgttgggagtaaaaatgtgtcttcagagactgtgaacatcaccatcactcaaggtttggcagtgtcaaccatctcatcattctttccacctggctaccaactcgagggatctcccatcaagaccgatgtgattacaatggaccccaaggacaactgctccaaggacgccaacgataccctgctgctccagctgaccaacaccagcgcctactacatgtacttgttgctgctgctgaagtccgtggtgtacttcgccatcatcacatgctgcctgctgcggagaaccgccttctgctgcaacggcgagaagtctagggccaagcgatctggatctggagcaacaaacttctcactactcaaacaagcaggtgacgtggaggagaatcccgggcctactagtatggactggatttggcgcatccttttccttgtcggcgctgctaccggcgcgcattccgggcccggcatgagaaccgaggacctgcctaaggccgtggtgttcctggaaccccagtggtacagagtgctggaaaaggacagcgtgaccctgaagtgccagggcgcctacagccccgaggacaatagcacccagtggttccacaacgagagcctgatctccagccaggccagcagctacttcatcgacgccgccaccgtggacgacagcggcgagtatagatgccagaccaacctgagcaccctgagcgaccccgtgcagctggaagtgcacatcggatggctgctgctgcaggcccccagatgggtgttcaaagaagaggaccccatccacctgagatgccactcttggaagaacaccgccctgcacaaagtgacctacctgcagaacggcaagggcagaaagtacttccaccacaacagcgacttctacatccccaaggccaccctgaaggactccggctcctacttctgcagaggcctcgtgggcagcaagaacgtgtccagcgagacagtgaacatcaccatcacccagggcctggccgtgtctaccatcagcagctttttcccacccggctaccagacgcgtgataaaactcatacctgtccgccatgcccggcagaagtgaaaaccgactccaccgaccacgtgaagcccaaagagacagagaacaccaagcagcccagcaagagctgccacaagcccaaggccatcgtgcacaccgagaaagtgaacatgatgagcctgaccgtgctgggcctgcggatgctgttcgccaaaaccgtggccgtgaacttcctgctgaccgccaagctgttcttcctc

SEQ ID NO: 4965 - DNA, 2472 bp, Artificial Sequence
  Synthetic Polynucloetide
atggccttaccagtgaccgccttgctcctgccgctggccttgctgctccacgccgccaggccgggcatgcggactgaagacctcccaaaggctgtggtgttcctggagcctcaatggtacagggtgctggagaaggacagtgtgactctgaagtgccagggagcctactcccctgaggacaattccacacagtggtttcacaatgagagcctcatctcaagccaggcctccagctacttcattgacgctgccacagtggacgacagtggagagtacaggtgccagacaaacctctccaccctcagtgacccggtgcagctagaagtccatatcggctggctgttgctccaggcccctcggtgggtgttcaaggaggaagaccctattcacctgaggtgtcacagctggaagaacactgctctgcataaggtcacatatttacagaatggcaaaggcaggaagtattttcatcataattctgacttctacattccaaaagccacactcaaagacagcggctcctacttctgcagggggcttgttgggagtaaaaatgtgtcttcagagactgtgaacatcaccatcactcaaggtttggcagtgtcaaccatctcatcattctttccacctggctaccaactcgagggatctatggaccccaaggacaactgctccaaggacgccaacgataccctgctgctccagctgaccaacaccagcgcctactacatgtacttgttgctgctgctgaagtccgtggtgtacttcgccatcatcacatgctgcctgctgcggagaaccgccttctgctgcaacggcgagaagtctagggccaagcgatctggatctggagcaacaaacttctcactactcaaacaagcaggtgacgtggaggagaatcccgggcctactagtatggactggatttggcgcatccttttccttgtcggcgctgctaccggcgcgcattccgggcccggcatgagaaccgaggacctgcctaaggccgtggtgttcctggaaccccagtggtacagagtgctggaaaaggacagcgtgaccctgaagtgccagggcgcctacagccccgaggacaatagcacccagtggttccacaacgagagcctgatctccagccaggccagcagctacttcatcgacgccgccaccgtggacgacagcggcgagtatagatgccagaccaacctgagcaccctgagcgaccccgtgcagctggaagtgcacatcggatggctgctgctgcaggcccccagatgggtgttcaaagaagaggaccccatccacctgagatgccactcttggaagaacaccgccctgcacaaagtgacctacctgcagaacggcaagggcagaaagtacttccaccacaacagcgacttctacatccccaaggccaccctgaaggactccggctcctacttctgcagaggcctcgtgggcagcaagaacgtgtccagcgagacagtgaacatcaccatcacccagggcctggccgtgtctaccatcagcagctttttcccacccggctaccagacgcgtggcagcgaagtgaaaaccgactccaccgaccacgtgaagcccaaagagacagagaacaccaagcagcccagcaagagctgccacaagcccaaggccatcgtgcacaccgagaaagtgaacatgatgagcctgaccgtgctgggcctgcggatgctgttcgccaaaaccgtggccgtgaacttcctgctgaccgccaagctgttcttcctccgcgccaagagaagcggatctggcgtgaagcagaccctgaatttcgacctgctgaagctggctggcgacgtggaatccaacccaggcccttctagaggccatatgaccgagtacaagcccacggtgcgcctcgccacccgcgacgacgtccccagggccgtacgcaccctcgccgccgcgttcgccgactaccccgccacgcgccacaccgtcgatccggaccgccacatcgagcgggtcaccgagctgcaagaactcttcctcacgcgcgtcgggctcgacatcggcaaggtgtgggtcgcggacgacggcgccgcggtggcggtctggaccacgccggagagcgtcgaagcgggggcggtgttcgccgagatcggcccgcgcatggccgagttgagcggttcccggctggccgcgcagcaacagatggaaggcctcctggcgccgcaccggcccaaggagcccgcgtggttcctggccaccgtcggcgtctcgcccgaccaccagggcaagggtctgggcagcgccgtcgtgctccccggagtggaggcggccgagcgcgccggggtgcccgccttcctggagacctccgcgccccgcaacctccccttctacgagcggctcggcttcaccgtcaccgccgacgtcgaggtgcccgaaggaccgcgcacctggtgcatgacccgcaagcccggtgcctga

SEQ ID NO: 4966 - DNA, 2475 bp, Artificial Sequence
  Synthetic Polynucloetide
atggccttaccagtgaccgccttgctcctgccgctggccttgctgctccacgccgccaggccgggcatgcggactgaagacctcccaaaggctgtggtgttcctggagcctcaatggtacagggtgctggagaaggacagtgtgactctgaagtgccagggagcctactcccctgaggacaattccacacagtggtttcacaatgagagcctcatctcaagccaggcctccagctacttcattgacgctgccacagtggacgacagtggagagtacaggtgccagacaaacctctccaccctcagtgacccggtgcagctagaagtccatatcggctggctgttgctccaggcccctcggtgggtgttcaaggaggaagaccctattcacctgaggtgtcacagctggaagaacactgctctgcataaggtcacatatttacagaatggcaaaggcaggaagtattttcatcataattctgacttctacattccaaaagccacactcaaagacagcggctcctacttctgcagggggcttgttgggagtaaaaatgtgtcttcagagactgtgaacatcaccatcactcaaggtttggcagtgtcaaccatctcatcattctttccacctggctaccaactcgagggatctcccatcaagaccgatgtgattacaatggaccccaaggacaactgctccaaggacgccaacgataccctgctgctccagctgaccaacaccagcgcctactacatgtacttgttgctgctgctgaagtccgtggtgtacttcgccatcatcacatgctgcctgctgcggagaaccgccttctgctgcaacggcgagaagtctagggccaagcgatctggatctggagcaacaaacttctcactactcaaacaagcaggtgacgtggaggagaatcccgggcctactagtatggactggatttggcgcatccttttccttgtcggcgctgctaccggcgcgcattccgggcccggcatgagaaccgaggacctgcctaaggccgtggtgttcctggaaccccagtggtacagagtgctggaaaaggacagcgtgaccctgaagtgccagggcgcctacagccccgaggacaatagcacccagtggttccacaacgagagcctgatctccagccaggccagcagctacttcatcgacgccgccaccgtggacgacagcggcgagtatagatgccagaccaacctgagcaccctgagcgaccccgtgcagctggaagtgcacatcggatggctgctgctgcaggcccccagatgggtgttcaaagaagaggaccccatccacctgagatgccactcttggaagaacaccgccctgcacaaagtgacctacctgcagaacggcaagggcagaaagtacttccaccacaacagcgacttctacatccccaaggccaccctgaaggactccggctcctacttctgcagaggcctcgtgggcagcaagaacgtgtccagcgagacagtgaacatcaccatcacccagggcctggccgtgtctaccatcagcagctttttcccacccggctaccagacgcgtggcagcgaccacgtgaagcccaaagagacagagaacaccaagcagcccagcaagagctgccacaagcccaaggccatcgtgcacaccgagaaagtgaacatgatgagcctgaccgtgctgggcctgcggatgctgttcgccaaaaccgtggccgtgaacttcctgctgaccgccaagctgttcttcctccgcgccaagagaagcggatctggcgtgaagcagaccctgaatttcgacctgctgaagctggctggcgacgtggaatccaacccaggcccttctagaggccatatgaccgagtacaagcccacggtgcgcctcgccacccgcgacgacgtccccagggccgtacgcaccctcgccgccgcgttcgccgactaccccgccacgcgccacaccgtcgatccggaccgccacatcgagcgggtcaccgagctgcaagaactcttcctcacgcgcgtcgggctcgacatcggcaaggtgtgggtcgcggacgacggcgccgcggtggcggtctggaccacgccggagagcgtcgaagcgggggcggtgttcgccgagatcggcccgcgcatggccgagttgagcggttcccggctggccgcgcagcaacagatggaaggcctcctggcgccgcaccggcccaaggagcccgcgtggttcctggccaccgtcggcgtctcgcccgaccaccagggcaagggtctgggcagcgccgtcgtgctccccggagtggaggcggccgagcgcgccggggtgcccgccttcctggagacctccgcgccccgcaacctccccttctacgagcggctcggcttcaccgtcaccgccgacgtcgaggtgcccgaaggaccgcgcacctggtgcatgacccgcaagcccggtgcctga

SEQ ID NO: 4967 - DNA, 2451 bp, Artificial Sequence
  Synthetic Polynucloetide
atggccttaccagtgaccgccttgctcctgccgctggccttgctgctccacgccgccaggccgggcatgcggactgaagacctcccaaaggctgtggtgttcctggagcctcaatggtacagggtgctggagaaggacagtgtgactctgaagtgccagggagcctactcccctgaggacaattccacacagtggtttcacaatgagagcctcatctcaagccaggcctccagctacttcattgacgctgccacagtggacgacagtggagagtacaggtgccagacaaacctctccaccctcagtgacccggtgcagctagaagtccatatcggctggctgttgctccaggcccctcggtgggtgttcaaggaggaagaccctattcacctgaggtgtcacagctggaagaacactgctctgcataaggtcacatatttacagaatggcaaaggcaggaagtattttcatcataattctgacttctacattccaaaagccacactcaaagacagcggctcctacttctgcagggggcttgttgggagtaaaaatgtgtcttcagagactgtgaacatcaccatcactcaaggtttggcagtgtcaaccatctcatcattctttccacctggctaccaactcgagggatctatggaccccaaggacaactgctccaaggacgccaacgataccctgctgctccagctgaccaacaccagcgcctactacatgtacttgttgctgctgctgaagtccgtggtgtacttcgccatcatcacatgctgcctgctgcggagaaccgccttctgctgcaacggcgagaagtctagggccaagcgatctggatctggagcaacaaacttctcactactcaaacaagcaggtgacgtggaggagaatcccgggcctactagtatggactggatttggcgcatccttttccttgtcggcgctgctaccggcgcgcattccgggcccggcatgagaaccgaggacctgcctaaggccgtggtgttcctggaaccccagtggtacagagtgctggaaaaggacagcgtgaccctgaagtgccagggcgcctacagccccgaggacaatagcacccagtggttccacaacgagagcctgatctccagccaggccagcagctacttcatcgacgccgccaccgtggacgacagcggcgagtatagatgccagaccaacctgagcaccctgagcgaccccgtgcagctggaagtgcacatcggatggctgctgctgcaggcccccagatgggtgttcaaagaagaggaccccatccacctgagatgccactcttggaagaacaccgccctgcacaaagtgacctacctgcagaacggcaagggcagaaagtacttccaccacaacagcgacttctacatccccaaggccaccctgaaggactccggctcctacttctgcagaggcctcgtgggcagcaagaacgtgtccagcgagacagtgaacatcaccatcacccagggcctggccgtgtctaccatcagcagctttttcccacccggctaccagacgcgtggcagcgaccacgtgaagcccaaagagacagagaacaccaagcagcccagcaagagctgccacaagcccaaggccatcgtgcacaccgagaaagtgaacatgatgagcctgaccgtgctgggcctgcggatgctgttcgccaaaaccgtggccgtgaacttcctgctgaccgccaagctgttcttcctccgcgccaagagaagcggatctggcgtgaagcagaccctgaatttcgacctgctgaagctggctggcgacgtggaatccaacccaggcccttctagaggccatatgaccgagtacaagcccacggtgcgcctcgccacccgcgacgacgtccccagggccgtacgcaccctcgccgccgcgttcgccgactaccccgccacgcgccacaccgtcgatccggaccgccacatcgagcgggtcaccgagctgcaagaactcttcctcacgcgcgtcgggctcgacatcggcaaggtgtgggtcgcggacgacggcgccgcggtggcggtctggaccacgccggagagcgtcgaagcgggggcggtgttcgccgagatcggcccgcgcatggccgagttgagcggttcccggctggccgcgcagcaacagatggaaggcctcctggcgccgcaccggcccaaggagcccgcgtggttcctggccaccgtcggcgtctcgcccgaccaccagggcaagggtctgggcagcgccgtcgtgctccccggagtggaggcggccgagcgcgccggggtgcccgccttcctggagacctccgcgccccgcaacctccccttctacgagcggctcggcttcaccgtcaccgccgacgtcgaggtgcccgaaggaccgcgcacctggtgcatgacccgcaagcccggtgcctga

SEQ ID NO: 4968 - DNA, 1749 bp, Artificial Sequence
  Synthetic Polynucloetide
atggccttaccagtgaccgccttgctcctgccgctggccttgctgctccacgccgccaggccgggcatgcggactgaagacctcccaaaggctgtggtgttcctggagcctcaatggtacagggtgctggagaaggacagtgtgactctgaagtgccagggagcctactcccctgaggacaattccacacagtggtttcacaatgagagcctcatctcaagccaggcctccagctacttcattgacgctgccacagtggacgacagtggagagtacaggtgccagacaaacctctccaccctcagtgacccggtgcagctagaagtccatatcggctggctgttgctccaggcccctcggtgggtgttcaaggaggaagaccctattcacctgaggtgtcacagctggaagaacactgctctgcataaggtcacatatttacagaatggcaaaggcaggaagtattttcatcataattctgacttctacattccaaaagccacactcaaagacagcggctcctacttctgcagggggcttgttgggagtaaaaatgtgtcttcagagactgtgaacatcaccatcactcaaggtttggcagtgtcaaccatctcatcattctttccacctggctaccaactcgagggatctatggaccccaaggacaactgctccaaggacgccaacgataccctgctgctccagctgaccaacaccagcgcctactacatgtacttgttgctgctgctgaagtccgtggtgtacttcgccatcatcacatgctgcctgctgcggagaaccgccttctgctgcaacggcgagaagtctagggccaagcgatctggatctggagcaacaaacttctcactactcaaacaagcaggtgacgtggaggagaatcccgggcctactagtatggactggatttggcgcatccttttccttgtcggcgctgctaccggcgcgcattccgggcccggcatgagaaccgaggacctgcctaaggccgtggtgttcctggaaccccagtggtacagagtgctggaaaaggacagcgtgaccctgaagtgccagggcgcctacagccccgaggacaatagcacccagtggttccacaacgagagcctgatctccagccaggccagcagctacttcatcgacgccgccaccgtggacgacagcggcgagtatagatgccagaccaacctgagcaccctgagcgaccccgtgcagctggaagtgcacatcggatggctgctgctgcaggcccccagatgggtgttcaaagaagaggaccccatccacctgagatgccactcttggaagaacaccgccctgcacaaagtgacctacctgcagaacggcaagggcagaaagtacttccaccacaacagcgacttctacatccccaaggccaccctgaaggactccggctcctacttctgcagaggcctcgtgggcagcaagaacgtgtccagcgagacagtgaacatcaccatcacccagggcctggccgtgtctaccatcagcagctttttcccacccggctaccagacgcgtggcagcgaccacgtgaagcccaaagagacagagaacaccaagcagcccagcaagagctgccacaagcccaaggccatcgtgcacaccgagaaagtgaacatgatgagcctgaccgtgctgggcctgcggatgctgttcgccaaaaccgtggccgtgaacttcctgctgaccgccaagctgttcttcctc

SEQ ID NO: 4969 - DNA, 2478 bp, Artificial Sequence
  Synthetic Polynucloetide
atggccttaccagtgaccgccttgctcctgccgctggccttgctgctccacgccgccaggccgggcatgcggactgaagacctcccaaaggctgtggtgttcctggagcctcaatggtacagggtgctggagaaggacagtgtgactctgaagtgccagggagcctactcccctgaggacaattccacacagtggtttcacaatgagagcctcatctcaagccaggcctccagctacttcattgacgctgccacagtggacgacagtggagagtacaggtgccagacaaacctctccaccctcagtgacccggtgcagctagaagtccatatcggctggctgttgctccaggcccctcggtgggtgttcaaggaggaagaccctattcacctgaggtgtcacagctggaagaacactgctctgcataaggtcacatatttacagaatggcaaaggcaggaagtattttcatcataattctgacttctacattccaaaagccacactcaaagacagcggctcctacttctgcagggggcttgttgggagtaaaaatgtgtcttcagagactgtgaacatcaccatcactcaaggtttggcagtgtcaaccatctcatcattctttccacctggctaccaactcgaggacaaaactcacacatgcccaccgtgcccagcaatggaccccaaggacaactgctccaaggacgccaacgataccctgctgctccagctgaccaacaccagcgcctactacatgtacttgttgctgctgctgaagtccgtggtgtacttcgccatcatcacatgctgcctgctgcggagaaccgccttctgctgcaacggcgagaagtctagggccaagcgatctggatctggagcaacaaacttctcactactcaaacaagcaggtgacgtggaggagaatcccgggcctactagtatggactggatttggcgcatccttttccttgtcggcgctgctaccggcgcgcattccgggcccggcatgagaaccgaggacctgcctaaggccgtggtgttcctggaaccccagtggtacagagtgctggaaaaggacagcgtgaccctgaagtgccagggcgcctacagccccgaggacaatagcacccagtggttccacaacgagagcctgatctccagccaggccagcagctacttcatcgacgccgccaccgtggacgacagcggcgagtatagatgccagaccaacctgagcaccctgagcgaccccgtgcagctggaagtgcacatcggatggctgctgctgcaggcccccagatgggtgttcaaagaagaggaccccatccacctgagatgccactcttggaagaacaccgccctgcacaaagtgacctacctgcagaacggcaagggcagaaagtacttccaccacaacagcgacttctacatccccaaggccaccctgaaggactccggctcctacttctgcagaggcctcgtgggcagcaagaacgtgtccagcgagacagtgaacatcaccatcacccagggcctggccgtgtctaccatcagcagctttttcccacccggctaccagacgcgtggcagcgaccacgtgaagcccaaagagacagagaacaccaagcagcccagcaagagctgccacaagcccaaggccatcgtgcacaccgagaaagtgaacatgatgagcctgaccgtgctgggcctgcggatgctgttcgccaaaaccgtggccgtgaacttcctgctgaccgccaagctgttcttcctccgcgccaagagaagcggatctggcgtgaagcagaccctgaatttcgacctgctgaagctggctggcgacgtggaatccaacccaggcccttctagaggccatatgaccgagtacaagcccacggtgcgcctcgccacccgcgacgacgtccccagggccgtacgcaccctcgccgccgcgttcgccgactaccccgccacgcgccacaccgtcgatccggaccgccacatcgagcgggtcaccgagctgcaagaactcttcctcacgcgcgtcgggctcgacatcggcaaggtgtgggtcgcggacgacggcgccgcggtggcggtctggaccacgccggagagcgtcgaagcgggggcggtgttcgccgagatcggcccgcgcatggccgagttgagcggttcccggctggccgcgcagcaacagatggaaggcctcctggcgccgcaccggcccaaggagcccgcgtggttcctggccaccgtcggcgtctcgcccgaccaccagggcaagggtctgggcagcgccgtcgtgctccccggagtggaggcggccgagcgcgccggggtgcccgccttcctggagacctccgcgccccgcaacctccccttctacgagcggctcggcttcaccgtcaccgccgacgtcgaggtgcccgaaggaccgcgcacctggtgcatgacccgcaagcccggtgcctga

SEQ ID NO: 4970 - DNA, 2505 bp, Artificial Sequence
  Synthetic Polynucloetide
atggccttaccagtgaccgccttgctcctgccgctggccttgctgctccacgccgccaggccgggcatgcggactgaagacctcccaaaggctgtggtgttcctggagcctcaatggtacagggtgctggagaaggacagtgtgactctgaagtgccagggagcctactcccctgaggacaattccacacagtggtttcacaatgagagcctcatctcaagccaggcctccagctacttcattgacgctgccacagtggacgacagtggagagtacaggtgccagacaaacctctccaccctcagtgacccggtgcagctagaagtccatatcggctggctgttgctccaggcccctcggtgggtgttcaaggaggaagaccctattcacctgaggtgtcacagctggaagaacactgctctgcataaggtcacatatttacagaatggcaaaggcaggaagtattttcatcataattctgacttctacattccaaaagccacactcaaagacagcggctcctacttctgcagggggcttgttgggagtaaaaatgtgtcttcagagactgtgaacatcaccatcactcaaggtttggcagtgtcaaccatctcatcattctttccacctggctaccaactcgaggacaaaactcacacatgcccaccgtgcccagcaatggaccccaaggacaactgctccaaggacgccaacgataccctgctgctccagctgaccaacaccagcgcctactacatgtacttgttgctgctgctgaagtccgtggtgtacttcgccatcatcacatgctgcctgctgcggagaaccgccttctgctgcaacggcgagaagtctagggccaagcgatctggatctggagcaacaaacttctcactactcaaacaagcaggtgacgtggaggagaatcccgggcctactagtatggactggatttggcgcatccttttccttgtcggcgctgctaccggcgcgcattccgggcccggcatgagaaccgaggacctgcctaaggccgtggtgttcctggaaccccagtggtacagagtgctggaaaaggacagcgtgaccctgaagtgccagggcgcctacagccccgaggacaatagcacccagtggttccacaacgagagcctgatctccagccaggccagcagctacttcatcgacgccgccaccgtggacgacagcggcgagtatagatgccagaccaacctgagcaccctgagcgaccccgtgcagctggaagtgcacatcggatggctgctgctgcaggcccccagatgggtgttcaaagaagaggaccccatccacctgagatgccactcttggaagaacaccgccctgcacaaagtgacctacctgcagaacggcaagggcagaaagtacttccaccacaacagcgacttctacatccccaaggccaccctgaaggactccggctcctacttctgcagaggcctcgtgggcagcaagaacgtgtccagcgagacagtgaacatcaccatcacccagggcctggccgtgtctaccatcagcagctttttcccacccggctaccagacgcgtgataaaactcatacctgtccgccatgcccggcagaccacgtgaagcccaaagagacagagaacaccaagcagcccagcaagagctgccacaagcccaaggccatcgtgcacaccgagaaagtgaacatgatgagcctgaccgtgctgggcctgcggatgctgttcgccaaaaccgtggccgtgaacttcctgctgaccgccaagctgttcttcctccgcgccaagagaagcggatctggcgtgaagcagaccctgaatttcgacctgctgaagctggctggcgacgtggaatccaacccaggcccttctagaggccatatgaccgagtacaagcccacggtgcgcctcgccacccgcgacgacgtccccagggccgtacgcaccctcgccgccgcgttcgccgactaccccgccacgcgccacaccgtcgatccggaccgccacatcgagcgggtcaccgagctgcaagaactcttcctcacgcgcgtcgggctcgacatcggcaaggtgtgggtcgcggacgacggcgccgcggtggcggtctggaccacgccggagagcgtcgaagcgggggcggtgttcgccgagatcggcccgcgcatggccgagttgagcggttcccggctggccgcgcagcaacagatggaaggcctcctggcgccgcaccggcccaaggagcccgcgtggttcctggccaccgtcggcgtctcgcccgaccaccagggcaagggtctgggcagcgccgtcgtgctccccggagtggaggcggccgagcgcgccggggtgcccgccttcctggagacctccgcgccccgcaacctccccttctacgagcggctcggcttcaccgtcaccgccgacgtcgaggtgcccgaaggaccgcgcacctggtgcatgacccgcaagcccggtgcctga

SEQ ID NO: 4971 - DNA, 1803 bp, Artificial Sequence
  Synthetic Polynucloetide
atggccttaccagtgaccgccttgctcctgccgctggccttgctgctccacgccgccaggccgggcatgcggactgaagacctcccaaaggctgtggtgttcctggagcctcaatggtacagggtgctggagaaggacagtgtgactctgaagtgccagggagcctactcccctgaggacaattccacacagtggtttcacaatgagagcctcatctcaagccaggcctccagctacttcattgacgctgccacagtggacgacagtggagagtacaggtgccagacaaacctctccaccctcagtgacccggtgcagctagaagtccatatcggctggctgttgctccaggcccctcggtgggtgttcaaggaggaagaccctattcacctgaggtgtcacagctggaagaacactgctctgcataaggtcacatatttacagaatggcaaaggcaggaagtattttcatcataattctgacttctacattccaaaagccacactcaaagacagcggctcctacttctgcagggggcttgttgggagtaaaaatgtgtcttcagagactgtgaacatcaccatcactcaaggtttggcagtgtcaaccatctcatcattctttccacctggctaccaactcgaggacaaaactcacacatgcccaccgtgcccagcaatggaccccaaggacaactgctccaaggacgccaacgataccctgctgctccagctgaccaacaccagcgcctactacatgtacttgttgctgctgctgaagtccgtggtgtacttcgccatcatcacatgctgcctgctgcggagaaccgccttctgctgcaacggcgagaagtctagggccaagcgatctggatctggagcaacaaacttctcactactcaaacaagcaggtgacgtggaggagaatcccgggcctactagtatggactggatttggcgcatccttttccttgtcggcgctgctaccggcgcgcattccgggcccggcatgagaaccgaggacctgcctaaggccgtggtgttcctggaaccccagtggtacagagtgctggaaaaggacagcgtgaccctgaagtgccagggcgcctacagccccgaggacaatagcacccagtggttccacaacgagagcctgatctccagccaggccagcagctacttcatcgacgccgccaccgtggacgacagcggcgagtatagatgccagaccaacctgagcaccctgagcgaccccgtgcagctggaagtgcacatcggatggctgctgctgcaggcccccagatgggtgttcaaagaagaggaccccatccacctgagatgccactcttggaagaacaccgccctgcacaaagtgacctacctgcagaacggcaagggcagaaagtacttccaccacaacagcgacttctacatccccaaggccaccctgaaggactccggctcctacttctgcagaggcctcgtgggcagcaagaacgtgtccagcgagacagtgaacatcaccatcacccagggcctggccgtgtctaccatcagcagctttttcccacccggctaccagacgcgtgataaaactcatacctgtccgccatgcccggcagaccacgtgaagcccaaagagacagagaacaccaagcagcccagcaagagctgccacaagcccaaggccatcgtgcacaccgagaaagtgaacatgatgagcctgaccgtgctgggcctgcggatgctgttcgccaaaaccgtggccgtgaacttcctgctgaccgccaagctgttcttcctc

SEQ ID NO: 4972 - DNA, 1122 bp, Artificial Sequence; identical to SEQ ID NO: 4845
  Synthetic Polynucloetide

SEQ ID NO: 4973 - DNA, 1134 bp, Artificial Sequence
  Synthetic Polynucloetide
atggactggatttggcgcatccttttccttgtcggcgctgctaccggcgcgcattccgggcccggcatgagaaccgaggacctgcctaaggccgtggtgttcctggaaccccagtggtacagagtgctggaaaaggacagcgtgaccctgaagtgccagggcgcctacagccccgaggacaatagcacccagtggttccacaacgagagcctgatctccagccaggccagcagctacttcatcgacgccgccaccgtggacgacagcggcgagtatagatgccagaccaacctgagcaccctgagcgaccccgtgcagctggaagtgcacatcggatggctgctgctgcaggcccccagatgggtgttcaaagaagaggaccccatccacctgagatgccactcttggaagaacaccgccctgcacaaagtgacctacctgcagaacggcaagggcagaaagtacttccaccacaacagcgacttctacatccccaaggccaccctgaaggactccggctcctacttctgcagaggcctcgtgggcagcaagaacgtgtccagcgagacagtgaacatcaccatcacccagggcctggccgtgtctaccatcagcagctttttcccacccggctaccagacgcgtgcctctacaaagggaccctccgtgtttcctctggctcccagcagcaagtctacaagcggaggaacagccgctctgggctgcctggtcaaggattactttcccgagcctgtgaccgtgtcctggaatagcggagcactgacaagcggcgtgcacacctttccagccgtgctgcaaagcagcggcctgtactctctgagcagcgtggtcacagtgcctagctctagcctgggcacccagacctacatctgcaatgtgaaccacaagcctagcaacaccaaggtggacaagagagtggaacccaagagctgtatccccgaggacacattcttcccaagccccgagagcagctgcgacgtgaagctggtggaaaagagcttcgagacagacaccaacctgaacttccagaacctgagcgtgatcggcttcagaatcctgctgctgaaagtggccggctttaacctgctgatgaccctgcggctgtggtccagc

SEQ ID NO: 4974 - DNA, 1164 bp, Artificial Sequence; identical to SEQ ID NO: 4847
  Synthetic Polynucloetide

SEQ ID NO: 4975 - DNA, 1158 bp, Artificial Sequence
  Synthetic Polynucloetide
atggactggatttggcgcatccttttccttgtcggcgctgctaccggcgcgcattccgggcccggcatgagaaccgaggacctgcctaaggccgtggtgttcctggaaccccagtggtacagagtgctggaaaaggacagcgtgaccctgaagtgccagggcgcctacagccccgaggacaatagcacccagtggttccacaacgagagcctgatctccagccaggccagcagctacttcatcgacgccgccaccgtggacgacagcggcgagtatagatgccagaccaacctgagcaccctgagcgaccccgtgcagctggaagtgcacatcggatggctgctgctgcaggcccccagatgggtgttcaaagaagaggaccccatccacctgagatgccactcttggaagaacaccgccctgcacaaagtgacctacctgcagaacggcaagggcagaaagtacttccaccacaacagcgacttctacatccccaaggccaccctgaaggactccggctcctacttctgcagaggcctcgtgggcagcaagaacgtgtccagcgagacagtgaacatcaccatcacccagggcctggccgtgtctaccatcagcagctttttcccacccggctaccagacgcgtgcctctacaaagggaccctccgtgtttcctctggctcccagcagcaagtctacaagcggaggaacagccgctctgggctgcctggtcaaggattactttcccgagcctgtgaccgtgtcctggaatagcggagcactgacaagcggcgtgcacacctttccagccgtgctgcaaagcagcggcctgtactctctgagcagcgtggtcacagtgcctagctctagcctgggcacccagacctacatctgcaatgtgaaccacaagcctagcaacaccaaggtggacaagagagtggaacccaagagctgtgaagtgaaaaccgactccaccgaccacgtgaagcccaaagagacagagaacaccaagcagcccagcaagagctgccacaagcccaaggccatcgtgcacaccgagaaagtgaacatgatgagcctgaccgtgctgggcctgcggatgctgttcgccaaaaccgtggccgtgaacttcctgctgaccgccaagctgttcttcctc

SEQ ID NO: 4976 - DNA, 1917 bp, Artificial Sequence
  Synthetic Polynucloetide
atggccttaccagtgaccgccttgctcctgccgctggccttgctgctccacgccgccaggccgcaggtccagctcgtcgagtccggcggcggcctcgtccaggccggcgactccgtcaccctctcctgcaccgcctccggccgcaccttctcctcctacgccctcgcctggttccgccagcgccccggcaaggagcgcgagttcgtcgccggcctccgctggggcggccccaccaactacgccgactccgtcaaggaccgcttcaccatctccggcgactccgccaagcacaccatgtacctccagatgaactccctcaagcccgaggacaccgccgtctactactgcggctacaaccccggcggctgggccgtcccctcccagtacgagtacgactcctggggccagggcacccaggtcaccgtctcctccggtaccggcggaggcggatctggcggcggaggtagcggtggcggaggatctgaattcgacatccagatgacacagagccctagcagcctgtctgccagcgtgggagacagagtgaccatcacatgcaaggccagcgaccacatcaacaactggctggcctggtatcagcagaagcctggacaggcccctaagctgctgatctacggcgctaccacactggaaacaggcgtgcccagcagattttctggcagcggctctggcaccgactacaccctgacaatatccagcctccagcctgaggacttcgccacctactactgtcagcagagctggaacaccccttggacattcggccagggcaccaagctggaaatcaagagaggcggaggcggaagtggaggcggaggatctggcggcggaggctctcaagttcagcttcaacagcctggcgctgagctggtcaaacctggcgcttctgtgaagatgagctgcaaagccagcggctacgccttcagcagctactggatcaactggatgaagcagaaacccggccagggactcgaatggatcggccaaatctatcccggcgacggcgacaccaactacaacggcaagttcaagggcagagccacactgaccgccgatacctctagcagcacagcctacatgcagctgagcagcctgaccagcgaagatagcgccgtgtacttctgtgcccggtccatcacaacagtcgtgggctgcgctatggactattggggccagggaacaagcgtgaccgtgtctagtacgcgtgagcagaaactgatctcggaagaggatctgaaaattgaagttatgtatcctcctccttacctagacaatgagaagagcaatggaaccattatccatgtgaaagggaaacacctttgtccaagtcccctatttcccggaccttctaagcccttttgggtgctggtggtggttgggggagtcctggcttgctatagcttgctagtaacagtggcctttattattttctgggtgaggagtaagaggagcaggctcctgcacagtgactacatgaacatgactccacgccgccccggacccacccgcaagcattaccagccctatgccccaccacgcgacttcgcagcctatcgctccagagtgaagttcagcaggagcgcagacgcccccgcgtaccagcagggccagaaccagctctataacgagctcaatctaggacgaagagaggagtacgatgttttggacaagagacgtggccgggaccctgagatggggggaaagccgagaaggaagaaccctcaggaaggcctgtacaatgaactgcagaaagataagatggcggaggcctacagtgagattgggatgaaaggcgagcgccggaggggcaaggggcacgatggcctttaccagggtctcagtacagccaccaaggacacctacgacgcccttcacatgcaggccctgccccctcgc

SEQ ID NO: 4977 - DNA, 1938 bp, Artificial Sequence
  Synthetic Polynucloetide
atggccttaccagtgaccgccttgctcctgccgctggccttgctgctccacgccgccaggccgcaggtccagctcgtcgagtccggcggcggcctcgtccaggccggcgactccgtcaccctctcctgcaccgcctccggccgcaccttctcctcctacgccctcgcctggttccgccagcgccccggcaaggagcgcgagttcgtcgccggcctccgctggggcggccccaccaactacgccgactccgtcaaggaccgcttcaccatctccggcgactccgccaagcacaccatgtacctccagatgaactccctcaagcccgaggacaccgccgtctactactgcggctacaaccccggcggctgggccgtcccctcccagtacgagtacgactcctggggccagggcacccaggtcaccgtctcctccggtaccggcggaggcggatctggcggcggaggtagcggtggcggaggatctgaattcgacatccagatgacacagagccctagcagcctgtctgccagcgtgggagacagagtgaccatcacatgcaaggccagcgaccacatcaacaactggctggcctggtatcagcagaagcctggacaggcccctaagctgctgatctacggcgctaccacactggaaacaggcgtgcccagcagattttctggcagcggctctggcaccgactacaccctgacaatatccagcctccagcctgaggacttcgccacctactactgtcagcagagctggaacaccccttggacattcggccagggcaccaagctggaaatcaagagaggcggaggcggaagtggaggcggaggatctggcggcggaggctctcaagttcagcttcaacagcctggcgctgagctggtcaaacctggcgcttctgtgaagatgagctgcaaagccagcggctacgccttcagcagctactggatcaactggatgaagcagaaacccggccagggactcgaatggatcggccaaatctatcccggcgacggcgacaccaactacaacggcaagttcaagggcagagccacactgaccgccgatacctctagcagcacagcctacatgcagctgagcagcctgaccagcgaagatagcgccgtgtacttctgtgcccggtccatcacaacagtcgtgggctgcgctatggactattggggccagggaacaagcgtgaccgtgtctagtacgcgtgagcagaaactgatctcggaagaggatctggcgaagcccaccacgacgccagcgccgcgaccaccaacaccggcgcccaccatcgcgtcgcagcccctgtccctgcgcccagaggcgtgccggccagcggcggggggcgcagtgcacacgagggggctggacttcgcctgtgacatctacatctgggcgcccttggccgggacttgtggggtccttctcctgtcactggttatcaccctttactgcaaacggggcagaaagaaactcctgtatatattcaaacaaccatttatgagaccagtacaaactactcaagaggaagatggctgtagctgccgatttccagaagaagaagaaggaggatgtgaactgagagtgaagttcagcaggagcgcagacgcccccgcgtaccagcagggccagaaccagctctataacgagctgaatctaggacgaagagaggagtacgatgttttggacaagagacgtggccgggaccctgagatggggggaaagccgagaaggaagaaccctcaggaaggcctgtacaatgaactgcagaaagataagatggcggaggcctacagtgagattgggatgaaaggcgagcgccggaggggcaaggggcacgatggcctttaccagggtctcagtacagccaccaaggacacctacgacgcccttcacatgcaggccctgccccctcgctga

SEQ ID NO: 4978 - DNA, 3177 bp, Artificial Sequence
  Synthetic Polynucloetide
atggccttaccagtgaccgccttgctcctgccgctggccttgctgctccacgccgccaggccgcaggtccagctcgtcgagtccggcggcggcctcgtccaggccggcgactccgtcaccctctcctgcaccgcctccggccgcaccttctcctcctacgccctcgcctggttccgccagcgccccggcaaggagcgcgagttcgtcgccggcctccgctggggcggccccaccaactacgccgactccgtcaaggaccgcttcaccatctccggcgactccgccaagcacaccatgtacctccagatgaactccctcaagcccgaggacaccgccgtctactactgcggctacaaccccggcggctgggccgtcccctcccagtacgagtacgactcctggggccagggcacccaggtcaccgtctcctccggtaccggcggaggcggatctggcggcggaggtagcggtggcggaggatctgaattcgacatccagatgacacagagccctagcagcctgtctgccagcgtgggagacagagtgaccatcacatgcaaggccagcgaccacatcaacaactggctggcctggtatcagcagaagcctggacaggcccctaagctgctgatctacggcgctaccacactggaaacaggcgtgcccagcagattttctggcagcggctctggcaccgactacaccctgacaatatccagcctccagcctgaggacttcgccacctactactgtcagcagagctggaacaccccttggacattcggccagggcaccaagctggaaatcaagagaggcggaggcggaagtggaggcggaggatctggcggcggaggctctcaagttcagcttcaacagcctggcgctgagctggtcaaacctggcgcttctgtgaagatgagctgcaaagccagcggctacgccttcagcagctactggatcaactggatgaagcagaaacccggccagggactcgaatggatcggccaaatctatcccggcgacggcgacaccaactacaacggcaagttcaagggcagagccacactgaccgccgatacctctagcagcacagcctacatgcagctgagcagcctgaccagcgaagatagcgccgtgtacttctgtgcccggtccatcacaacagtcgtgggctgcgctatggactattggggccagggaacaagcgtgaccgtgtctagtacgcgtgagcagaaactgatctcggaagaggatctggcgaagcccaccacgacgccagcgccgcgaccaccaacaccggcgcccaccatcgcgtcgcagcccctgtccctgcgcccagaggcgtgccggccagcggcggggggcgcagtgcacacgagggggctggacttcgcctgtgacatctacatctgggcgcccttggccgggacttgtggggtccttctcctgtcactggttatcaccctttactgcgggcgcgccagagtgaagttcagcaggagcgcagacgcccccgcgtaccagcagggccagaaccagctctataacgagctgaatctaggacgaagagaggagtacgatgttttggacaagagacgtggccgggaccctgagatggggggaaagccgagaaggaagaaccctcaggaaggcctgtacaatgaactgcagaaagataagatggcggaggcctacagtgagattgggatgaaaggcgagcgccggaggggcaaggggcacgatggcctttaccagggtctcagtacagccaccaaggacacctacgacgcccttcacatgcaggccctgccccctcgctctagaggatctggagcaacaaacttctcactactcaaacaagcaggtgacgtggaggagaatcccgggcctgggatccacatggccacttacgaggttctctgtgaggtggcgcggaaactgggcacggatgacagggaagtggtattgttcctcctaaacgtgttcatacctcaacccacactggcccaattaattggagctcttagagctttaaaggaggagggcaggttaacgtttcccctgttagcggaatgtctgtttcgtgcaggtcgcagagacctcttgcgcgacctgcttcacttagacccgcgttttttagagcgccacctagcgggcacaatgagttatttcagcccttatcagctcactgttctccacgtagacggggagctgtgtgcgagggatattaggtctttgatatttttaagcaaggacactatagggtctcgcagcacaccacagacattcttacactgggtgtactgtatggaaaacttagacctactgggtcccactgacgtggatgccctaatgtcaatgcttagatctttgtcaagagtagacctacagcgccaagtgcaaaccctaatgggccttcacctttccggcccatcacactcccaacactatcgccatacaccactcgagaccgatttctacgactacaaggacgacgatgacaagactagtggctccggcgagggcagaggaagtctactaacctgcggagatgtggaagaaaatcctggcccacatatgaccgagtacaagcccacggtgcgcctcgccacccgcgacgacgtccccagggccgtacgcaccctcgccgccgcgttcgccgactaccccgccacgcgccacaccgtcgatccggaccgccacatcgagcgggtcaccgagctgcaagaactcttcctcacgcgcgtcgggctcgacatcggcaaggtgtgggtcgcggacgacggcgccgcggtggcggtctggaccacgccggagagcgtcgaagcgggggcggtgttcgccgagatcggcccgcgcatggccgagttgagcggttcccggctggccgcgcagcaacagatggaaggcctcctggcgccgcaccggcccaaggagcccgcgtggttcctggccaccgtcggcgtctcgcccgaccaccagggcaagggtctgggcagcgccgtcgtgctccccggagtggaggcggccgagcgcgccggggtgcccgccttcctggagacctccgcgccccgcaacctccccttctacgagcggctcggcttcaccgtcaccgccgacgtcgaggtgcccgaaggaccgcgcacctggtgcatgacccgcaagcccggtgcctga

SEQ ID NO: 4979 - DNA, 2997 bp, Artificial Sequence
  Synthetic Polynucloetide
atggccttaccagtgaccgccttgctcctgccgctggccttgctgctccacgccgccaggccgcaggtccagctcgtcgagtccggcggcggcctcgtccaggccggcgactccgtcaccctctcctgcaccgcctccggccgcaccttctcctcctacgccctcgcctggttccgccagcgccccggcaaggagcgcgagttcgtcgccggcctccgctggggcggccccaccaactacgccgactccgtcaaggaccgcttcaccatctccggcgactccgccaagcacaccatgtacctccagatgaactccctcaagcccgaggacaccgccgtctactactgcggctacaaccccggcggctgggccgtcccctcccagtacgagtacgactcctggggccagggcacccaggtcaccgtctcctccggtaccggcggaggcggatctggcggcggaggtagcggtggcggaggatctgaattcgacatccagatgacacagagccctagcagcctgtctgccagcgtgggagacagagtgaccatcacatgcaaggccagcgaccacatcaacaactggctggcctggtatcagcagaagcctggacaggcccctaagctgctgatctacggcgctaccacactggaaacaggcgtgcccagcagattttctggcagcggctctggcaccgactacaccctgacaatatccagcctccagcctgaggacttcgccacctactactgtcagcagagctggaacaccccttggacattcggccagggcaccaagctggaaatcaagagactcgagatccagaaccctgatcctgccgtgtaccagctgcgggatagcaagagcagcgacaagagcgtgtgtctgttcaccgacttcgacagccagaccaacgtgtcccagagcaaggactccgacgtgtacatcaccgataagtgcgtgctggacatgcggagcatggacttcaagagcaactccgccgtggcctggtccaacaagtccgatttcgcctgcgccaacgccttcaacaacagcattatccccgaggacacattcttcccaagcagcgacgtgccctgcgacgtgaagctggtggaaaagagcttcgagacagacaccaacctgaacttccagaacctgagcgtgatcggcttcagaatcctgctgctgaaagtggccggctttaacctgctgatgaccctgcggctgtggtccagccgcgccaagagaagcggatctggcgtgaagcagaccctgaatttcgacctgctgaagctggctggcgacgtggaatccaacccaggccctactagtatggactggatttggcgcatccttttccttgtcggcgctgctaccggcgcgcattccttcgaacaagttcagcttcaacagcctggcgctgagctggtcaaacctggcgcttctgtgaagatgagctgcaaagccagcggctacgccttcagcagctactggatcaactggatgaagcagaaacccggccagggactcgaatggatcggccaaatctatcccggcgacggcgacaccaactacaacggcaagttcaagggcagagccacactgaccgccgatacctctagcagcacagcctacatgcagctgagcagcctgaccagcgaagatagcgccgtgtacttctgtgcccggtccatcacaacagtcgtgggctgcgctatggactattggggccagggaacaagcgtgaccgtgtctagtacgcgtgaggacctgaagaacgtgttcccacctgaggtggccgtgttcgagcctagcaaggccgagatcgcccacacccagaaagccaccctcgtgtgcctggctaccggcttctaccccgaccatgtggaactgtcttggtgggtcaacggcaaagaggtgcacagcggcgtgtgtaccgacccccagccactgaaagaacagcccgccctgaacgacagccggtactgcctgagcagcagactgagagtgtccgccaccttctggcagaacccccggaaccacttcagatgccaggtgcagttctacggcctgagcgagaacgacgagtggacccaggacagagccaagcccgtgacccagatcgtgtctgccgaagcctggggcagagccgattgcggcatcaccagcgccagctaccaccagggcgtgctgagcgccaccatcctgtacgagatcctgctgggcaaggccaccctgtacgccgtgctggtgtctgccctggtgctgatggctatggtcaagcggaaggacagccggggaagggccaagcgatctggatctggagcaacaaacttctcactactcaaacaagcaggtgacgtggaggagaatcccgggccttctagaggccatatgaccgagtacaagcccacggtgcgcctcgccacccgcgacgacgtccccagggccgtacgcaccctcgccgccgcgttcgccgactaccccgccacgcgccacaccgtcgatccggaccgccacatcgagcgggtcaccgagctgcaagaactcttcctcacgcgcgtcgggctcgacatcggcaaggtgtgggtcgcggacgacggcgccgcggtggcggtctggaccacgccggagagcgtcgaagcgggggcggtgttcgccgagatcggcccgcgcatggccgagttgagcggttcccggctggccgcgcagcaacagatggaaggcctcctggcgccgcaccggcccaaggagcccgcgtggttcctggccaccgtcggcgtctcgcccgaccaccagggcaagggtctgggcagcgccgtcgtgctccccggagtggaggcggccgagcgcgccggggtgcccgccttcctggagacctccgcgccccgcaacctccccttctacgagcggctcggcttcaccgtcaccgccgacgtcgaggtgcccgaaggaccgcgcacctggtgcatgacccgcaagcccggtgcctga

SEQ ID NO: 4980 - DNA, 2994 bp, Artificial Sequence
  Synthetic Polynucloetide
atggccttaccagtgaccgccttgctcctgccgctggccttgctgctccacgccgccaggccgcaggtccagctcgtcgagtccggcggcggcctcgtccaggccggcgactccgtcaccctctcctgcaccgcctccggccgcaccttctcctcctacgccctcgcctggttccgccagcgccccggcaaggagcgcgagttcgtcgccggcctccgctggggcggccccaccaactacgccgactccgtcaaggaccgcttcaccatctccggcgactccgccaagcacaccatgtacctccagatgaactccctcaagcccgaggacaccgccgtctactactgcggctacaaccccggcggctgggccgtcccctcccagtacgagtacgactcctggggccagggcacccaggtcaccgtctcctccggtaccggcggaggcggatctggcggcggaggtagcggtggcggaggatctgaattcgacatccagatgacacagagccctagcagcctgtctgccagcgtgggagacagagtgaccatcacatgcaaggccagcgaccacatcaacaactggctggcctggtatcagcagaagcctggacaggcccctaagctgctgatctacggcgctaccacactggaaacaggcgtgcccagcagattttctggcagcggctctggcaccgactacaccctgacaatatccagcctccagcctgaggacttcgccacctactactgtcagcagagctggaacaccccttggacattcggccagggcaccaagctggaaatcaagagactcgaggacctgaagaacgtgttcccacctgaggtggccgtgttcgagcctagcaaggccgagatcgcccacacccagaaagccaccctcgtgtgcctggctaccggcttctaccccgaccatgtggaactgtcttggtgggtcaacggcaaagaggtgcacagcggcgtgtgtaccgacccccagccactgaaagaacagcccgccctgaacgacagccggtactgcctgagcagcagactgagagtgtccgccaccttctggcagaacccccggaaccacttcagatgccaggtgcagttctacggcctgagcgagaacgacgagtggacccaggacagagccaagcccgtgacccagatcgtgtctgccgaagcctggggcagagccgattgcggcatcaccagcgccagctaccaccagggcgtgctgagcgccaccatcctgtacgagatcctgctgggcaaggccaccctgtacgccgtgctggtgtctgccctggtgctgatggctatggtcaagcggaaggacagccggggaagggccaagcgatctggatctggagcaacaaacttctcactactcaaacaagcaggtgacgtggaggagaatcccgggcctactagtatggactggatttggcgcatccttttccttgtcggcgctgctaccggcgcgcattccttcgaacaagttcagcttcaacagcctggcgctgagctggtcaaacctggcgcttctgtgaagatgagctgcaaagccagcggctacgccttcagcagctactggatcaactggatgaagcagaaacccggccagggactcgaatggatcggccaaatctatcccggcgacggcgacaccaactacaacggcaagttcaagggcagagccacactgaccgccgatacctctagcagcacagcctacatgcagctgagcagcctgaccagcgaagatagcgccgtgtacttctgtgcccggtccatcacaacagtcgtgggctgcgctatggactattggggccagggaacaagcgtgaccgtgtctagtacgcgtatccagaaccctgatcctgccgtgtaccagctgcgggatagcaagagcagcgacaagagcgtgtgtctgttcaccgacttcgacagccagaccaacgtgtcccagagcaaggactccgacgtgtacatcaccgataagtgcgtgctggacatgcggagcatggacttcaagagcaactccgccgtggcctggtccaacaagtccgatttcgcctgcgccaacgccttcaacaacagcattatccccgaggacacattcttcccaagcagcgacgtgccctgcgacgtgaagctggtggaaaagagcttcgagacagacaccaacctgaacttccagaacctgagcgtgatcggcttcagaatcctgctgctgaaagtggccggctttaacctgctgatgaccctgcggctgtggtccagccgcgccaagagaagcggatctggcgtgaagcagaccctgaatttcgacctgctgaagctggctggcgacgtggaatccaacccaggcccttctagaggccatatgaccgagtacaagcccacggtgcgcctcgccacccgcgacgacgtccccagggccgtacgcaccctcgccgccgcgttcgccgactaccccgccacgcgccacaccgtcgatccggaccgccacatcgagcgggtcaccgagctgcaagaactcttcctcacgcgcgtcgggctcgacatcggcaaggtgtgggtcgcggacgacggcgccgcggtggcggtctggaccacgccggagagcgtcgaagcgggggcggtgttcgccgagatcggcccgcgcatggccgagttgagcggttcccggctggccgcgcagcaacagatggaaggcctcctggcgccgcaccggcccaaggagcccgcgtggttcctggccaccgtcggcgtctcgcccgaccaccagggcaagggtctgggcagcgccgtcgtgctccccggagtggaggcggccgagcgcgccggggtgcccgccttcctggagacctccgcgccccgcaacctccccttctacgagcggctcggcttcaccgtcaccgccgacgtcgaggtgcccgaaggaccgcgcacctggtgcatgacccgcaagcccggtgcctga

SEQ ID NO: 4981 - DNA, 2292 bp, Artificial Sequence
  Synthetic Polynucloetide
atggccttaccagtgaccgccttgctcctgccgctggccttgctgctccacgccgccaggccgcaggtccagctcgtcgagtccggcggcggcctcgtccaggccggcgactccgtcaccctctcctgcaccgcctccggccgcaccttctcctcctacgccctcgcctggttccgccagcgccccggcaaggagcgcgagttcgtcgccggcctccgctggggcggccccaccaactacgccgactccgtcaaggaccgcttcaccatctccggcgactccgccaagcacaccatgtacctccagatgaactccctcaagcccgaggacaccgccgtctactactgcggctacaaccccggcggctgggccgtcccctcccagtacgagtacgactcctggggccagggcacccaggtcaccgtctcctccggtaccggcggaggcggatctggcggcggaggtagcggtggcggaggatctgaattcgacatccagatgacacagagccctagcagcctgtctgccagcgtgggagacagagtgaccatcacatgcaaggccagcgaccacatcaacaactggctggcctggtatcagcagaagcctggacaggcccctaagctgctgatctacggcgctaccacactggaaacaggcgtgcccagcagattttctggcagcggctctggcaccgactacaccctgacaatatccagcctccagcctgaggacttcgccacctactactgtcagcagagctggaacaccccttggacattcggccagggcaccaagctggaaatcaagagactcgaggacctgaagaacgtgttcccacctgaggtggccgtgttcgagcctagcgaggccgagatcagccacacccagaaagccaccctcgtgtgcctggctaccggcttctaccccgaccatgtggaactgtcttggtgggtcaacggcaaagaggtgcacagcggcgtgtgtaccgacccccagccactgaaagaacagcccgccctgaacgacagccggtactgcctgagcagcagactgagagtgtccgccaccttctggcagaacccccggaaccacttcagatgccaggtgcagttctacggcctgagcgagaacgacgagtggacccaggacagagccaagcccgtgacccagatcgtgtctgccgaagcctggggcagagccgattgcggctttaccagcgagagctaccagcagggcgtgctgagcgccaccatcctgtacgagatcctgctgggcaaggccaccctgtacgccgtgctggtgtctgccctggtgctgatggctatggtcaagcggaaggacagccggggaagggccaagcgatctggatctggagcaacaaacttctcactactcaaacaagcaggtgacgtggaggagaatcccgggcctactagtatggactggatttggcgcatccttttccttgtcggcgctgctaccggcgcgcattccttcgaacaagttcagcttcaacagcctggcgctgagctggtcaaacctggcgcttctgtgaagatgagctgcaaagccagcggctacgccttcagcagctactggatcaactggatgaagcagaaacccggccagggactcgaatggatcggccaaatctatcccggcgacggcgacaccaactacaacggcaagttcaagggcagagccacactgaccgccgatacctctagcagcacagcctacatgcagctgagcagcctgaccagcgaagatagcgccgtgtacttctgtgcccggtccatcacaacagtcgtgggctgcgctatggactattggggccagggaacaagcgtgaccgtgtctagtacgcgtatccagaaccctgatcctgccgtgtaccagctgcgggatagcaagagcagcgacaagagcgtgtgtctgttcaccgacttcgacagccagaccaacgtgtcccagagcaaggactccgacgtgtacatcaccgataagtgcgtgctggacatgcggagcatggacttcaagagcaactccgccgtggcctggtccaacaagtccgatttcgcctgcgccaacgccttcaacaacagcattatccccgaggacacattcttcccaagccccgagagcagctgcgacgtgaagctggtggaaaagagcttcgagacagacaccaacctgaacttccagaacctgagcgtgatcggcttcagaatcctgctgctgaaagtggccggctttaacctgctgatgaccctgcggctgtggtccagc

SEQ ID NO: 4982 - DNA, 2967 bp, Artificial Sequence
  Synthetic Polynucloetide
atggccttaccagtgaccgccttgctcctgccgctggccttgctgctccacgccgccaggccgcaggtccagctcgtcgagtccggcggcggcctcgtccaggccggcgactccgtcaccctctcctgcaccgcctccggccgcaccttctcctcctacgccctcgcctggttccgccagcgccccggcaaggagcgcgagttcgtcgccggcctccgctggggcggccccaccaactacgccgactccgtcaaggaccgcttcaccatctccggcgactccgccaagcacaccatgtacctccagatgaactccctcaagcccgaggacaccgccgtctactactgcggctacaaccccggcggctgggccgtcccctcccagtacgagtacgactcctggggccagggcacccaggtcaccgtctcctccggtaccggcggaggcggatctggcggcggaggtagcggtggcggaggatctgaattcgacatccagatgacacagagccctagcagcctgtctgccagcgtgggagacagagtgaccatcacatgcaaggccagcgaccacatcaacaactggctggcctggtatcagcagaagcctggacaggcccctaagctgctgatctacggcgctaccacactggaaacaggcgtgcccagcagattttctggcagcggctctggcaccgactacaccctgacaatatccagcctccagcctgaggacttcgccacctactactgtcagcagagctggaacaccccttggacattcggccagggcaccaagctggaaatcaagagactcgaggacctgaagaacgtgttcccacctgaggtggccgtgttcgagcctagcgaggccgagatcagccacacccagaaagccaccctcgtgtgcctggctaccggcttctaccccgaccatgtggaactgtcttggtgggtcaacggcaaagaggtgcacagcggcgtgtgtaccgacccccagccactgaaagaacagcccgccctgaacgacagccggtactgcctgagcagcagactgagagtgtccgccaccttctggcagaacccccggaaccacttcagatgccaggtgcagttctacggcctgagcgagaacgacgagtggacccaggacagagccaagcccgtgacccagatcgtgtctgccgaagcctggggcagagccgattgcggctttaccagcgagagctaccagcagggcgtgctgagcgccaccatcctgtacgagatcctgctgggcaaggccaccctgtacgccgtgctggtgtctgccctggtgctgatggctatggtcaagcggaaggacagccggggaagggccaagcgatctggatctggagcaacaaacttctcactactcaaacaagcaggtgacgtggaggagaatcccgggcctactagtatggactggatttggcgcatccttttccttgtcggcgctgctaccggcgcgcattccttcgaacaagttcagcttcaacagcctggcgctgagctggtcaaacctggcgcttctgtgaagatgagctgcaaagccagcggctacgccttcagcagctactggatcaactggatgaagcagaaacccggccagggactcgaatggatcggccaaatctatcccggcgacggcgacaccaactacaacggcaagttcaagggcagagccacactgaccgccgatacctctagcagcacagcctacatgcagctgagcagcctgaccagcgaagatagcgccgtgtacttctgtgcccggtccatcacaacagtcgtgggctgcgctatggactattggggccagggaacaagcgtgaccgtgtctagtacgcgtatccagaaccctgatcctgccgtgtaccagctgcgggatagcaagagcagcgacaagagcgtgtgtctgttcaccgacttcgacagccagaccaacgtgtcccagagcaaggactccgacgtgtacatcaccgataagtgcgtgctggacatgcggagcatggacttcaagagcaactccgccgtggcctggtccaacaagtccgatttcgcctgcgccaacgccttcaacaacagcattatccccgaggacacattcttcccaagccccgagagcagctgcgacgtgaagctggtggaaaagagcttcgagacagacaccaacctgaacttccagaacctgagcgtgatcggcttcagaatcctgctgctgaaagtggccggctttaacctgctgatgaccctgcggctgtggtccagccgcgccaagagaagcggatctggcgtgaagcagaccctgaatttcgacctgctgaagctggctggcgacgtggaatccaacccaggcccttctagaggcgggatccacaccatggctacctacgaggtgctgtgcgaggtggcaagaaagctgggcaccgacgacagagaagtggtgctgttcctgctgaacgtgttcatccctcagcctacactggcccagctgatcggtgcactgagagccctgaaagaggaaggccggctgacctttcctctgctggccgaatgcctgttcagagccggaagaagggatctgctgcgggacctgctgcatctggaccccagatttctggaaagacacctggccggcaccatgagctacttcagcccttaccagctgaccgtgctgcacgttgacggcgaactgtgcgccagagatattcggagcctgatcttcctgagcaaggacaccatcggcagccggtctacccctcagacatttctgcactgggtgtactgcatggaaaacctggacctgctcggccccacagatgtggatgccctgatgtccatgctgagaagcctgagcagagtggacctccagagacaggtgcagacactgatgggactgcacctgagcggacctagccacagccagcactacagacacacccct

SEQ ID NO: 4983 - DNA, 2304 bp, Artificial Sequence
  Synthetic Polynucloetide
atggccttaccagtgaccgccttgctcctgccgctggccttgctgctccacgccgccaggccgcaggtccagctcgtcgagtccggcggcggcctcgtccaggccggcgactccgtcaccctctcctgcaccgcctccggccgcaccttctcctcctacgccctcgcctggttccgccagcgccccggcaaggagcgcgagttcgtcgccggcctccgctggggcggccccaccaactacgccgactccgtcaaggaccgcttcaccatctccggcgactccgccaagcacaccatgtacctccagatgaactccctcaagcccgaggacaccgccgtctactactgcggctacaaccccggcggctgggccgtcccctcccagtacgagtacgactcctggggccagggcacccaggtcaccgtctcctccggtaccggcggaggcggatctggcggcggaggtagcggtggcggaggatctgaattcgacatccagatgacacagagccctagcagcctgtctgccagcgtgggagacagagtgaccatcacatgcaaggccagcgaccacatcaacaactggctggcctggtatcagcagaagcctggacaggcccctaagctgctgatctacggcgctaccacactggaaacaggcgtgcccagcagattttctggcagcggctctggcaccgactacaccctgacaatatccagcctccagcctgaggacttcgccacctactactgtcagcagagctggaacaccccttggacattcggccagggcaccaagctggaaatcaagagactcgagatccagaaccctgatcctgccgtgtaccagctgcgggatagcaagagcagcgacaagagcgtgtgtctgttcaccgacttcgacagccagaccaacgtgtcccagagcaaggactccgacgtgtacatcaccgataagtgcgtgctggacatgcggagcatggacttcaagagcaactccgccgtggcctggtccaacaagtccgatttcgcctgcgccaacgccttcaacaacagcattatccccgaggacacattcttcccaagccccgagagcagctgcgacgtgaagctggtggaaaagagcttcgagacagacaccaacctgaacttccagaacctgagcgtgatcggcttcagaatcctgctgctgaaagtggccggctttaacctgctgatgaccctgcggctgtggtccagccgcgccaagagaagcggatctggcgtgaagcagaccctgaatttcgacctgctgaagctggctggcgacgtggaatccaacccaggccctactagtatggactggatttggcgcatccttttccttgtcggcgctgctaccggcgcgcattccttcgaacaagttcagcttcaacagcctggcgctgagctggtcaaacctggcgcttctgtgaagatgagctgcaaagccagcggctacgccttcagcagctactggatcaactggatgaagcagaaacccggccagggactcgaatggatcggccaaatctatcccggcgacggcgacaccaactacaacggcaagttcaagggcagagccacactgaccgccgatacctctagcagcacagcctacatgcagctgagcagcctgaccagcgaagatagcgccgtgtacttctgtgcccggtccatcacaacagtcgtgggctgcgctatggactattggggccagggaacaagcgtgaccgtgtctagtacgcgtgaggacctgaagaacgtgttcccacctgaggtggccgtgttcgagcctagcgaggccgagatcagccacacccagaaagccaccctcgtgtgcctggctaccggcttctaccccgaccatgtggaactgtcttggtgggtcaacggcaaagaggtgcacagcggcgtgtgtaccgacccccagccactgaaagaacagcccgccctgaacgacagccggtactgcctgagcagcagactgagagtgtccgccaccttctggcagaacccccggaaccacttcagatgccaggtgcagttctacggcctgagcgagaacgacgagtggacccaggacagagccaagcccgtgacccagatcgtgtctgccgaagcctggggcagagccgattgcggctttaccagcgagagctaccagcagggcgtgctgagcgccaccatcctgtacgagatcctgctgggcaaggccaccctgtacgccgtgctggtgtctgccctggtgctgatggctatggtcaagcggaaggacagccgggga

SEQ ID NO: 4984 - DNA, 2970 bp, Artificial Sequence
  Synthetic Polynucloetide
atggccttaccagtgaccgccttgctcctgccgctggccttgctgctccacgccgccaggccgcaggtccagctcgtcgagtccggcggcggcctcgtccaggccggcgactccgtcaccctctcctgcaccgcctccggccgcaccttctcctcctacgccctcgcctggttccgccagcgccccggcaaggagcgcgagttcgtcgccggcctccgctggggcggccccaccaactacgccgactccgtcaaggaccgcttcaccatctccggcgactccgccaagcacaccatgtacctccagatgaactccctcaagcccgaggacaccgccgtctactactgcggctacaaccccggcggctgggccgtcccctcccagtacgagtacgactcctggggccagggcacccaggtcaccgtctcctccggtaccggcggaggcggatctggcggcggaggtagcggtggcggaggatctgaattcgacatccagatgacacagagccctagcagcctgtctgccagcgtgggagacagagtgaccatcacatgcaaggccagcgaccacatcaacaactggctggcctggtatcagcagaagcctggacaggcccctaagctgctgatctacggcgctaccacactggaaacaggcgtgcccagcagattttctggcagcggctctggcaccgactacaccctgacaatatccagcctccagcctgaggacttcgccacctactactgtcagcagagctggaacaccccttggacattcggccagggcaccaagctggaaatcaagagactcgagatccagaaccctgatcctgccgtgtaccagctgcgggatagcaagagcagcgacaagagcgtgtgtctgttcaccgacttcgacagccagaccaacgtgtcccagagcaaggactccgacgtgtacatcaccgataagtgcgtgctggacatgcggagcatggacttcaagagcaactccgccgtggcctggtccaacaagtccgatttcgcctgcgccaacgccttcaacaacagcattatccccgaggacacattcttcccaagccccgagagcagctgcgacgtgaagctggtggaaaagagcttcgagacagacaccaacctgaacttccagaacctgagcgtgatcggcttcagaatcctgctgctgaaagtggccggctttaacctgctgatgaccctgcggctgtggtccagccgcgccaagagaagcggatctggcgtgaagcagaccctgaatttcgacctgctgaagctggctggcgacgtggaatccaacccaggccctactagtatggactggatttggcgcatccttttccttgtcggcgctgctaccggcgcgcattccttcgaacaagttcagcttcaacagcctggcgctgagctggtcaaacctggcgcttctgtgaagatgagctgcaaagccagcggctacgccttcagcagctactggatcaactggatgaagcagaaacccggccagggactcgaatggatcggccaaatctatcccggcgacggcgacaccaactacaacggcaagttcaagggcagagccacactgaccgccgatacctctagcagcacagcctacatgcagctgagcagcctgaccagcgaagatagcgccgtgtacttctgtgcccggtccatcacaacagtcgtgggctgcgctatggactattggggccagggaacaagcgtgaccgtgtctagtacgcgtgaggacctgaagaacgtgttcccacctgaggtggccgtgttcgagcctagcgaggccgagatcagccacacccagaaagccaccctcgtgtgcctggctaccggcttctaccccgaccatgtggaactgtcttggtgggtcaacggcaaagaggtgcacagcggcgtgtgtaccgacccccagccactgaaagaacagcccgccctgaacgacagccggtactgcctgagcagcagactgagagtgtccgccaccttctggcagaacccccggaaccacttcagatgccaggtgcagttctacggcctgagcgagaacgacgagtggacccaggacagagccaagcccgtgacccagatcgtgtctgccgaagcctggggcagagccgattgcggctttaccagcgagagctaccagcagggcgtgctgagcgccaccatcctgtacgagatcctgctgggcaaggccaccctgtacgccgtgctggtgtctgccctggtgctgatggctatggtcaagcggaaggacagccggggaagggccaagcgatctggatctggagcaacaaacttctcactactcaaacaagcaggtgacgtggaggagaatcccgggccttctagaggcgggatccacaccatggctacctacgaggtgctgtgcgaggtggcaagaaagctgggcaccgacgacagagaagtggtgctgttcctgctgaacgtgttcatccctcagcctacactggcccagctgatcggtgcactgagagccctgaaagaggaaggccggctgacctttcctctgctggccgaatgcctgttcagagccggaagaagggatctgctgcgggacctgctgcatctggaccccagatttctggaaagacacctggccggcaccatgagctacttcagcccttaccagctgaccgtgctgcacgttgacggcgaactgtgcgccagagatattcggagcctgatcttcctgagcaaggacaccatcggcagccggtctacccctcagacatttctgcactgggtgtactgcatggaaaacctggacctgctcggccccacagatgtggatgccctgatgtccatgctgagaagcctgagcagagtggacctccagagacaggtgcagacactgatgggactgcacctgagcggacctagccacagccagcactacagacacacccct

SEQ ID NO: 4985 - DNA, 3129 bp, Artificial Sequence
  Synthetic Polynucloetide
atggccttaccagtgaccgccttgctcctgccgctggccttgctgctccacgccgccaggccgctcgaggggaaaccaattcccaaccctcttctgggactggattcaaccggcagcggcgaggacctgaagaacgtgttcccacctgaggtggccgtgttcgagcctagcaaggccgagatcgcccacacccagaaagccaccctcgtgtgcctggctaccggcttctaccccgaccatgtggaactgtcttggtgggtcaacggcaaagaggtgcacagcggcgtgtgtaccgacccccagccactgaaagaacagcccgccctgaacgacagccggtactgcctgagcagcagactgagagtgtccgccaccttctggcagaacccccggaaccacttcagatgccaggtgcagttctacggcctgagcgagaacgacgagtggacccaggacagagccaagcccgtgacccagatcgtgtctgccgaagcctggggcagagccgattgcggcatcaccagcgccagctaccaccagggcgtgctgagcgccaccatcctgtacgagatcctgctgggcaaggccaccctgtacgccgtgctggtgtctgccctggtgctgatggctatggtcaagcggaaggacagccggggaagggccaagcgatctggatctggagcaacaaacttctcactactcaaacaagcaggtgacgtggaggagaatcccgggcctactagcatggccttaccagtgaccgccttgctcctgccgctggccttgctgctccacgccgccaggccgcaggtccagctcgtcgagtccggcggcggcctcgtccaggccggcgactccgtcaccctctcctgcaccgcctccggccgcaccttctcctcctacgccctcgcctggttccgccagcgccccggcaaggagcgcgagttcgtcgccggcctccgctggggcggccccaccaactacgccgactccgtcaaggaccgcttcaccatctccggcgactccgccaagcacaccatgtacctccagatgaactccctcaagcccgaggacaccgccgtctactactgcggctacaaccccggcggctgggccgtcccctcccagtacgagtacgactcctggggccagggcacccaggtcaccgtctcctccggtaccggcggaggcggatctggcggcggaggtagcggtggcggaggatctgaattcgacatccagatgacacagagccctagcagcctgtctgccagcgtgggagacagagtgaccatcacatgcaaggccagcgaccacatcaacaactggctggcctggtatcagcagaagcctggacaggcccctaagctgctgatctacggcgctaccacactggaaacaggcgtgcccagcagattttctggcagcggctctggcaccgactacaccctgacaatatccagcctccagcctgaggacttcgccacctactactgtcagcagagctggaacaccccttggacattcggccagggcaccaagctggaaatcaagagaggcggaggcggaagtggaggcggaggatctggcggcggaggctctcaagttcagcttcaacagcctggcgctgagctggtcaaacctggcgcttctgtgaagatgagctgcaaagccagcggctacgccttcagcagctactggatcaactggatgaagcagaaacccggccagggactcgaatggatcggccaaatctatcccggcgacggcgacaccaactacaacggcaagttcaagggcagagccacactgaccgccgatacctctagcagcacagcctacatgcagctgagcagcctgaccagcgaagatagcgccgtgtacttctgtgcccggtccatcacaacagtcgtgggctgcgctatggactattggggccagggaacaagcgtgaccgtgtctagtacgcgtgagcagaaactgatctcggaagaggatgggagcggcatccagaaccctgatcctgccgtgtaccagctgcgggatagcaagagcagcgacaagagcgtgtgtctgttcaccgacttcgacagccagaccaacgtgtcccagagcaaggactccgacgtgtacatcaccgataagtgcgtgctggacatgcggagcatggacttcaagagcaactccgccgtggcctggtccaacaagtccgatttcgcctgcgccaacgccttcaacaacagcattatccccgaggacacattcttcccaagcagcgacgtgccctgcgacgtgaagctggtggaaaagagcttcgagacagacaccaacctgaacttccagaacctgagcgtgatcggcttcagaatcctgctgctgaaagtggccggctttaacctgctgatgaccctgcggctgtggtccagccgcgccaagagaagcggatctggcgtgaagcagaccctgaatttcgacctgctgaagctggctggcgacgtggaatccaacccaggcccttctagaggccatatgaccgagtacaagcccacggtgcgcctcgccacccgcgacgacgtccccagggccgtacgcaccctcgccgccgcgttcgccgactaccccgccacgcgccacaccgtcgatccggaccgccacatcgagcgggtcaccgagctgcaagaactcttcctcacgcgcgtcgggctcgacatcggcaaggtgtgggtcgcggacgacggcgccgcggtggcggtctggaccacgccggagagcgtcgaagcgggggcggtgttcgccgagatcggcccgcgcatggccgagttgagcggttcccggctggccgcgcagcaacagatggaaggcctcctggcgccgcaccggcccaaggagcccgcgtggttcctggccaccgtcggcgtctcgcccgaccaccagggcaagggtctgggcagcgccgtcgtgctccccggagtggaggcggccgagcgcgccggggtgcccgccttcctggagacctccgcgccccgcaacctccccttctacgagcggctcggcttcaccgtcaccgccgacgtcgaggtgcccgaaggaccgcgcacctggtgcatgacccgcaagcccggtgcctga

SEQ ID NO: 4986 - DNA, 3132 bp, Artificial Sequence
  Synthetic Polynucloetide
atggccttaccagtgaccgccttgctcctgccgctggccttgctgctccacgccgccaggccgctcgagcagaaactgatctcggaagaggatctgggctccggcgatcgccctgatcctgccgtgtaccagctgcgggatagcaagagcagcgacaagagcgtgtgtctgttcaccgacttcgacagccagaccaacgtgtcccagagcaaggactccgacgtgtacatcaccgataagtgcgtgctggacatgcggagcatggacttcaagagcaactccgccgtggcctggtccaacaagtccgatttcgcctgcgccaacgccttcaacaacagcattatccccgaggacacattcttcccaagccccgagagcagctgcgacgtgaagctggtggaaaagagcttcgagacagacaccaacctgaacttccagaacctgagcgtgatcggcttcagaatcctgctgctgaaagtggccggctttaacctgctgatgaccctgcggctgtggtccagctctagtcgcgccaagagaagcggatctggcgtgaagcagaccctgaatttcgacctgctgaagctggctggcgacgtggaatccaacccaggccccactagcatggccttaccagtgaccgccttgctcctgccgctggccttgctgctccacgccgccaggccgcaggtccagctcgtcgagtccggcggcggcctcgtccaggccggcgactccgtcaccctctcctgcaccgcctccggccgcaccttctcctcctacgccctcgcctggttccgccagcgccccggcaaggagcgcgagttcgtcgccggcctccgctggggcggccccaccaactacgccgactccgtcaaggaccgcttcaccatctccggcgactccgccaagcacaccatgtacctccagatgaactccctcaagcccgaggacaccgccgtctactactgcggctacaaccccggcggctgggccgtcccctcccagtacgagtacgactcctggggccagggcacccaggtcaccgtctcctccggtaccggcggaggcggatctggcggcggaggtagcggtggcggaggatctgaattcgacatccagatgacacagagccctagcagcctgtctgccagcgtgggagacagagtgaccatcacatgcaaggccagcgaccacatcaacaactggctggcctggtatcagcagaagcctggacaggcccctaagctgctgatctacggcgctaccacactggaaacaggcgtgcccagcagattttctggcagcggctctggcaccgactacaccctgacaatatccagcctccagcctgaggacttcgccacctactactgtcagcagagctggaacaccccttggacattcggccagggcaccaagctggaaatcaagagaggcggaggcggaagtggaggcggaggatctggcggcggaggctctcaagttcagcttcaacagcctggcgctgagctggtcaaacctggcgcttctgtgaagatgagctgcaaagccagcggctacgccttcagcagctactggatcaactggatgaagcagaaacccggccagggactcgaatggatcggccaaatctatcccggcgacggcgacaccaactacaacggcaagttcaagggcagagccacactgaccgccgatacctctagcagcacagcctacatgcagctgagcagcctgaccagcgaagatagcgccgtgtacttctgtgcccggtccatcacaacagtcgtgggctgcgctatggactattggggccagggaacaagcgtgaccgtgtctagtacgcgtgggaaaccaattcccaaccctcttctgggactggattcaaccggcagcggcgaggacctgaagaacgtgttcccacctgaggtggccgtgttcgagcctagcgaggccgagatcagccacacccagaaagccaccctcgtgtgcctggctaccggcttctaccccgaccatgtggaactgtcttggtgggtcaacggcaaagaggtgcacagcggcgtgtgtaccgacccccagccactgaaagaacagcccgccctgaacgacagccggtactgcctgagcagcagactgagagtgtccgccaccttctggcagaacccccggaaccacttcagatgccaggtgcagttctacggcctgagcgagaacgacgagtggacccaggacagagccaagcccgtgacccagatcgtgtctgccgaagcctggggcagagccgattgcggctttaccagcgagagctaccagcagggcgtgctgagcgccaccatcctgtacgagatcctgctgggcaaggccaccctgtacgccgtgctggtgtctgccctggtgctgatggctatggtcaagcggaaggacagccggggaagggccaagcgatctggatctggagcaacaaacttctcactactcaaacaagcaggtgacgtggaggagaatcccgggccttctagaggccatatgaccgagtacaagcccacggtgcgcctcgccacccgcgacgacgtccccagggccgtacgcaccctcgccgccgcgttcgccgactaccccgccacgcgccacaccgtcgatccggaccgccacatcgagcgggtcaccgagctgcaagaactcttcctcacgcgcgtcgggctcgacatcggcaaggtgtgggtcgcggacgacggcgccgcggtggcggtctggaccacgccggagagcgtcgaagcgggggcggtgttcgccgagatcggcccgcgcatggccgagttgagcggttcccggctggccgcgcagcaacagatggaaggcctcctggcgccgcaccggcccaaggagcccgcgtggttcctggccaccgtcggcgtctcgcccgaccaccagggcaagggtctgggcagcgccgtcgtgctccccggagtggaggcggccgagcgcgccggggtgcccgccttcctggagacctccgcgccccgcaacctccccttctacgagcggctcggcttcaccgtcaccgccgacgtcgaggtgcccgaaggaccgcgcacctggtgcatgacccgcaagcccggtgcctga

SEQ ID NO: 4987 - DNA, 2994 bp, Artificial Sequence
  Synthetic Polynucloetide
atggccttaccagtgaccgccttgctcctgccgctggccttgctgctccacgccgccaggccgcaggtccagctcgtcgagtccggcggcggcctcgtccaggccggcgactccgtcaccctctcctgcaccgcctccggccgcaccttctcctcctacgccctcgcctggttccgccagcgccccggcaaggagcgcgagttcgtcgccggcctccgctggggcggccccaccaactacgccgactccgtcaaggaccgcttcaccatctccggcgactccgccaagcacaccatgtacctccagatgaactccctcaagcccgaggacaccgccgtctactactgcggctacaaccccggcggctgggccgtcccctcccagtacgagtacgactcctggggccagggcacccaggtcaccgtctcctccggtaccggcggaggcggatctggcggcggaggtagcggtggcggaggatctgaattcgacatccagatgacacagagccctagcagcctgtctgccagcgtgggagacagagtgaccatcacatgcaaggccagcgaccacatcaacaactggctggcctggtatcagcagaagcctggacaggcccctaagctgctgatctacggcgctaccacactggaaacaggcgtgcccagcagattttctggcagcggctctggcaccgactacaccctgacaatatccagcctccagcctgaggacttcgccacctactactgtcagcagagctggaacaccccttggacattcggccagggcaccaagctggaaatcaagagactcgaggacctgaagaacgtgttcccacctgaggtggccgtgttcgagcctagcgaggccgagatcagccacacccagaaagccaccctcgtgtgcctggctaccggcttctaccccgaccatgtggaactgtcttggtgggtcaacggcaaagaggtgcacagcggcgtgtctaccgacccccagccactgaaagaacagcccgccctgaacgacagccggtactgcctgagcagcagactgagagtgtccgccaccttctggcagaacccccggaaccacttcagatgccaggtgcagttctacggcctgagcgagaacgacgagtggacccaggacagagccaagcccgtgacccagatcgtgtctgccgaagcctggggcagagccgattgcggctttaccagcgagagctaccagcagggcgtgctgagcgccaccatcctgtacgagatcctgctgggcaaggccaccctgtacgccgtgctggtgtctgccctggtgctgatggctatggtcaagcggaaggacagccggggaagggccaagcgatctggatctggagcaacaaacttctcactactcaaacaagcaggtgacgtggaggagaatcccgggcctactagtatggactggatttggcgcatccttttccttgtcggcgctgctaccggcgcgcattccttcgaacaagttcagcttcaacagcctggcgctgagctggtcaaacctggcgcttctgtgaagatgagctgcaaagccagcggctacgccttcagcagctactggatcaactggatgaagcagaaacccggccagggactcgaatggatcggccaaatctatcccggcgacggcgacaccaactacaacggcaagttcaagggcagagccacactgaccgccgatacctctagcagcacagcctacatgcagctgagcagcctgaccagcgaagatagcgccgtgtacttctgtgcccggtccatcacaacagtcgtgggctgcgctatggactattggggccagggaacaagcgtgaccgtgtctagtacgcgtatccagaaccctgatcctgccgtgtaccagctgcgggatagcaagagcagcgacaagagcgtgtgtctgttcaccgacttcgacagccagaccaacgtgtcccagagcaaggactccgacgtgtacatcaccgataagaccgtgctggacatgcggagcatggacttcaagagcaactccgccgtggcctggtccaacaagtccgatttcgcctgcgccaacgccttcaacaacagcattatccccgaggacacattcttcccaagccccgagagcagctgcgacgtgaagctggtggaaaagagcttcgagacagacaccaacctgaacttccagaacctgagcgtgatcggcttcagaatcctgctgctgaaagtggccggctttaacctgctgatgaccctgcggctgtggtccagccgcgccaagagaagcggatctggcgtgaagcagaccctgaatttcgacctgctgaagctggctggcgacgtggaatccaacccaggcccttctagaggccatatgaccgagtacaagcccacggtgcgcctcgccacccgcgacgacgtccccagggccgtacgcaccctcgccgccgcgttcgccgactaccccgccacgcgccacaccgtcgatccggaccgccacatcgagcgggtcaccgagctgcaagaactcttcctcacgcgcgtcgggctcgacatcggcaaggtgtgggtcgcggacgacggcgccgcggtggcggtctggaccacgccggagagcgtcgaagcgggggcggtgttcgccgagatcggcccgcgcatggccgagttgagcggttcccggctggccgcgcagcaacagatggaaggcctcctggcgccgcaccggcccaaggagcccgcgtggttcctggccaccgtcggcgtctcgcccgaccaccagggcaagggtctgggcagcgccgtcgtgctccccggagtggaggcggccgagcgcgccggggtgcccgccttcctggagacctccgcgccccgcaacctccccttctacgagcggctcggcttcaccgtcaccgccgacgtcgaggtgcccgaaggaccgcgcacctggtgcatgacccgcaagcccggtgcctga

SEQ ID NO: 4988 - DNA, 3240 bp, Artificial Sequence
  Synthetic Polynucloetide
atggccttaccagtgaccgccttgctcctgccgctggccttgctgctccacgccgccaggccgcaggtccagctcgtcgagtccggcggcggcctcgtccaggccggcgactccgtcaccctctcctgcaccgcctccggccgcaccttctcctcctacgccctcgcctggttccgccagcgccccggcaaggagcgcgagttcgtcgccggcctccgctggggcggccccaccaactacgccgactccgtcaaggaccgcttcaccatctccggcgactccgccaagcacaccatgtacctccagatgaactccctcaagcccgaggacaccgccgtctactactgcggctacaaccccggcggctgggccgtcccctcccagtacgagtacgactcctggggccagggcacccaggtcaccgtctcctccggtaccggcggaggcggatctggcggcggaggtagcggtggcggaggatctgaattcgacatccagatgacacagagccctagcagcctgtctgccagcgtgggagacagagtgaccatcacatgcaaggccagcgaccacatcaacaactggctggcctggtatcagcagaagcctggacaggcccctaagctgctgatctacggcgctaccacactggaaacaggcgtgcccagcagattttctggcagcggctctggcaccgactacaccctgacaatatccagcctccagcctgaggacttcgccacctactactgtcagcagagctggaacaccccttggacattcggccagggcaccaagctggaaatcaagagactcgaggacctgaagaacgtgttcccacctgaggtggccgtgttcgagcctagcgaggccgagatcagccacacccagaaagccaccctcgtgtgcctggctaccggcttctaccccgaccatgtggaactgtcttggtgggtcaacggcaaagaggtgcacagcggcgtgtctaccgacccccagccactgaaagaacagcccgccctgaacgacagccggtactgcctgagcagcagactgagagtgtccgccaccttctggcagaacccccggaaccacttcagatgccaggtgcagttctacggcctgagcgagaacgacgagtggacccaggacagagccaagcccgtgacccagatcgtgtctgccgaagcctggggcagagccgattgcggctttaccagcgagagctaccagcagggcgtgctgagcgccaccatcctgtacgagatcctgctgggcaaggccaccctgtacgccgtgctggtgtctgccctggtgctgatggctatggtcaagcggaaggacagccggggaagggccaagcgatctggatctggagcaacaaacttctcactactcaaacaagcaggtgacgtggaggagaatcccgggcctactagtatggactggatttggcgcatccttttccttgtcggcgctgctaccggcgcgcattccttcgaacaagttcagcttcaacagcctggcgctgagctggtcaaacctggcgcttctgtgaagatgagctgcaaagccagcggctacgccttcagcagctactggatcaactggatgaagcagaaacccggccagggactcgaatggatcggccaaatctatcccggcgacggcgacaccaactacaacggcaagttcaagggcagagccacactgaccgccgatacctctagcagcacagcctacatgcagctgagcagcctgaccagcgaagatagcgccgtgtacttctgtgcccggtccatcacaacagtcgtgggctgcgctatggactattggggccagggaacaagcgtgaccgtgtctagtacgcgtgagcagaaactgatctcggaagaggatgggagcggcaccccattcccttctctggcccctcccatcatgctgctggtggacggcaagcagcagatggtggtcgtgtgcctggtgctggatgtggccccacctggactggacagccccatctggtttagcgccggcaatggctctgccctggacgcctttacctacggcccaagccctgccaccgatggcacctggacaaatctggcccacctgagcctgcccagcgaggaactggcttcttgggagcctctcgtgtgccacacaggacctggcgctgagggacacagcagatccacccagcctatgcacctgtctggcgaggccagcaccgccagaacctgtcctcaggaacctctgagaggcacccctggcggagcactgtggctgggagtgctgagactgctgctgttcaagctgctgctgtttgacctgctgctgacctgctcctgtctgtgcgatcctgccggccctctgccttctcctgccaccaccacaagactgagagccctgggcagccacagactgcaccctgccacagagacaggcggcagagaggccacaagcagccctagaccccagcccagagacagaagatggggcgataccccccctggcagaaagcctggatctccagtccgcgccaagagaagcggatctggcgtgaagcagaccctgaatttcgacctgctgaagctggctggcgacgtggaatccaacccaggcccttctagaggccatatgaccgagtacaagcccacggtgcgcctcgccacccgcgacgacgtccccagggccgtacgcaccctcgccgccgcgttcgccgactaccccgccacgcgccacaccgtcgatccggaccgccacatcgagcgggtcaccgagctgcaagaactcttcctcacgcgcgtcgggctcgacatcggcaaggtgtgggtcgcggacgacggcgccgcggtggcggtctggaccacgccggagagcgtcgaagcgggggcggtgttcgccgagatcggcccgcgcatggccgagttgagcggttcccggctggccgcgcagcaacagatggaaggcctcctggcgccgcaccggcccaaggagcccgcgtggttcctggccaccgtcggcgtctcgcccgaccaccagggcaagggtctgggcagcgccgtcgtgctccccggagtggaggcggccgagcgcgccggggtgcccgccttcctggagacctccgcgccccgcaacctccccttctacgagcggctcggcttcaccgtcaccgccgacgtcgaggtgcccgaaggaccgcgcacctggtgcatgacccgcaagcccggtgcctga

SEQ ID NO: 4989 - DNA, 3294 bp, Artificial Sequence
  Synthetic Polynucloetide
atggccttaccagtgaccgccttgctcctgccgctggccttgctgctccacgccgccaggccgctcgaggacctgaagaacgtgttcccacctgaggtggccgtgttcgagcctagcgaggccgagatcagccacacccagaaagccaccctcgtgtgcctggctaccggcttctaccccgaccatgtggaactgtcttggtgggtcaacggcaaagaggtgcacagcggcgtgtctaccgacccccagccactgaaagaacagcccgccctgaacgacagccggtactgcctgagcagcagactgagagtgtccgccaccttctggcagaacccccggaaccacttcagatgccaggtgcagttctacggcctgagcgagaacgacgagtggacccaggacagagccaagcccgtgacccagatcgtgtctgccgaagcctggggcagagccgattgcggctttaccagcgagagctaccagcagggcgtgctgagcgccaccatcctgtacgagatcctgctgggcaaggccaccctgtacgccgtgctggtgtctgccctggtgctgatggctatggtcaagcggaaggacagccggggaagggccaagcgatctggatctggagcaacaaacttctcactactcaaacaagcaggtgacgtggaggagaatcccgggcctactagcatggccttaccagtgaccgccttgctcctgccgctggccttgctgctccacgccgccaggccgcaggtccagctcgtcgagtccggcggcggcctcgtccaggccggcgactccgtcaccctctcctgcaccgcctccggccgcaccttctcctcctacgccctcgcctggttccgccagcgccccggcaaggagcgcgagttcgtcgccggcctccgctggggcggccccaccaactacgccgactccgtcaaggaccgcttcaccatctccggcgactccgccaagcacaccatgtacctccagatgaactccctcaagcccgaggacaccgccgtctactactgcggctacaaccccggcggctgggccgtcccctcccagtacgagtacgactcctggggccagggcacccaggtcaccgtctcctccggtaccggcggaggcggatctggcggcggaggtagcggtggcggaggatctgaattcgacatccagatgacacagagccctagcagcctgtctgccagcgtgggagacagagtgaccatcacatgcaaggccagcgaccacatcaacaactggctggcctggtatcagcagaagcctggacaggcccctaagctgctgatctacggcgctaccacactggaaacaggcgtgcccagcagattttctggcagcggctctggcaccgactacaccctgacaatatccagcctccagcctgaggacttcgccacctactactgtcagcagagctggaacaccccttggacattcggccagggcaccaagctggaaatcaagagaggcggaggcggaagtggaggcggaggatctggcggcggaggctctcaagttcagcttcaacagcctggcgctgagctggtcaaacctggcgcttctgtgaagatgagctgcaaagccagcggctacgccttcagcagctactggatcaactggatgaagcagaaacccggccagggactcgaatggatcggccaaatctatcccggcgacggcgacaccaactacaacggcaagttcaagggcagagccacactgaccgccgatacctctagcagcacagcctacatgcagctgagcagcctgaccagcgaagatagcgccgtgtacttctgtgcccggtccatcacaacagtcgtgggctgcgctatggactattggggccagggaacaagcgtgaccgtgtctagtacgcgtgagcagaaactgatctcggaagaggatctggggagcggcaccccattcccttctctggcccctcccatcatgctgctggtggacggcaagcagcagatggtggtcgtgtgcctggtgctggatgtggccccacctggactggacagccccatctggtttagcgccggcaatggctctgccctggacgcctttacctacggcccaagccctgccaccgatggcacctggacaaatctggcccacctgagcctgcccagcgaggaactggcttcttgggagcctctcgtgtgccacacaggacctggcgctgagggacacagcagatccacccagcctatgcacctgtctggcgaggccagcaccgccagaacctgtcctcaggaacctctgagaggcacccctggcggagcactgtggctgggagtgctgagactgctgctgttcaagctgctgctgtttgacctgctgctgacctgctcctgtctgtgcgatcctgccggccctctgccttctcctgccaccaccacaagactgagagccctgggcagccacagactgcaccctgccacagagacaggcggcagagaggccacaagcagccctagaccccagcccagagacagaagatggggcgataccccccctggcagaaagcctggatctccagtccgcgccaagagaagcggatctggcgtgaagcagaccctgaatttcgacctgctgaagctggctggcgacgtggaatccaacccaggcccttctagatctagaggccatatgaccgagtacaagcccacggtgcgcctcgccacccgcgacgacgtccccagggccgtacgcaccctcgccgccgcgttcgccgactaccccgccacgcgccacaccgtcgatccggaccgccacatcgagcgggtcaccgagctgcaagaactcttcctcacgcgcgtcgggctcgacatcggcaaggtgtgggtcgcggacgacggcgccgcggtggcggtctggaccacgccggagagcgtcgaagcgggggcggtgttcgccgagatcggcccgcgcatggccgagttgagcggttcccggctggccgcgcagcaacagatggaaggcctcctggcgccgcaccggcccaaggagcccgcgtggttcctggccaccgtcggcgtctcgcccgaccaccagggcaagggtctgggcagcgccgtcgtgctccccggagtggaggcggccgagcgcgccggggtgcccgccttcctggagacctccgcgccccgcaacctccccttctacgagcggctcggcttcaccgtcaccgccgacgtcgaggtgcccgaaggaccgcgcacctggtgcatgacccgcaagcccggtgcctga

SEQ ID NO: 4990 - DNA, 3105 bp, Artificial Sequence
  Synthetic Polynucloetide
atggccttaccagtgaccgccttgctcctgccgctggccttgctgctccacgccgccaggccgcaggtccagctcgtcgagtccggcggcggcctcgtccaggccggcgactccgtcaccctctcctgcaccgcctccggccgcaccttctcctcctacgccctcgcctggttccgccagcgccccggcaaggagcgcgagttcgtcgccggcctccgctggggcggccccaccaactacgccgactccgtcaaggaccgcttcaccatctccggcgactccgccaagcacaccatgtacctccagatgaactccctcaagcccgaggacaccgccgtctactactgcggctacaaccccggcggctgggccgtcccctcccagtacgagtacgactcctggggccagggcacccaggtcaccgtctcctccggtaccggcggaggcggatctggcggcggaggtagcggtggcggaggatctgaattcgacatccagatgacacagagccctagcagcctgtctgccagcgtgggagacagagtgaccatcacatgcaaggccagcgaccacatcaacaactggctggcctggtatcagcagaagcctggacaggcccctaagctgctgatctacggcgctaccacactggaaacaggcgtgcccagcagattttctggcagcggctctggcaccgactacaccctgacaatatccagcctccagcctgaggacttcgccacctactactgtcagcagagctggaacaccccttggacattcggccagggcaccaagctggaaatcaagagactcgaggggaaaccaattcccaaccctcttctgggactggattcaaccggcagcggcgacaagcagctggacgccgacgtgtcccccaagcctaccatcttcctgccctctatcgccgagacaaagctccagaaggccggcacctacctgtgcctgctggaaaagttcttcccagatgtgattaagatccactggcaggaaaagaagtccaacaccatcctgggcagccaggaaggcaacaccatgaagaccaacgacacctacatgaagttcagctggctgaccgtgcccgagaagtccctggacaaagaacacagatgcatcgtgcggcacgaaaacaacaagaacggcgtggaccaggaaatcatcttcccacccatcaagaccgatgtgattacaatggaccccaaggacaactgctccaaggacgccaacgataccctgctgctccagctgaccaacaccagcgcctactacatgtacttgttgctgctgctgaagtccgtggtgtacttcgccatcatcacatgctgcctgctgcggagaaccgccttctgctgcaacggcgagaagtctagggccaagcgatctggatctggagcaacaaacttctcactactcaaacaagcaggtgacgtggaggagaatcccgggcctactagtatggactggatttggcgcatccttttccttgtcggcgctgctaccggcgcgcattccttcgaacaagttcagcttcaacagcctggcgctgagctggtcaaacctggcgcttctgtgaagatgagctgcaaagccagcggctacgccttcagcagctactggatcaactggatgaagcagaaacccggccagggactcgaatggatcggccaaatctatcccggcgacggcgacaccaactacaacggcaagttcaagggcagagccacactgaccgccgatacctctagcagcacagcctacatgcagctgagcagcctgaccagcgaagatagcgccgtgtacttctgtgcccggtccatcacaacagtcgtgggctgcgctatggactattggggccagggaacaagcgtgaccgtgtctagtacgcgtgagcagaaactgatctcggaagaggatgggagcggcagccagcctcacaccaagcccagcgtgttcgtgatgaagaacggcaccaacgtggcctgcctcgtgaaagagttctaccccaaggacatcaggatcaacctggtgtccagcaagaagatcaccgagttcgaccccgccatcgtgatctcccccagcggcaagtacaacgccgtgaagctggggaagtacgaggacagcaacagcgtgacctgctccgtgcagcacgacaacaagaccgtgcacagcaccgactttgaagtgaaaaccgactccaccgaccacgtgaagcccaaagagacagagaacaccaagcagcccagcaagagctgccacaagcccaaggccatcgtgcacaccgagaaagtgaacatgatgagcctgaccgtgctgggcctgcggatgctgttcgccaaaaccgtggccgtgaacttcctgctgaccgccaagctgttcttcctccgcgccaagagaagcggatctggcgtgaagcagaccctgaatttcgacctgctgaagctggctggcgacgtggaatccaacccaggcccttctagaggccatatgaccgagtacaagcccacggtgcgcctcgccacccgcgacgacgtccccagggccgtacgcaccctcgccgccgcgttcgccgactaccccgccacgcgccacaccgtcgatccggaccgccacatcgagcgggtcaccgagctgcaagaactcttcctcacgcgcgtcgggctcgacatcggcaaggtgtgggtcgcggacgacggcgccgcggtggcggtctggaccacgccggagagcgtcgaagcgggggcggtgttcgccgagatcggcccgcgcatggccgagttgagcggttcccggctggccgcgcagcaacagatggaaggcctcctggcgccgcaccggcccaaggagcccgcgtggttcctggccaccgtcggcgtctcgcccgaccaccagggcaagggtctgggcagcgccgtcgtgctccccggagtggaggcggccgagcgcgccggggtgcccgccttcctggagacctccgcgccccgcaacctccccttctacgagcggctcggcttcaccgtcaccgccgacgtcgaggtgcccgaaggaccgcgcacctggtgcatgacccgcaagcccggtgcctga

SEQ ID NO: 4991 - DNA, 2316 bp, Artificial Sequence
  Synthetic Polynucloetide
atggccttaccagtgaccgccttgctcctgccgctggccttgctgctccacgccgccaggccgcaggtccagctcgtcgagtccggcggcggcctcgtccaggccggcgactccgtcaccctctcctgcaccgcctccggccgcaccttctcctcctacgccctcgcctggttccgccagcgccccggcaaggagcgcgagttcgtcgccggcctccgctggggcggccccaccaactacgccgactccgtcaaggaccgcttcaccatctccggcgactccgccaagcacaccatgtacctccagatgaactccctcaagcccgaggacaccgccgtctactactgcggctacaaccccggcggctgggccgtcccctcccagtacgagtacgactcctggggccagggcacccaggtcaccgtctcctccggtaccggcggaggcggatctggcggcggaggtagcggtggcggaggatctgaattcgacatccagatgacacagagccctagcagcctgtctgccagcgtgggagacagagtgaccatcacatgcaaggccagcgaccacatcaacaactggctggcctggtatcagcagaagcctggacaggcccctaagctgctgatctacggcgctaccacactggaaacaggcgtgcccagcagattttctggcagcggctctggcaccgactacaccctgacaatatccagcctccagcctgaggacttcgccacctactactgtcagcagagctggaacaccccttggacattcggccagggcaccaagctggaaatcaagagactcgagagccagcctcacaccaagcccagcgtgttcgtgatgaagaacggcaccaacgtggcctgcctcgtgaaagagttctaccccaaggacatcaggatcaacctggtgtccagcaagaagatcaccgagttcgaccccgccatcgtgatctcccccagcggcaagtacaacgccgtgaagctggggaagtacgaggacagcaacagcgtgacctgctccgtgcagcacgacaacaagaccgtgcacagcaccgactttgaagtgaaaaccgactccaccgaccacgtgaagcccaaagagacagagaacaccaagcagcccagcaagagctgccacaagcccaaggccatcgtgcacaccgagaaagtgaacatgatgagcctgaccgtgctgggcctgcggatgctgttcgccaaaaccgtggccgtgaacttcctgctgaccgccaagctgttcttcctcagggccaagcgatctggatctggagcaacaaacttctcactactcaaacaagcaggtgacgtggaggagaatcccgggcctactagtatggactggatttggcgcatccttttccttgtcggcgctgctaccggcgcgcattccttcgaacaagttcagcttcaacagcctggcgctgagctggtcaaacctggcgcttctgtgaagatgagctgcaaagccagcggctacgccttcagcagctactggatcaactggatgaagcagaaacccggccagggactcgaatggatcggccaaatctatcccggcgacggcgacaccaactacaacggcaagttcaagggcagagccacactgaccgccgatacctctagcagcacagcctacatgcagctgagcagcctgaccagcgaagatagcgccgtgtacttctgtgcccggtccatcacaacagtcgtgggctgcgctatggactattggggccagggaacaagcgtgaccgtgtctagtacgcgtgacaagcagctggacgccgacgtgtcccccaagcctaccatcttcctgccctctatcgccgagacaaagctccagaaggccggcacctacctgtgcctgctggaaaagttcttcccagatgtgattaagatccactggcaggaaaagaagtccaacaccatcctgggcagccaggaaggcaacaccatgaagaccaacgacacctacatgaagttcagctggctgaccgtgcccgagaagtccctggacaaagaacacagatgcatcgtgcggcacgaaaacaacaagaacggcgtggaccaggaaatcatcttcccacccatcaagaccgatgtgattacaatggaccccaaggacaactgctccaaggacgccaacgataccctgctgctccagctgaccaacaccagcgcctactacatgtacttgttgctgctgctgaagtccgtggtgtacttcgccatcatcacatgctgcctgctgcggagaaccgccttctgctgcaacggcgagaagtct

SEQ ID NO: 4992 - DNA, 3150 bp, Artificial Sequence
  Synthetic Polynucloetide
atggccttaccagtgaccgccttgctcctgccgctggccttgctgctccacgccgccaggccgctcgaggggaaaccaattcccaaccctcttctgggactggattcaaccggcagcggcgacaagcagctggacgccgacgtgtcccccaagcctaccatcttcctgccctctatcgccgagacaaagctccagaaggccggcacctacctgtgcctgctggaaaagttcttcccagatgtgattaagatccactggcaggaaaagaagtccaacaccatcctgggcagccaggaaggcaacaccatgaagaccaacgacacctacatgaagttcagctggctgaccgtgcccgagaagtccctggacaaagaacacagatgcatcgtgcggcacgaaaacaacaagaacggcgtggaccaggaaatcatcttcccacccatcaagaccgatgtgattacaatggaccccaaggacaactgctccaaggacgccaacgataccctgctgctccagctgaccaacaccagcgcctactacatgtacttgttgctgctgctgaagtccgtggtgtacttcgccatcatcacatgctgcctgctgcggagaaccgccttctgctgcaacggcgagaagtctagggccaagcgatctggatctggagcaacaaacttctcactactcaaacaagcaggtgacgtggaggagaatcccgggcctactagcatggccttaccagtgaccgccttgctcctgccgctggccttgctgctccacgccgccaggccgcaggtccagctcgtcgagtccggcggcggcctcgtccaggccggcgactccgtcaccctctcctgcaccgcctccggccgcaccttctcctcctacgccctcgcctggttccgccagcgccccggcaaggagcgcgagttcgtcgccggcctccgctggggcggccccaccaactacgccgactccgtcaaggaccgcttcaccatctccggcgactccgccaagcacaccatgtacctccagatgaactccctcaagcccgaggacaccgccgtctactactgcggctacaaccccggcggctgggccgtcccctcccagtacgagtacgactcctggggccagggcacccaggtcaccgtctcctccggtaccggcggaggcggatctggcggcggaggtagcggtggcggaggatctgaattcgacatccagatgacacagagccctagcagcctgtctgccagcgtgggagacagagtgaccatcacatgcaaggccagcgaccacatcaacaactggctggcctggtatcagcagaagcctggacaggcccctaagctgctgatctacggcgctaccacactggaaacaggcgtgcccagcagattttctggcagcggctctggcaccgactacaccctgacaatatccagcctccagcctgaggacttcgccacctactactgtcagcagagctggaacaccccttggacattcggccagggcaccaagctggaaatcaagagaggcggaggcggaagtggaggcggaggatctggcggcggaggctctcaagttcagcttcaacagcctggcgctgagctggtcaaacctggcgcttctgtgaagatgagctgcaaagccagcggctacgccttcagcagctactggatcaactggatgaagcagaaacccggccagggactcgaatggatcggccaaatctatcccggcgacggcgacaccaactacaacggcaagttcaagggcagagccacactgaccgccgatacctctagcagcacagcctacatgcagctgagcagcctgaccagcgaagatagcgccgtgtacttctgtgcccggtccatcacaacagtcgtgggctgcgctatggactattggggccagggaacaagcgtgaccgtgtctagtacgcgtgagcagaaactgatctcggaagaggatgggagcggcagccagcctcacaccaagcccagcgtgttcgtgatgaagaacggcaccaacgtggcctgcctcgtgaaagagttctaccccaaggacatcaggatcaacctggtgtccagcaagaagatcaccgagttcgaccccgccatcgtgatctcccccagcggcaagtacaacgccgtgaagctggggaagtacgaggacagcaacagcgtgacctgctccgtgcagcacgacaacaagaccgtgcacagcaccgactttgaagtgaaaaccgactccaccgaccacgtgaagcccaaagagacagagaacaccaagcagcccagcaagagctgccacaagcccaaggccatcgtgcacaccgagaaagtgaacatgatgagcctgaccgtgctgggcctgcggatgctgttcgccaaaaccgtggccgtgaacttcctgctgaccgccaagctgttcttcctccgcgccaagagaagcggatctggcgtgaagcagaccctgaatttcgacctgctgaagctggctggcgacgtggaatccaacccaggcccttctagaggccatatgaccgagtacaagcccacggtgcgcctcgccacccgcgacgacgtccccagggccgtacgcaccctcgccgccgcgttcgccgactaccccgccacgcgccacaccgtcgatccggaccgccacatcgagcgggtcaccgagctgcaagaactcttcctcacgcgcgtcgggctcgacatcggcaaggtgtgggtcgcggacgacggcgccgcggtggcggtctggaccacgccggagagcgtcgaagcgggggcggtgttcgccgagatcggcccgcgcatggccgagttgagcggttcccggctggccgcgcagcaacagatggaaggcctcctggcgccgcaccggcccaaggagcccgcgtggttcctggccaccgtcggcgtctcgcccgaccaccagggcaagggtctgggcagcgccgtcgtgctccccggagtggaggcggccgagcgcgccggggtgcccgccttcctggagacctccgcgccccgcaacctccccttctacgagcggctcggcttcaccgtcaccgccgacgtcgaggtgcccgaaggaccgcgcacctggtgcatgacccgcaagcccggtgcctga

SEQ ID NO: 4993 - DNA, 3525 bp, Artificial Sequence
  Synthetic Polynucloetide
atggccttaccagtgaccgccttgctcctgccgctggccttgctgctccacgccgccaggccgcaggtccagctcgtcgagtccggcggcggcctcgtccaggccggcgactccgtcaccctctcctgcaccgcctccggccgcaccttctcctcctacgccctcgcctggttccgccagcgccccggcaaggagcgcgagttcgtcgccggcctccgctggggcggccccaccaactacgccgactccgtcaaggaccgcttcaccatctccggcgactccgccaagcacaccatgtacctccagatgaactccctcaagcccgaggacaccgccgtctactactgcggctacaaccccggcggctgggccgtcccctcccagtacgagtacgactcctggggccagggcacccaggtcaccgtctcctccggtaccggcggaggcggatctggcggcggaggtagcggtggcggaggatctgaattcgacatccagatgacacagagccctagcagcctgtctgccagcgtgggagacagagtgaccatcacatgcaaggccagcgaccacatcaacaactggctggcctggtatcagcagaagcctggacaggcccctaagctgctgatctacggcgctaccacactggaaacaggcgtgcccagcagattttctggcagcggctctggcaccgactacaccctgacaatatccagcctccagcctgaggacttcgccacctactactgtcagcagagctggaacaccccttggacattcggccagggcaccaagctggaaatcaagagaggacagcctaaggccaatcctaccgtgacactgttccctccaagcagcgaagaactccaggccaacaaggccacacttgtgtgcctgatctccgacttctaccctggggctgtgacagtggcttggaaggccgatggatctcctgtgaaagccggcgtggaaaccaccaagccatccaagcagagcaacaacaaatacgccgccagctcctacctgagcctgacacctgagcagtggaagtcccacagatcctacagctgccaagtgacccacgaaggcagcaccgtggaaaagacagtggcccctacagagtgcagcggatcccagagcttcggcctgctggaccccaagctgtgctacctgctggatggcatcctgttcatctacggcgtgatcctgaccgccctgttcctgagagtgaagttcagcagaagcgccgacgcccctgcctaccagcagggacagaaccaactgtacaacgagctgaacctgggcagacgggaagagtacgacgtgctggacaagcggagaggcagggaccctgagatgggcggaaagccccagcggagaaagaacccccaggaaggactgtataacgaactccagaaagacaagatggccgaagcctacagcgagatcggcatgaagggcgagcggagaagaggcaagggccacgatggcctgtaccagggcctgagcaccgccaccaaggacacctatgacgccctgcacatgcaggccctgcctccaagaagggccaagcgatctggatctggagcaacaaacttctcactactcaaacaagcaggtgacgtggaggagaatcccgggcctactagtatggactggatttggcgcatccttttccttgtcggcgctgctaccggcgcgcattccttcgaacaagttcagcttcaacagcctggcgctgagctggtcaaacctggcgcttctgtgaagatgagctgcaaagccagcggctacgccttcagcagctactggatcaactggatgaagcagaaacccggccagggactcgaatggatcggccaaatctatcccggcgacggcgacaccaactacaacggcaagttcaagggcagagccacactgaccgccgatacctctagcagcacagcctacatgcagctgagcagcctgaccagcgaagatagcgccgtgtacttctgtgcccggtccatcacaacagtcgtgggctgcgctatggactattggggccagggaacaagcgtgaccgtgtctagtgcctctacaaagggaccctccgtgtttcctctggctcccagcagcaagtctacaagcggaggaacagccgctctgggctgcctggtcaaggattactttcccgagcctgtgaccgtgtcctggaatagcggagcactgacaagcggcgtgcacacctttccagccgtgctgcaaagcagcggcctgtactctctgagcagcgtggtcacagtgcctagctctagcctgggcacccagacctacatctgcaatgtgaaccacaagcctagcaacaccaaggtggacaagagagtggaacccaagagctgtggtacccagagttttgggttgttggaccctaaattgtgctatctgttggacggaatcctgttcatttacggagtgatcctgaccgcattgttcctgcgggttaagttttccagatccgcagacgcacccgcttaccaacaagggcagaaccaactctacaatgaacttaatttggggcggagggaagagtacgacgttctggacaaaaggaggggacgagatcccgagatgggcggaaagcctcagcgaaggaagaatccgcaagaggggctttataacgaactccagaaagataaaatggcagaagcctatagtgagattgggatgaagggagaaaggaggaggggtaaaggtcacgatgggttgtaccaaggattgagcacagccactaaagatacctatgatgcgctccacatgcaggccctgccgccaagacgcgccaagagaagcggatctggcgtgaagcagaccctgaatttcgacctgctgaagctggctggcgacgtggaatccaacccaggcccttctagaggccatatgaccgagtacaagcccacggtgcgcctcgccacccgcgacgacgtccccagggccgtacgcaccctcgccgccgcgttcgccgactaccccgccacgcgccacaccgtcgatccggaccgccacatcgagcgggtcaccgagctgcaagaactcttcctcacgcgcgtcgggctcgacatcggcaaggtgtgggtcgcggacgacggcgccgcggtggcggtctggaccacgccggagagcgtcgaagcgggggcggtgttcgccgagatcggcccgcgcatggccgagttgagcggttcccggctggccgcgcagcaacagatggaaggcctcctggcgccgcaccggcccaaggagcccgcgtggttcctggccaccgtcggcgtctcgcccgaccaccagggcaagggtctgggcagcgccgtcgtgctccccggagtggaggcggccgagcgcgccggggtgcccgccttcctggagacctccgcgccccgcaacctccccttctacgagcggctcggcttcaccgtcaccgccgacgtcgaggtgcccgaaggaccgcgcacctggtgcatgacccgcaagcccggtgcctga

SEQ ID NO: 4994 - DNA, 2880 bp, Artificial Sequence
  Synthetic Polynucloetide
atggccttaccagtgaccgccttgctcctgccgctggccttgctgctccacgccgccaggccgcaggtccagctcgtcgagtccggcggcggcctcgtccaggccggcgactccgtcaccctctcctgcaccgcctccggccgcaccttctcctcctacgccctcgcctggttccgccagcgccccggcaaggagcgcgagttcgtcgccggcctccgctggggcggccccaccaactacgccgactccgtcaaggaccgcttcaccatctccggcgactccgccaagcacaccatgtacctccagatgaactccctcaagcccgaggacaccgccgtctactactgcggctacaaccccggcggctgggccgtcccctcccagtacgagtacgactcctggggccagggcacccaggtcaccgtctcctccggtaccggcggaggcggatctggcggcggaggtagcggtggcggaggatctgaattcgacatccagatgacacagagccctagcagcctgtctgccagcgtgggagacagagtgaccatcacatgcaaggccagcgaccacatcaacaactggctggcctggtatcagcagaagcctggacaggcccctaagctgctgatctacggcgctaccacactggaaacaggcgtgcccagcagattttctggcagcggctctggcaccgactacaccctgacaatatccagcctccagcctgaggacttcgccacctactactgtcagcagagctggaacaccccttggacattcggccagggcaccaagctggaaatcaagagactcgaggacctgaagaacgtgttcccacctgaggtggccgtgttcgagcctagcgaggccgagatcagccacacccagaaagccaccctcgtgtgcctggctaccggcttctaccccgaccatgtggaactgtcttggtgggtcaacggcaaagaggtgcacagcggcgtgtctaccgacccccagccactgaaagaacagcccgccctgaacgacagccggtactgcctgagcagcagactgagagtgtccgccaccttctggcagaacccccggaaccacttcagatgccaggtgcagttctacggcctgagcgagaacgacgagtggacccaggacagagccaagcccgtgacccagatcgtgtctgccgaagcctggggcagagccgattgcggatcccagagcttcggcctgctggaccccaagctgtgctacctgctggatggcatcctgttcatctacggcgtgatcctgaccgccctgttcctgagagtgaagttcagcagaagcgccgacgcccctgcctaccagcagggacagaaccaactgtacaacgagctgaacctgggcagacgggaagagtacgacgtgctggacaagcggagaggcagggaccctgagatgggcggaaagccccagcggagaaagaacccccaggaaggactgtataacgaactccagaaagacaagatggccgaagcctacagcgagatcggcatgaagggcgagcggagaagaggcaagggccacgatggcctgtaccagggcctgagcaccgccaccaaggacacctatgacgccctgcacatgcaggccctgcctccaagaagggccaagcgatctggatctggagcaacaaacttctcactactcaaacaagcaggtgacgtggaggagaatcccgggcctactagtatggactggatttggcgcatccttttccttgtcggcgctgctaccggcgcgcattccttcgaacaagttcagcttcaacagcctggcgctgagctggtcaaacctggcgcttctgtgaagatgagctgcaaagccagcggctacgccttcagcagctactggatcaactggatgaagcagaaacccggccagggactcgaatggatcggccaaatctatcccggcgacggcgacaccaactacaacggcaagttcaagggcagagccacactgaccgccgatacctctagcagcacagcctacatgcagctgagcagcctgaccagcgaagatagcgccgtgtacttctgtgcccggtccatcacaacagtcgtgggctgcgctatggactattggggccagggaacaagcgtgaccgtgtctagtacgcgtatccagaaccctgatcctgccgtgtaccagctgcgggatagcaagagcagcgacaagagcgtgtgtctgttcaccgacttcgacagccagaccaacgtgtcccagagcaaggactccgacgtgtacatcaccgataagaccgtgctggacatgcggagcatggacttcaagagcaactccgccgtggcctggtccaacaagtccgatttcgcctgcgccaacgccttcaacaacagcattatccccgaggacacattcttcccaagccccgagagcagctgcggtacccagagttttgggttgttggaccctaaattgtgctatctgttggacggaatcctgttcatttacggagtgatcctgaccgcattgttcctgcgggttaagttttccagatccgcagacgcacccgcttaccaacaagggcagaaccaactctacaatgaacttaatttggggcggagggaagagtacgacgttctggacaaaaggaggggacgagatcccgagatgggcggaaagcctcagcgaaggaagaatccgcaagaggggctttataacgaactccagaaagataaaatggcagaagcctatagtgagattgggatgaagggagaaaggaggaggggtaaaggtcacgatgggttgtaccaaggattgagcacagccactaaagatacctatgatgcgctccacatgcaggccctgccgccaaga

SEQ ID NO: 4995 - DNA, 2880 bp, Artificial Sequence
  Synthetic Polynucloetide
atggccttaccagtgaccgccttgctcctgccgctggccttgctgctccacgccgccaggccgcaggtccagctcgtcgagtccggcggcggcctcgtccaggccggcgactccgtcaccctctcctgcaccgcctccggccgcaccttctcctcctacgccctcgcctggttccgccagcgccccggcaaggagcgcgagttcgtcgccggcctccgctggggcggccccaccaactacgccgactccgtcaaggaccgcttcaccatctccggcgactccgccaagcacaccatgtacctccagatgaactccctcaagcccgaggacaccgccgtctactactgcggctacaaccccggcggctgggccgtcccctcccagtacgagtacgactcctggggccagggcacccaggtcaccgtctcctccggtaccggcggaggcggatctggcggcggaggtagcggtggcggaggatctgaattcgacatccagatgacacagagccctagcagcctgtctgccagcgtgggagacagagtgaccatcacatgcaaggccagcgaccacatcaacaactggctggcctggtatcagcagaagcctggacaggcccctaagctgctgatctacggcgctaccacactggaaacaggcgtgcccagcagattttctggcagcggctctggcaccgactacaccctgacaatatccagcctccagcctgaggacttcgccacctactactgtcagcagagctggaacaccccttggacattcggccagggcaccaagctggaaatcaagagactcgaggacctgaagaacgtgttcccacctgaggtggccgtgttcgagcctagcaaggccgagatcgcccacacccagaaagccaccctcgtgtgcctggctaccggcttctaccccgaccatgtggaactgtcttggtgggtcaacggcaaagaggtgcacagcggcgtgtgtaccgacccccagccactgaaagaacagcccgccctgaacgacagccggtactgcctgagcagcagactgagagtgtccgccaccttctggcagaacccccggaaccacttcagatgccaggtgcagttctacggcctgagcgagaacgacgagtggacccaggacagagccaagcccgtgacccagatcgtgtctgccgaagcctggggcagagccgattgcggatcccagagcttcggcctgctggaccccaagctgtgctacctgctggatggcatcctgttcatctacggcgtgatcctgaccgccctgttcctgagagtgaagttcagcagaagcgccgacgcccctgcctaccagcagggacagaaccaactgtacaacgagctgaacctgggcagacgggaagagtacgacgtgctggacaagcggagaggcagggaccctgagatgggcggaaagccccagcggagaaagaacccccaggaaggactgtataacgaactccagaaagacaagatggccgaagcctacagcgagatcggcatgaagggcgagcggagaagaggcaagggccacgatggcctgtaccagggcctgagcaccgccaccaaggacacctatgacgccctgcacatgcaggccctgcctccaagaagggccaagcgatctggatctggagcaacaaacttctcactactcaaacaagcaggtgacgtggaggagaatcccgggcctactagtatggactggatttggcgcatccttttccttgtcggcgctgctaccggcgcgcattccttcgaacaagttcagcttcaacagcctggcgctgagctggtcaaacctggcgcttctgtgaagatgagctgcaaagccagcggctacgccttcagcagctactggatcaactggatgaagcagaaacccggccagggactcgaatggatcggccaaatctatcccggcgacggcgacaccaactacaacggcaagttcaagggcagagccacactgaccgccgatacctctagcagcacagcctacatgcagctgagcagcctgaccagcgaagatagcgccgtgtacttctgtgcccggtccatcacaacagtcgtgggctgcgctatggactattggggccagggaacaagcgtgaccgtgtctagtacgcgtatccagaaccctgatcctgccgtgtaccagctgcgggatagcaagagcagcgacaagagcgtgtgtctgttcaccgacttcgacagccagaccaacgtgtcccagagcaaggactccgacgtgtacatcaccgataagtgcgtgctggacatgcggagcatggacttcaagagcaactccgccgtggcctggtccaacaagtccgatttcgcctgcgccaacgccttcaacaacagcattatccccgaggacacattcttcccaagcagcgacgtgccctgcggtacccagagttttgggttgttggaccctaaattgtgctatctgttggacggaatcctgttcatttacggagtgatcctgaccgcattgttcctgcgggttaagttttccagatccgcagacgcacccgcttaccaacaagggcagaaccaactctacaatgaacttaatttggggcggagggaagagtacgacgttctggacaaaaggaggggacgagatcccgagatgggcggaaagcctcagcgaaggaagaatccgcaagaggggctttataacgaactccagaaagataaaatggcagaagcctatagtgagattgggatgaagggagaaaggaggaggggtaaaggtcacgatgggttgtaccaaggattgagcacagccactaaagatacctatgatgcgctccacatgcaggccctgccgccaaga

SEQ ID NO: 4996 - DNA, 3093 bp, Artificial Sequence
  Synthetic Polynucloetide
atggccttaccagtgaccgccttgctcctgccgctggccttgctgctccacgccgccaggccgcaggtccagctcgtcgagtccggcggcggcctcgtccaggccggcgactccgtcaccctctcctgcaccgcctccggccgcaccttctcctcctacgccctcgcctggttccgccagcgccccggcaaggagcgcgagttcgtcgccggcctccgctggggcggccccaccaactacgccgactccgtcaaggaccgcttcaccatctccggcgactccgccaagcacaccatgtacctccagatgaactccctcaagcccgaggacaccgccgtctactactgcggctacaaccccggcggctgggccgtcccctcccagtacgagtacgactcctggggccagggcacccaggtcaccgtctcctccggtaccggcggaggcggatctggcggcggaggtagcggtggcggaggatctgaattcgacatccagatgacacagagccctagcagcctgtctgccagcgtgggagacagagtgaccatcacatgcaaggccagcgaccacatcaacaactggctggcctggtatcagcagaagcctggacaggcccctaagctgctgatctacggcgctaccacactggaaacaggcgtgcccagcagattttctggcagcggctctggcaccgactacaccctgacaatatccagcctccagcctgaggacttcgccacctactactgtcagcagagctggaacaccccttggacattcggccagggcaccaagctggaaatcaagagactcgaggggaaaccaattcccaaccctcttctgggactggattcaaccggcagcggcgaggacctgaagaacgtgttcccacctgaggtggccgtgttcgagcctagcgaggccgagatcagccacacccagaaagccaccctcgtgtgcctggctaccggcttctaccccgaccatgtggaactgtcttggtgggtcaacggcaaagaggtgcacagcggcgtgtctaccgacccccagccactgaaagaacagcccgccctgaacgacagccggtactgcctgagcagcagactgagagtgtccgccaccttctggcagaacccccggaaccacttcagatgccaggtgcagttctacggcctgagcgagaacgacgagtggacccaggacagagccaagcccgtgacccagatcgtgtctgccgaagcctggggcagagccgattgcggatcccagagcttcggcctgctggaccccaagctgtgctacctgctggatggcatcctgttcatctacggcgtgatcctgaccgccctgttcctgagagtgaagttcagcagaagcgccgacgcccctgcctaccagcagggacagaaccaactgtacaacgagctgaacctgggcagacgggaagagtacgacgtgctggacaagcggagaggcagggaccctgagatgggcggaaagccccagcggagaaagaacccccaggaaggactgtataacgaactccagaaagacaagatggccgaagcctacagcgagatcggcatgaagggcgagcggagaagaggcaagggccacgatggcctgtaccagggcctgagcaccgccaccaaggacacctatgacgccctgcacatgcaggccctgcctccaagaagggccaagcgatctggatctggagcaacaaacttctcactactcaaacaagcaggtgacgtggaggagaatcccgggcctactagtatggactggatttggcgcatccttttccttgtcggcgctgctaccggcgcgcattccttcgaacaagttcagcttcaacagcctggcgctgagctggtcaaacctggcgcttctgtgaagatgagctgcaaagccagcggctacgccttcagcagctactggatcaactggatgaagcagaaacccggccagggactcgaatggatcggccaaatctatcccggcgacggcgacaccaactacaacggcaagttcaagggcagagccacactgaccgccgatacctctagcagcacagcctacatgcagctgagcagcctgaccagcgaagatagcgccgtgtacttctgtgcccggtccatcacaacagtcgtgggctgcgctatggactattggggccagggaacaagcgtgaccgtgtctagtacgcgtgagcagaaactgatctcggaagaggatgggagcggcatccagaaccctgatcctgccgtgtaccagctgcgggatagcaagagcagcgacaagagcgtgtgtctgttcaccgacttcgacagccagaccaacgtgtcccagagcaaggactccgacgtgtacatcaccgataagaccgtgctggacatgcggagcatggacttcaagagcaactccgccgtggcctggtccaacaagtccgatttcgcctgcgccaacgccttcaacaacagcattatccccgaggacacattcttcccaagccccgagagcagctgcggtacccagagttttgggttgttggaccctaaattgtgctatctgttggacggaatcctgttcatttacggagtgatcctgaccgcattgttcctgaggagcaagcggtcacggctgctccacagcgattacatgaatatgacaccacgaagaccgggtcctactcgcaaacactaccaaccctacgcacctccccgcgactttgcagcgtaccgatctcgggttaagttttccagatccgcagacgcacccgcttaccaacaagggcagaaccaactctacaatgaacttaatttggggcggagggaagagtacgacgttctggacaaaaggaggggacgagatcccgagatgggcggaaagcctcagcgaaggaagaatccgcaagaggggctttataacgaactccagaaagataaaatggcagaagcctatagtgagattgggatgaagggagaaaggaggaggggtaaaggtcacgatgggttgtaccaaggattgagcacagccactaaagatacctatgatgcgctccacatgcaggccctgccgccaaga

SEQ ID NO: 4997 - DNA, 3216 bp, Artificial Sequence
  Synthetic Polynucloetide
atggccttaccagtgaccgccttgctcctgccgctggccttgctgctccacgccgccaggccgcaggtccagctcgtcgagtccggcggcggcctcgtccaggccggcgactccgtcaccctctcctgcaccgcctccggccgcaccttctcctcctacgccctcgcctggttccgccagcgccccggcaaggagcgcgagttcgtcgccggcctccgctggggcggccccaccaactacgccgactccgtcaaggaccgcttcaccatctccggcgactccgccaagcacaccatgtacctccagatgaactccctcaagcccgaggacaccgccgtctactactgcggctacaaccccggcggctgggccgtcccctcccagtacgagtacgactcctggggccagggcacccaggtcaccgtctcctccggtaccggcggaggcggatctggcggcggaggtagcggtggcggaggatctgaattcgacatccagatgacacagagccctagcagcctgtctgccagcgtgggagacagagtgaccatcacatgcaaggccagcgaccacatcaacaactggctggcctggtatcagcagaagcctggacaggcccctaagctgctgatctacggcgctaccacactggaaacaggcgtgcccagcagattttctggcagcggctctggcaccgactacaccctgacaatatccagcctccagcctgaggacttcgccacctactactgtcagcagagctggaacaccccttggacattcggccagggcaccaagctggaaatcaagagactcgaggggaaaccaattcccaaccctcttctgggactggattcaaccggcagcggcgaggacctgaagaacgtgttcccacctgaggtggccgtgttcgagcctagcgaggccgagatcagccacacccagaaagccaccctcgtgtgcctggctaccggcttctaccccgaccatgtggaactgtcttggtgggtcaacggcaaagaggtgcacagcggcgtgtctaccgacccccagccactgaaagaacagcccgccctgaacgacagccggtactgcctgagcagcagactgagagtgtccgccaccttctggcagaacccccggaaccacttcagatgccaggtgcagttctacggcctgagcgagaacgacgagtggacccaggacagagccaagcccgtgacccagatcgtgtctgccgaagcctggggcagagccgattgcggatcccagagcttcggcctgctggaccccaagctgtgctacctgctggatggcatcctgttcatctacggcgtgatcctgaccgccctgttcctgaggagtaagaggagcaggctcctgcacagtgactacatgaacatgactccacgccgccccggacccacccgcaagcattaccagccctatgccccaccacgcgacttcgcagcctatcgctccagagtgaagttcagcagaagcgccgacgcccctgcctaccagcagggacagaaccaactgtacaacgagctgaacctgggcagacgggaagagtacgacgtgctggacaagcggagaggcagggaccctgagatgggcggaaagccccagcggagaaagaacccccaggaaggactgtataacgaactccagaaagacaagatggccgaagcctacagcgagatcggcatgaagggcgagcggagaagaggcaagggccacgatggcctgtaccagggcctgagcaccgccaccaaggacacctatgacgccctgcacatgcaggccctgcctccaagaagggccaagcgatctggatctggagcaacaaacttctcactactcaaacaagcaggtgacgtggaggagaatcccgggcctactagtatggactggatttggcgcatccttttccttgtcggcgctgctaccggcgcgcattccttcgaacaagttcagcttcaacagcctggcgctgagctggtcaaacctggcgcttctgtgaagatgagctgcaaagccagcggctacgccttcagcagctactggatcaactggatgaagcagaaacccggccagggactcgaatggatcggccaaatctatcccggcgacggcgacaccaactacaacggcaagttcaagggcagagccacactgaccgccgatacctctagcagcacagcctacatgcagctgagcagcctgaccagcgaagatagcgccgtgtacttctgtgcccggtccatcacaacagtcgtgggctgcgctatggactattggggccagggaacaagcgtgaccgtgtctagtacgcgtgagcagaaactgatctcggaagaggatgggagcggcatccagaaccctgatcctgccgtgtaccagctgcgggatagcaagagcagcgacaagagcgtgtgtctgttcaccgacttcgacagccagaccaacgtgtcccagagcaaggactccgacgtgtacatcaccgataagaccgtgctggacatgcggagcatggacttcaagagcaactccgccgtggcctggtccaacaagtccgatttcgcctgcgccaacgccttcaacaacagcattatccccgaggacacattcttcccaagccccgagagcagctgcggtacccagagttttgggttgttggaccctaaattgtgctatctgttggacggaatcctgttcatttacggagtgatcctgaccgcattgttcctgaggagcaagcggtcacggctgctccacagcgattacatgaatatgacaccacgaagaccgggtcctactcgcaaacactaccaaccctacgcacctccccgcgactttgcagcgtaccgatctcgggttaagttttccagatccgcagacgcacccgcttaccaacaagggcagaaccaactctacaatgaacttaatttggggcggagggaagagtacgacgttctggacaaaaggaggggacgagatcccgagatgggcggaaagcctcagcgaaggaagaatccgcaagaggggctttataacgaactccagaaagataaaatggcagaagcctatagtgagattgggatgaagggagaaaggaggaggggtaaaggtcacgatgggttgtaccaaggattgagcacagccactaaagatacctatgatgcgctccacatgcaggccctgccgccaaga

SEQ ID NO: 4998 - DNA, 3099 bp, Artificial Sequence
  Synthetic Polynucloetide
atggccttaccagtgaccgccttgctcctgccgctggccttgctgctccacgccgccaggccgcaggtccagctcgtcgagtccggcggcggcctcgtccaggccggcgactccgtcaccctctcctgcaccgcctccggccgcaccttctcctcctacgccctcgcctggttccgccagcgccccggcaaggagcgcgagttcgtcgccggcctccgctggggcggccccaccaactacgccgactccgtcaaggaccgcttcaccatctccggcgactccgccaagcacaccatgtacctccagatgaactccctcaagcccgaggacaccgccgtctactactgcggctacaaccccggcggctgggccgtcccctcccagtacgagtacgactcctggggccagggcacccaggtcaccgtctcctccggtaccggcggaggcggatctggcggcggaggtagcggtggcggaggatctgaattcgacatccagatgacacagagccctagcagcctgtctgccagcgtgggagacagagtgaccatcacatgcaaggccagcgaccacatcaacaactggctggcctggtatcagcagaagcctggacaggcccctaagctgctgatctacggcgctaccacactggaaacaggcgtgcccagcagattttctggcagcggctctggcaccgactacaccctgacaatatccagcctccagcctgaggacttcgccacctactactgtcagcagagctggaacaccccttggacattcggccagggcaccaagctggaaatcaagagactcgaggggaaaccaattcccaaccctcttctgggactggattcaaccggcagcggcgaggacctgaagaacgtgttcccacctgaggtggccgtgttcgagcctagcgaggccgagatcagccacacccagaaagccaccctcgtgtgcctggctaccggcttctaccccgaccatgtggaactgtcttggtgggtcaacggcaaagaggtgcacagcggcgtgtctaccgacccccagccactgaaagaacagcccgccctgaacgacagccggtactgcctgagcagcagactgagagtgtccgccaccttctggcagaacccccggaaccacttcagatgccaggtgcagttctacggcctgagcgagaacgacgagtggacccaggacagagccaagcccgtgacccagatcgtgtctgccgaagcctggggcagagccgattgcggatcccagagcttcggcctgctggaccccaagctgtgctacctgctggatggcatcctgttcatctacggcgtgatcctgaccgccctgttcctgagagtgaagttcagcagaagcgccgacgcccctgcctaccagcagggacagaaccaactgtacaacgagctgaacctgggcagacgggaagagtacgacgtgctggacaagcggagaggcagggaccctgagatgggcggaaagccccagcggagaaagaacccccaggaaggactgtataacgaactccagaaagacaagatggccgaagcctacagcgagatcggcatgaagggcgagcggagaagaggcaagggccacgatggcctgtaccagggcctgagcaccgccaccaaggacacctatgacgccctgcacatgcaggccctgcctccaagaagggccaagcgatctggatctggagcaacaaacttctcactactcaaacaagcaggtgacgtggaggagaatcccgggcctactagtatggactggatttggcgcatccttttccttgtcggcgctgctaccggcgcgcattccttcgaacaagttcagcttcaacagcctggcgctgagctggtcaaacctggcgcttctgtgaagatgagctgcaaagccagcggctacgccttcagcagctactggatcaactggatgaagcagaaacccggccagggactcgaatggatcggccaaatctatcccggcgacggcgacaccaactacaacggcaagttcaagggcagagccacactgaccgccgatacctctagcagcacagcctacatgcagctgagcagcctgaccagcgaagatagcgccgtgtacttctgtgcccggtccatcacaacagtcgtgggctgcgctatggactattggggccagggaacaagcgtgaccgtgtctagtacgcgtgagcagaaactgatctcggaagaggatctggggagcggcatccagaaccctgatcctgccgtgtaccagctgcgggatagcaagagcagcgacaagagcgtgtgtctgttcaccgacttcgacagccagaccaacgtgtcccagagcaaggactccgacgtgtacatcaccgataagaccgtgctggacatgcggagcatggacttcaagagcaactccgccgtggcctggtccaacaagtccgatttcgcctgcgccaacgccttcaacaacagcattatccccgaggacacattcttcccaagccccgagagcagctgcggtacccagagttttgggttgttggaccctaaattgtgctatctgttggacggaatcctgttcatttacggagtgatcctgaccgcattgttcctgaagagaggccggaagaagctgctgtacatcttcaagcagcctttcatgcggcccgtgcagaccacccaggaagaggacggctgctcctgccggttccccgaggaagaagaaggcggctgcgagctgcgggttaagttttccagatccgcagacgcacccgcttaccaacaagggcagaaccaactctacaatgaacttaatttggggcggagggaagagtacgacgttctggacaaaaggaggggacgagatcccgagatgggcggaaagcctcagcgaaggaagaatccgcaagaggggctttataacgaactccagaaagataaaatggcagaagcctatagtgagattgggatgaagggagaaaggaggaggggtaaaggtcacgatgggttgtaccaaggattgagcacagccactaaagatacctatgatgcgctccacatgcaggccctgccgccaaga

SEQ ID NO: 4999 - DNA, 3225 bp, Artificial Sequence
  Synthetic Polynucloetide
atggccttaccagtgaccgccttgctcctgccgctggccttgctgctccacgccgccaggccgcaggtccagctcgtcgagtccggcggcggcctcgtccaggccggcgactccgtcaccctctcctgcaccgcctccggccgcaccttctcctcctacgccctcgcctggttccgccagcgccccggcaaggagcgcgagttcgtcgccggcctccgctggggcggccccaccaactacgccgactccgtcaaggaccgcttcaccatctccggcgactccgccaagcacaccatgtacctccagatgaactccctcaagcccgaggacaccgccgtctactactgcggctacaaccccggcggctgggccgtcccctcccagtacgagtacgactcctggggccagggcacccaggtcaccgtctcctccggtaccggcggaggcggatctggcggcggaggtagcggtggcggaggatctgaattcgacatccagatgacacagagccctagcagcctgtctgccagcgtgggagacagagtgaccatcacatgcaaggccagcgaccacatcaacaactggctggcctggtatcagcagaagcctggacaggcccctaagctgctgatctacggcgctaccacactggaaacaggcgtgcccagcagattttctggcagcggctctggcaccgactacaccctgacaatatccagcctccagcctgaggacttcgccacctactactgtcagcagagctggaacaccccttggacattcggccagggcaccaagctggaaatcaagagactcgaggggaaaccaattcccaaccctcttctgggactggattcaaccggcagcggcgaggacctgaagaacgtgttcccacctgaggtggccgtgttcgagcctagcgaggccgagatcagccacacccagaaagccaccctcgtgtgcctggctaccggcttctaccccgaccatgtggaactgtcttggtgggtcaacggcaaagaggtgcacagcggcgtgtctaccgacccccagccactgaaagaacagcccgccctgaacgacagccggtactgcctgagcagcagactgagagtgtccgccaccttctggcagaacccccggaaccacttcagatgccaggtgcagttctacggcctgagcgagaacgacgagtggacccaggacagagccaagcccgtgacccagatcgtgtctgccgaagcctggggcagagccgattgcggatcccagagcttcggcctgctggaccccaagctgtgctacctgctggatggcatcctgttcatctacggcgtgatcctgaccgccctgttcctgaaacggggcagaaagaaactcctgtatatattcaaacaaccatttatgagaccagtacaaactactcaagaggaagatggctgtagctgccgatttccagaagaagaagaaggaggatgtgaactgagagtgaagttcagcagaagcgccgacgcccctgcctaccagcagggacagaaccaactgtacaacgagctgaacctgggcagacgggaagagtacgacgtgctggacaagcggagaggcagggaccctgagatgggcggaaagccccagcggagaaagaacccccaggaaggactgtataacgaactccagaaagacaagatggccgaagcctacagcgagatcggcatgaagggcgagcggagaagaggcaagggccacgatggcctgtaccagggcctgagcaccgccaccaaggacacctatgacgccctgcacatgcaggccctgcctccaagaagggccaagcgatctggatctggagcaacaaacttctcactactcaaacaagcaggtgacgtggaggagaatcccgggcctactagtatggactggatttggcgcatccttttccttgtcggcgctgctaccggcgcgcattccttcgaacaagttcagcttcaacagcctggcgctgagctggtcaaacctggcgcttctgtgaagatgagctgcaaagccagcggctacgccttcagcagctactggatcaactggatgaagcagaaacccggccagggactcgaatggatcggccaaatctatcccggcgacggcgacaccaactacaacggcaagttcaagggcagagccacactgaccgccgatacctctagcagcacagcctacatgcagctgagcagcctgaccagcgaagatagcgccgtgtacttctgtgcccggtccatcacaacagtcgtgggctgcgctatggactattggggccagggaacaagcgtgaccgtgtctagtacgcgtgagcagaaactgatctcggaagaggatctggggagcggcatccagaaccctgatcctgccgtgtaccagctgcgggatagcaagagcagcgacaagagcgtgtgtctgttcaccgacttcgacagccagaccaacgtgtcccagagcaaggactccgacgtgtacatcaccgataagaccgtgctggacatgcggagcatggacttcaagagcaactccgccgtggcctggtccaacaagtccgatttcgcctgcgccaacgccttcaacaacagcattatccccgaggacacattcttcccaagccccgagagcagctgcggtacccagagttttgggttgttggaccctaaattgtgctatctgttggacggaatcctgttcatttacggagtgatcctgaccgcattgttcctgaagagaggccggaagaagctgctgtacatcttcaagcagcctttcatgcggcccgtgcagaccacccaggaagaggacggctgctcctgccggttccccgaggaagaagaaggcggctgcgagctgcgggttaagttttccagatccgcagacgcacccgcttaccaacaagggcagaaccaactctacaatgaacttaatttggggcggagggaagagtacgacgttctggacaaaaggaggggacgagatcccgagatgggcggaaagcctcagcgaaggaagaatccgcaagaggggctttataacgaactccagaaagataaaatggcagaagcctatagtgagattgggatgaagggagaaaggaggaggggtaaaggtcacgatgggttgtaccaaggattgagcacagccactaaagatacctatgatgcgctccacatgcaggccctgccgccaaga

SEQ ID NO: 5000 - DNA, 2898 bp, Artificial Sequence
  Synthetic Polynucloetide
atggccttaccagtgaccgccttgctcctgccgctggccttgctgctccacgccgccaggccgcaggtccagctcgtcgagtccggcggcggcctcgtccaggccggcgactccgtcaccctctcctgcaccgcctccggccgcaccttctcctcctacgccctcgcctggttccgccagcgccccggcaaggagcgcgagttcgtcgccggcctccgctggggcggccccaccaactacgccgactccgtcaaggaccgcttcaccatctccggcgactccgccaagcacaccatgtacctccagatgaactccctcaagcccgaggacaccgccgtctactactgcggctacaaccccggcggctgggccgtcccctcccagtacgagtacgactcctggggccagggcacccaggtcaccgtctcctccggtaccggcggaggcggatctggcggcggaggtagcggtggcggaggatctgaattcgacatccagatgacacagagccctagcagcctgtctgccagcgtgggagacagagtgaccatcacatgcaaggccagcgaccacatcaacaactggctggcctggtatcagcagaagcctggacaggcccctaagctgctgatctacggcgctaccacactggaaacaggcgtgcccagcagattttctggcagcggctctggcaccgactacaccctgacaatatccagcctccagcctgaggacttcgccacctactactgtcagcagagctggaacaccccttggacattcggccagggcaccaagctggaaatcaagagactcgagcagagcttcggcctgctggaccccaagctgtgctacctgctggatggcatcctgttcatctacggcgtgatcctgaccgccctgttcctgagagtgaagttcagcagaagcgccgacgcccctgcctaccagcagggacagaaccaactgtacaacgagctgaacctgggcagacgggaagagtacgacgtgctggacaagcggagaggcagggaccctgagatgggcggaaagccccagcggagaaagaacccccaggaaggactgtataacgaactccagaaagacaagatggccgaagcctacagcgagatcggcatgaagggcgagcggagaagaggcaagggccacgatggcctgtaccagggcctgagcaccgccaccaaggacacctatgacgccctgcacatgcaggccctgcctccaagaagggccaagcgatctggatctggagcaacaaacttctcactactcaaacaagcaggtgacgtggaggagaatcccgggcctactagtatggactggatttggcgcatccttttccttgtcggcgctgctaccggcgcgcattccttcgaacaagttcagcttcaacagcctggcgctgagctggtcaaacctggcgcttctgtgaagatgagctgcaaagccagcggctacgccttcagcagctactggatcaactggatgaagcagaaacccggccagggactcgaatggatcggccaaatctatcccggcgacggcgacaccaactacaacggcaagttcaagggcagagccacactgaccgccgatacctctagcagcacagcctacatgcagctgagcagcctgaccagcgaagatagcgccgtgtacttctgtgcccggtccatcacaacagtcgtgggctgcgctatggactattggggccagggaacaagcgtgaccgtgtctagtacgcgtcagagttttgggttgttggaccctaaattgtgctatctgttggacggaatcctgttcatttacggagtgatcctgaccgcattgttcctgcgggttaagttttccagatccgcagacgcacccgcttaccaacaagggcagaaccaactctacaatgaacttaatttggggcggagggaagagtacgacgttctggacaaaaggaggggacgagatcccgagatgggcggaaagcctcagcgaaggaagaatccgcaagaggggctttataacgaactccagaaagataaaatggcagaagcctatagtgagattgggatgaagggagaaaggaggaggggtaaaggtcacgatgggttgtaccaaggattgagcacagccactaaagatacctatgatgcgctccacatgcaggccctgccgccaagacgcgccaagagaagcggatctggcgtgaagcagaccctgaatttcgacctgctgaagctggctggcgacgtggaatccaacccaggcccttctagaggccatatgaccgagtacaagcccacggtgcgcctcgccacccgcgacgacgtccccagggccgtacgcaccctcgccgccgcgttcgccgactaccccgccacgcgccacaccgtcgatccggaccgccacatcgagcgggtcaccgagctgcaagaactcttcctcacgcgcgtcgggctcgacatcggcaaggtgtgggtcgcggacgacggcgccgcggtggcggtctggaccacgccggagagcgtcgaagcgggggcggtgttcgccgagatcggcccgcgcatggccgagttgagcggttcccggctggccgcgcagcaacagatggaaggcctcctggcgccgcaccggcccaaggagcccgcgtggttcctggccaccgtcggcgtctcgcccgaccaccagggcaagggtctgggcagcgccgtcgtgctccccggagtggaggcggccgagcgcgccggggtgcccgccttcctggagacctccgcgccccgcaacctccccttctacgagcggctcggcttcaccgtcaccgccgacgtcgaggtgcccgaaggaccgcgcacctggtgcatgacccgcaagcccggtgcctga

SEQ ID NO: 5001 - DNA, 2370 bp, Artificial Sequence
  Synthetic Polynucloetide
atggccttaccagtgaccgccttgctcctgccgctggccttgctgctccacgccgccaggccgcaggtccagctcgtcgagtccggcggcggcctcgtccaggccggcgactccgtcaccctctcctgcaccgcctccggccgcaccttctcctcctacgccctcgcctggttccgccagcgccccggcaaggagcgcgagttcgtcgccggcctccgctggggcggccccaccaactacgccgactccgtcaaggaccgcttcaccatctccggcgactccgccaagcacaccatgtacctccagatgaactccctcaagcccgaggacaccgccgtctactactgcggctacaaccccggcggctgggccgtcccctcccagtacgagtacgactcctggggccagggcacccaggtcaccgtctcctccggtaccggcggaggcggatctggcggcggaggtagcggtggcggaggatctgaattcgacatccagatgacacagagccctagcagcctgtctgccagcgtgggagacagagtgaccatcacatgcaaggccagcgaccacatcaacaactggctggcctggtatcagcagaagcctggacaggcccctaagctgctgatctacggcgctaccacactggaaacaggcgtgcccagcagattttctggcagcggctctggcaccgactacaccctgacaatatccagcctccagcctgaggacttcgccacctactactgtcagcagagctggaacaccccttggacattcggccagggcaccaagctggaaatcaagagactcgagggacagcctaaggccaatcctaccgtgacactgttccctccaagcagcgaagaactccaggccaacaaggccacacttgtgtgcctgatctccgacttctaccctggggctgtgacagtggcttggaaggccgatggatctcctgtgaaagccggcgtggaaaccaccaagccatccaagcagagcaacaacaaatacgccgccagctcctacctgagcctgacacctgagcagtggaagtcccacagatcctacagctgccaagtgacccacgaaggcagcaccgtggaaaagacagtggcccctacagagtgcagccccatcaagaccgatgtgattacaatggaccccaaggacaactgctccaaggacgccaacgataccctgctgctccagctgaccaacaccagcgcctactacatgtacttgttgctgctgctgaagtccgtggtgtacttcgccatcatcacatgctgcctgctgcggagaaccgccttctgctgcaacggcgagaagtctagggccaagcgatctggatctggagcaacaaacttctcactactcaaacaagcaggtgacgtggaggagaatcccgggcctactagtatggactggatttggcgcatccttttccttgtcggcgctgctaccggcgcgcattccttcgaacaagttcagcttcaacagcctggcgctgagctggtcaaacctggcgcttctgtgaagatgagctgcaaagccagcggctacgccttcagcagctactggatcaactggatgaagcagaaacccggccagggactcgaatggatcggccaaatctatcccggcgacggcgacaccaactacaacggcaagttcaagggcagagccacactgaccgccgatacctctagcagcacagcctacatgcagctgagcagcctgaccagcgaagatagcgccgtgtacttctgtgcccggtccatcacaacagtcgtgggctgcgctatggactattggggccagggaacaagcgtgaccgtgtctagtacgcgtgcctctacaaagggaccctccgtgtttcctctggctcccagcagcaagtctacaagcggaggaacagccgctctgggctgcctggtcaaggattactttcccgagcctgtgaccgtgtcctggaatagcggagcactgacaagcggcgtgcacacctttccagccgtgctgcaaagcagcggcctgtactctctgagcagcgtggtcacagtgcctagctctagcctgggcacccagacctacatctgcaatgtgaaccacaagcctagcaacaccaaggtggacaagagagtggaacccaagagctgtgaagtgaaaaccgactccaccgaccacgtgaagcccaaagagacagagaacaccaagcagcccagcaagagctgccacaagcccaaggccatcgtgcacaccgagaaagtgaacatgatgagcctgaccgtgctgggcctgcggatgctgttcgccaaaaccgtggccgtgaacttcctgctgaccgccaagctgttcttcctc

SEQ ID NO: 5002 - DNA, 2304 bp, Artificial Sequence
  Synthetic Polynucloetide
atggccttaccagtgaccgccttgctcctgccgctggccttgctgctccacgccgccaggccgcaggtccagctcgtcgagtccggcggcggcctcgtccaggccggcgactccgtcaccctctcctgcaccgcctccggccgcaccttctcctcctacgccctcgcctggttccgccagcgccccggcaaggagcgcgagttcgtcgccggcctccgctggggcggccccaccaactacgccgactccgtcaaggaccgcttcaccatctccggcgactccgccaagcacaccatgtacctccagatgaactccctcaagcccgaggacaccgccgtctactactgcggctacaaccccggcggctgggccgtcccctcccagtacgagtacgactcctggggccagggcacccaggtcaccgtctcctccggtaccggcggaggcggatctggcggcggaggtagcggtggcggaggatctgaattcgacatccagatgacacagagccctagcagcctgtctgccagcgtgggagacagagtgaccatcacatgcaaggccagcgaccacatcaacaactggctggcctggtatcagcagaagcctggacaggcccctaagctgctgatctacggcgctaccacactggaaacaggcgtgcccagcagattttctggcagcggctctggcaccgactacaccctgacaatatccagcctccagcctgaggacttcgccacctactactgtcagcagagctggaacaccccttggacattcggccagggcaccaagctggaaatcaagagactcgagggacagcctaaggccaatcctaccgtgacactgttccctccaagcagcgaagaactccaggccaacaaggccacacttgtgtgcctgatctccgacttctaccctggggctgtgacagtggcttggaaggccgatggatctcctgtgaaagccggcgtggaaaccaccaagccatccaagcagagcaacaacaaatacgccgccagctcctacctgagcctgacacctgagcagtggaagtcccacagatcctacagctgccaagtgacccacgaaggcagcaccgtggaaaagacagtggcccctacagagtgcagcggcagagccgattgcggcatcaccagcgccagctaccaccagggcgtgctgagcgccaccatcctgtacgagatcctgctgggcaaggccaccctgtacgccgtgctggtgtctgccctggtgctgatggctatggtcaagcggaaggacagccggggaagggccaagcgatctggatctggagcaacaaacttctcactactcaaacaagcaggtgacgtggaggagaatcccgggcctactagtatggactggatttggcgcatccttttccttgtcggcgctgctaccggcgcgcattccttcgaacaagttcagcttcaacagcctggcgctgagctggtcaaacctggcgcttctgtgaagatgagctgcaaagccagcggctacgccttcagcagctactggatcaactggatgaagcagaaacccggccagggactcgaatggatcggccaaatctatcccggcgacggcgacaccaactacaacggcaagttcaagggcagagccacactgaccgccgatacctctagcagcacagcctacatgcagctgagcagcctgaccagcgaagatagcgccgtgtacttctgtgcccggtccatcacaacagtcgtgggctgcgctatggactattggggccagggaacaagcgtgaccgtgtctagtacgcgtgcctctacaaagggaccctccgtgtttcctctggctcccagcagcaagtctacaagcggaggaacagccgctctgggctgcctggtcaaggattactttcccgagcctgtgaccgtgtcctggaatagcggagcactgacaagcggcgtgcacacctttccagccgtgctgcaaagcagcggcctgtactctctgagcagcgtggtcacagtgcctagctctagcctgggcacccagacctacatctgcaatgtgaaccacaagcctagcaacaccaaggtggacaagagagtggaacccaagagctgtatccccgaggacacattcttcccaagcagcgacgtgccctgcgacgtgaagctggtggaaaagagcttcgagacagacaccaacctgaacttccagaacctgagcgtgatcggcttcagaatcctgctgctgaaagtggccggctttaacctgctgatgaccctgcggctgtggtccagc

SEQ ID NO: 5003 - DNA, 2304 bp, Artificial Sequence
  Synthetic Polynucloetide
atggccttaccagtgaccgccttgctcctgccgctggccttgctgctccacgccgccaggccgcaggtccagctcgtcgagtccggcggcggcctcgtccaggccggcgactccgtcaccctctcctgcaccgcctccggccgcaccttctcctcctacgccctcgcctggttccgccagcgccccggcaaggagcgcgagttcgtcgccggcctccgctggggcggccccaccaactacgccgactccgtcaaggaccgcttcaccatctccggcgactccgccaagcacaccatgtacctccagatgaactccctcaagcccgaggacaccgccgtctactactgcggctacaaccccggcggctgggccgtcccctcccagtacgagtacgactcctggggccagggcacccaggtcaccgtctcctccggtaccggcggaggcggatctggcggcggaggtagcggtggcggaggatctgaattcgacatccagatgacacagagccctagcagcctgtctgccagcgtgggagacagagtgaccatcacatgcaaggccagcgaccacatcaacaactggctggcctggtatcagcagaagcctggacaggcccctaagctgctgatctacggcgctaccacactggaaacaggcgtgcccagcagattttctggcagcggctctggcaccgactacaccctgacaatatccagcctccagcctgaggacttcgccacctactactgtcagcagagctggaacaccccttggacattcggccagggcaccaagctggaaatcaagagactcgagggacagcctaaggccaatcctaccgtgacactgttccctccaagcagcgaagaactccaggccaacaaggccacacttgtgtgcctgatctccgacttctaccctggggctgtgacagtggcttggaaggccgatggatctcctgtgaaagccggcgtggaaaccaccaagccatccaagcagagcaacaacaaatacgccgccagctcctacctgagcctgacacctgagcagtggaagtcccacagatcctacagctgccaagtgacccacgaaggcagcaccgtggaaaagacagtggcccctacagagtgcagcggcagagccgattgcggctttaccagcgagagctaccagcagggcgtgctgagcgccaccatcctgtacgagatcctgctgggcaaggccaccctgtacgccgtgctggtgtctgccctggtgctgatggctatggtcaagcggaaggacagccggggaagggccaagcgatctggatctggagcaacaaacttctcactactcaaacaagcaggtgacgtggaggagaatcccgggcctactagtatggactggatttggcgcatccttttccttgtcggcgctgctaccggcgcgcattccttcgaacaagttcagcttcaacagcctggcgctgagctggtcaaacctggcgcttctgtgaagatgagctgcaaagccagcggctacgccttcagcagctactggatcaactggatgaagcagaaacccggccagggactcgaatggatcggccaaatctatcccggcgacggcgacaccaactacaacggcaagttcaagggcagagccacactgaccgccgatacctctagcagcacagcctacatgcagctgagcagcctgaccagcgaagatagcgccgtgtacttctgtgcccggtccatcacaacagtcgtgggctgcgctatggactattggggccagggaacaagcgtgaccgtgtctagtacgcgtgcctctacaaagggaccctccgtgtttcctctggctcccagcagcaagtctacaagcggaggaacagccgctctgggctgcctggtcaaggattactttcccgagcctgtgaccgtgtcctggaatagcggagcactgacaagcggcgtgcacacctttccagccgtgctgcaaagcagcggcctgtactctctgagcagcgtggtcacagtgcctagctctagcctgggcacccagacctacatctgcaatgtgaaccacaagcctagcaacaccaaggtggacaagagagtggaacccaagagctgtatccccgaggacacattcttcccaagccccgagagcagctgcgacgtgaagctggtggaaaagagcttcgagacagacaccaacctgaacttccagaacctgagcgtgatcggcttcagaatcctgctgctgaaagtggccggctttaacctgctgatgaccctgcggctgtggtccagc

SEQ ID NO: 5004 - DNA, 1782 bp, Artificial Sequence
  Synthetic Polynucloetide
atggccttaccagtgaccgccttgctcctgccgctggccttgctgctccacgccgccaggccgcaggtccagctcgtcgagtccggcggcggcctcgtccaggccggcgactccgtcaccctctcctgcaccgcctccggccgcaccttctcctcctacgccctcgcctggttccgccagcgccccggcaaggagcgcgagttcgtcgccggcctccgctggggcggccccaccaactacgccgactccgtcaaggaccgcttcaccatctccggcgactccgccaagcacaccatgtacctccagatgaactccctcaagcccgaggacaccgccgtctactactgcggctacaaccccggcggctgggccgtcccctcccagtacgagtacgactcctggggccagggcacccaggtcaccgtctcctccggtaccggcggaggcggatctggcggcggaggtagcggtggcggaggatctgaattcgacatccagatgacacagagccctagcagcctgtctgccagcgtgggagacagagtgaccatcacatgcaaggccagcgaccacatcaacaactggctggcctggtatcagcagaagcctggacaggcccctaagctgctgatctacggcgctaccacactggaaacaggcgtgcccagcagattttctggcagcggctctggcaccgactacaccctgacaatatccagcctccagcctgaggacttcgccacctactactgtcagcagagctggaacaccccttggacattcggccagggcaccaagctggaaatcaagagaggcggaggcggaagtggaggcggaggatctggcggcggaggctctcaagttcagcttcaacagcctggcgctgagctggtcaaacctggcgcttctgtgaagatgagctgcaaagccagcggctacgccttcagcagctactggatcaactggatgaagcagaaacccggccagggactcgaatggatcggccaaatctatcccggcgacggcgacaccaactacaacggcaagttcaagggcagagccacactgaccgccgatacctctagcagcacagcctacatgcagctgagcagcctgaccagcgaagatagcgccgtgtacttctgtgcccggtccatcacaacagtcgtgggctgcgctatggactattggggccagggaacaagcgtgaccgtgtctagtacgcgtgacggtaacgaggagatgggaggaatcactcaaaccccttacaaagtctcaatttcaggaacaactgttatccttacatgtccccagtatcctggcagcgagatcctttggcagcataacgacaagaatatagggggagatgaagacgataagaatatcggatctgacgaggatcacttgagcctgaaagagttctccgagcttgaacaaagcggatattatgtgtgctatccgcgcgggtcaaagccggaagacgctaacttttacctttatctccgagccagagtgtgcgaaaattgcatggaaatggacgttatgtccgttgctacaatagttatcgtagatatatgcatcacgggtggactgcttctgctggtttattattggtccaagaatagaaaggccaaagctaaacccgtgaccagaggcgctggcgcaggcggaaggcaaaggggacaaaacaaagaacggccaccaccagtgccaaatccagattatgagcctattcggaaaggacagagggacctgtactctggcctgaatcagagaagaatc

SEQ ID NO: 5005 - DNA, 1677 bp, Artificial Sequence
  Synthetic Polynucloetide
atggccttaccagtgaccgccttgctcctgccgctggccttgctgctccacgccgccaggccgcaggtccagctcgtcgagtccggcggcggcctcgtccaggccggcgactccgtcaccctctcctgcaccgcctccggccgcaccttctcctcctacgccctcgcctggttccgccagcgccccggcaaggagcgcgagttcgtcgccggcctccgctggggcggccccaccaactacgccgactccgtcaaggaccgcttcaccatctccggcgactccgccaagcacaccatgtacctccagatgaactccctcaagcccgaggacaccgccgtctactactgcggctacaaccccggcggctgggccgtcccctcccagtacgagtacgactcctggggccagggcacccaggtcaccgtctcctccggtaccggcggaggcggatctggcggcggaggtagcggtggcggaggatctgaattcgacatccagatgacacagagccctagcagcctgtctgccagcgtgggagacagagtgaccatcacatgcaaggccagcgaccacatcaacaactggctggcctggtatcagcagaagcctggacaggcccctaagctgctgatctacggcgctaccacactggaaacaggcgtgcccagcagattttctggcagcggctctggcaccgactacaccctgacaatatccagcctccagcctgaggacttcgccacctactactgtcagcagagctggaacaccccttggacattcggccagggcaccaagctggaaatcaagagaggcggaggcggaagtggaggcggaggatctggcggcggaggctctcaagttcagcttcaacagcctggcgctgagctggtcaaacctggcgcttctgtgaagatgagctgcaaagccagcggctacgccttcagcagctactggatcaactggatgaagcagaaacccggccagggactcgaatggatcggccaaatctatcccggcgacggcgacaccaactacaacggcaagttcaagggcagagccacactgaccgccgatacctctagcagcacagcctacatgcagctgagcagcctgaccagcgaagatagcgccgtgtacttctgtgcccggtccatcacaacagtcgtgggctgcgctatggactattggggccagggaacaagcgtgaccgtgtctagtacgcgtttcaagatccccatcgaggaactggaagatcgggtgttcgtgaactgcaacacctctatcacctgggtggaaggcaccgtgggaacactgctgagcgacatcaccagactggacctcggcaagcggattctggaccctcggggcatctacagatgcaacggcaccgacatctacaaggacaaagaaagcaccgtgcaggtccactacagaatgtgccagtcctgcgtggaactggaccctgctacagtggccggcatcatcgtgaccgatgtgatcgctactctgctgctggctctgggagtgttctgcttcgccggacacgaaacaggcagactgtctggcgctgccgatacacaggccctgctgagaaacgaccaagtgtatcagcccctgcgcgacagagatgatgcccagtattctcacctcggcggcaactgggctagaaacaag

SEQ ID NO: 5006 - DNA, 1707 bp, Artificial Sequence
  Synthetic Polynucloetide
atggccttaccagtgaccgccttgctcctgccgctggccttgctgctccacgccgccaggccgcaggtccagctcgtcgagtccggcggcggcctcgtccaggccggcgactccgtcaccctctcctgcaccgcctccggccgcaccttctcctcctacgccctcgcctggttccgccagcgccccggcaaggagcgcgagttcgtcgccggcctccgctggggcggccccaccaactacgccgactccgtcaaggaccgcttcaccatctccggcgactccgccaagcacaccatgtacctccagatgaactccctcaagcccgaggacaccgccgtctactactgcggctacaaccccggcggctgggccgtcccctcccagtacgagtacgactcctggggccagggcacccaggtcaccgtctcctccggtaccggcggaggcggatctggcggcggaggtagcggtggcggaggatctgaattcgacatccagatgacacagagccctagcagcctgtctgccagcgtgggagacagagtgaccatcacatgcaaggccagcgaccacatcaacaactggctggcctggtatcagcagaagcctggacaggcccctaagctgctgatctacggcgctaccacactggaaacaggcgtgcccagcagattttctggcagcggctctggcaccgactacaccctgacaatatccagcctccagcctgaggacttcgccacctactactgtcagcagagctggaacaccccttggacattcggccagggcaccaagctggaaatcaagagaggcggaggcggaagtggaggcggaggatctggcggcggaggctctcaagttcagcttcaacagcctggcgctgagctggtcaaacctggcgcttctgtgaagatgagctgcaaagccagcggctacgccttcagcagctactggatcaactggatgaagcagaaacccggccagggactcgaatggatcggccaaatctatcccggcgacggcgacaccaactacaacggcaagttcaagggcagagccacactgaccgccgatacctctagcagcacagcctacatgcagctgagcagcctgaccagcgaagatagcgccgtgtacttctgtgcccggtccatcacaacagtcgtgggctgcgctatggactattggggccagggaacaagcgtgaccgtgtctagtacgcgtcagagcatcaagggcaaccacctggtcaaggtgtacgactaccaagaggacggcagcgtgctgctgacatgtgatgccgaggccaagaacatcacctggtttaaggacggcaagatgatcggcttcctgaccgaggacaagaagaagtggaacctgggcagcaacgctaaggaccccagaggcatgtatcagtgcaagggcagccagaacaagagcaagcccctccaggtgtactaccggatgtgccagaactgcatcgagctgaacgccgctaccatcagcggctttctgttcgccgagatcgtgtccatcttcgtgctggccgtgggcgtgtactttatcgctggacaggatggcgtgcggcagagcagagcttccgataagcaaaccctgctgcctaacgaccagctgtaccagcctctgaaggacagagaggacgaccagtacagccacctccagggcaatcagctgagaagaaac

SEQ ID NO: 5007 - DNA, 1656 bp, Artificial Sequence
  Synthetic Polynucloetide
atggccttaccagtgaccgccttgctcctgccgctggccttgctgctccacgccgccaggccgcaggtccagctcgtcgagtccggcggcggcctcgtccaggccggcgactccgtcaccctctcctgcaccgcctccggccgcaccttctcctcctacgccctcgcctggttccgccagcgccccggcaaggagcgcgagttcgtcgccggcctccgctggggcggccccaccaactacgccgactccgtcaaggaccgcttcaccatctccggcgactccgccaagcacaccatgtacctccagatgaactccctcaagcccgaggacaccgccgtctactactgcggctacaaccccggcggctgggccgtcccctcccagtacgagtacgactcctggggccagggcacccaggtcaccgtctcctccggtaccggcggaggcggatctggcggcggaggtagcggtggcggaggatctgaattcgacatccagatgacacagagccctagcagcctgtctgccagcgtgggagacagagtgaccatcacatgcaaggccagcgaccacatcaacaactggctggcctggtatcagcagaagcctggacaggcccctaagctgctgatctacggcgctaccacactggaaacaggcgtgcccagcagattttctggcagcggctctggcaccgactacaccctgacaatatccagcctccagcctgaggacttcgccacctactactgtcagcagagctggaacaccccttggacattcggccagggcaccaagctggaaatcaagagaggcggaggcggaagtggaggcggaggatctggcggcggaggctctcaagttcagcttcaacagcctggcgctgagctggtcaaacctggcgcttctgtgaagatgagctgcaaagccagcggctacgccttcagcagctactggatcaactggatgaagcagaaacccggccagggactcgaatggatcggccaaatctatcccggcgacggcgacaccaactacaacggcaagttcaagggcagagccacactgaccgccgatacctctagcagcacagcctacatgcagctgagcagcctgaccagcgaagatagcgccgtgtacttctgtgcccggtccatcacaacagtcgtgggctgcgctatggactattggggccagggaacaagcgtgaccgtgtctagtacgcgtcagagttttgggttgttggaccctaaattgtgctatctgttggacggaatcctgttcatttacggagtgatcctgaccgcattgttcctgcgggttaagttttccagatccgcagacgcacccgcttaccaacaagggcagaaccaactctacaatgaacttaatttggggcggagggaagagtacgacgttctggacaaaaggaggggacgagatcccgagatgggcggaaagcctcagcgaaggaagaatccgcaagaggggctttataacgaactccagaaagataaaatggcagaagcctatagtgagattgggatgaagggagaaaggaggaggggtaaaggtcacgatgggttgtaccaaggattgagcacagccactaaagatacctatgatgcgctccacatgcaggccctgccgccaaga

SEQ ID NO: 5008 - DNA, 2358 bp, Artificial Sequence
  Synthetic Polynucloetide
atggccttaccagtgaccgccttgctcctgccgctggccttgctgctccacgccgccaggccgcaggtccagctcgtcgagtccggcggcggcctcgtccaggccggcgactccgtcaccctctcctgcaccgcctccggccgcaccttctcctcctacgccctcgcctggttccgccagcgccccggcaaggagcgcgagttcgtcgccggcctccgctggggcggccccaccaactacgccgactccgtcaaggaccgcttcaccatctccggcgactccgccaagcacaccatgtacctccagatgaactccctcaagcccgaggacaccgccgtctactactgcggctacaaccccggcggctgggccgtcccctcccagtacgagtacgactcctggggccagggcacccaggtcaccgtctcctccggtaccggcggaggcggatctggcggcggaggtagcggtggcggaggatctgaattcgacatccagatgacacagagccctagcagcctgtctgccagcgtgggagacagagtgaccatcacatgcaaggccagcgaccacatcaacaactggctggcctggtatcagcagaagcctggacaggcccctaagctgctgatctacggcgctaccacactggaaacaggcgtgcccagcagattttctggcagcggctctggcaccgactacaccctgacaatatccagcctccagcctgaggacttcgccacctactactgtcagcagagctggaacaccccttggacattcggccagggcaccaagctggaaatcaagagaggcggaggcggaagtggaggcggaggatctggcggcggaggctctcaagttcagcttcaacagcctggcgctgagctggtcaaacctggcgcttctgtgaagatgagctgcaaagccagcggctacgccttcagcagctactggatcaactggatgaagcagaaacccggccagggactcgaatggatcggccaaatctatcccggcgacggcgacaccaactacaacggcaagttcaagggcagagccacactgaccgccgatacctctagcagcacagcctacatgcagctgagcagcctgaccagcgaagatagcgccgtgtacttctgtgcccggtccatcacaacagtcgtgggctgcgctatggactattggggccagggaacaagcgtgaccgtgtctagtacgcgtgggagcggcatccagaaccctgatcctgccgtgtaccagctgcgggatagcaagagcagcgacaagagcgtgtgtctgttcaccgacttcgacagccagaccaacgtgtcccagagcaaggactccgacgtgtacatcaccgataagaccgtgctggacatgcggagcatggacttcaagagcaactccgccgtggcctggtccaacaagtccgatttcgcctgcgccaacgccttcaacaacagcattatccccgaggacacattcttcccaagccccgagagcagctgcgacgtgaagctggtggaaaagagcttcgagacagacaccaacctgaacttccagaacctgagcgtgatcggcttcagaatcctgctgctgaaagtggccggctttaacctgctgatgaccctgcggctgtggtccagccgcgccaagagaagcggatctggcgtgaagcagaccctgaatttcgacctgctgaagctggctggcgacgtggaatccaacccaggcccttctagaggccatatgaccgagtacaagcccacggtgcgcctcgccacccgcgacgacgtccccagggccgtacgcaccctcgccgccgcgttcgccgactaccccgccacgcgccacaccgtcgatccggaccgccacatcgagcgggtcaccgagctgcaagaactcttcctcacgcgcgtcgggctcgacatcggcaaggtgtgggtcgcggacgacggcgccgcggtggcggtctggaccacgccggagagcgtcgaagcgggggcggtgttcgccgagatcggcccgcgcatggccgagttgagcggttcccggctggccgcgcagcaacagatggaaggcctcctggcgccgcaccggcccaaggagcccgcgtggttcctggccaccgtcggcgtctcgcccgaccaccagggcaagggtctgggcagcgccgtcgtgctccccggagtggaggcggccgagcgcgccggggtgcccgccttcctggagacctccgcgccccgcaacctccccttctacgagcggctcggcttcaccgtcaccgccgacgtcgaggtgcccgaaggaccgcgcacctggtgcatgacccgcaagcccggtgcctga

SEQ ID NO: 5009 - DNA, 2454 bp, Artificial Sequence
  Synthetic Polynucloetide
atggccttaccagtgaccgccttgctcctgccgctggccttgctgctccacgccgccaggccgcaggtccagctcgtcgagtccggcggcggcctcgtccaggccggcgactccgtcaccctctcctgcaccgcctccggccgcaccttctcctcctacgccctcgcctggttccgccagcgccccggcaaggagcgcgagttcgtcgccggcctccgctggggcggccccaccaactacgccgactccgtcaaggaccgcttcaccatctccggcgactccgccaagcacaccatgtacctccagatgaactccctcaagcccgaggacaccgccgtctactactgcggctacaaccccggcggctgggccgtcccctcccagtacgagtacgactcctggggccagggcacccaggtcaccgtctcctccggtaccggcggaggcggatctggcggcggaggtagcggtggcggaggatctgaattcgacatccagatgacacagagccctagcagcctgtctgccagcgtgggagacagagtgaccatcacatgcaaggccagcgaccacatcaacaactggctggcctggtatcagcagaagcctggacaggcccctaagctgctgatctacggcgctaccacactggaaacaggcgtgcccagcagattttctggcagcggctctggcaccgactacaccctgacaatatccagcctccagcctgaggacttcgccacctactactgtcagcagagctggaacaccccttggacattcggccagggcaccaagctggaaatcaagagaggcggaggcggaagtggaggcggaggatctggcggcggaggctctcaagttcagcttcaacagcctggcgctgagctggtcaaacctggcgcttctgtgaagatgagctgcaaagccagcggctacgccttcagcagctactggatcaactggatgaagcagaaacccggccagggactcgaatggatcggccaaatctatcccggcgacggcgacaccaactacaacggcaagttcaagggcagagccacactgaccgccgatacctctagcagcacagcctacatgcagctgagcagcctgaccagcgaagatagcgccgtgtacttctgtgcccggtccatcacaacagtcgtgggctgcgctatggactattggggccagggaacaagcgtgaccgtgtctagtctcgaggacctgaagaacgtgttcccacctgaggtggccgtgttcgagcctagcgaggccgagatcagccacacccagaaagccaccctcgtgtgcctggctaccggcttctaccccgaccatgtggaactgtcttggtgggtcaacggcaaagaggtgcacagcggcgtgtctaccgacccccagccactgaaagaacagcccgccctgaacgacagccggtactgcctgagcagcagactgagagtgtccgccaccttctggcagaacccccggaaccacttcagatgccaggtgcagttctacggcctgagcgagaacgacgagtggacccaggacagagccaagcccgtgacccagatcgtgtctgccgaagcctggggcagagccgattgcggctttaccagcgagagctaccagcagggcgtgctgagcgccaccatcctgtacgagatcctgctgggcaaggccaccctgtacgccgtgctggtgtctgccctggtgctgatggctatggtcaagcggaaggacagccggggaagggccaagcgatctggatctggagcaacaaacttctcactactcaaacaagcaggtgacgtggaggagaatcccgggcctactagaggccatatgaccgagtacaagcccacggtgcgcctcgccacccgcgacgacgtccccagggccgtacgcaccctcgccgccgcgttcgccgactaccccgccacgcgccacaccgtcgatccggaccgccacatcgagcgggtcaccgagctgcaagaactcttcctcacgcgcgtcgggctcgacatcggcaaggtgtgggtcgcggacgacggcgccgcggtggcggtctggaccacgccggagagcgtcgaagcgggggcggtgttcgccgagatcggcccgcgcatggccgagttgagcggttcccggctggccgcgcagcaacagatggaaggcctcctggcgccgcaccggcccaaggagcccgcgtggttcctggccaccgtcggcgtctcgcccgaccaccagggcaagggtctgggcagcgccgtcgtgctccccggagtggaggcggccgagcgcgccggggtgcccgccttcctggagacctccgcgccccgcaacctccccttctacgagcggctcggcttcaccgtcaccgccgacgtcgaggtgcccgaaggaccgcgcacctggtgcatgacccgcaagcccggtgcctga

SEQ ID NO: 5010 - DNA, 2604 bp, Artificial Sequence
  Synthetic Polynucloetide
atggccttaccagtgaccgccttgctcctgccgctggccttgctgctccacgccgccaggccgcaggtccagctcgtcgagtccggcggcggcctcgtccaggccggcgactccgtcaccctctcctgcaccgcctccggccgcaccttctcctcctacgccctcgcctggttccgccagcgccccggcaaggagcgcgagttcgtcgccggcctccgctggggcggccccaccaactacgccgactccgtcaaggaccgcttcaccatctccggcgactccgccaagcacaccatgtacctccagatgaactccctcaagcccgaggacaccgccgtctactactgcggctacaaccccggcggctgggccgtcccctcccagtacgagtacgactcctggggccagggcacccaggtcaccgtctcctccggtaccggcggaggcggatctggcggcggaggtagcggtggcggaggatctgaattcgacatccagatgacacagagccctagcagcctgtctgccagcgtgggagacagagtgaccatcacatgcaaggccagcgaccacatcaacaactggctggcctggtatcagcagaagcctggacaggcccctaagctgctgatctacggcgctaccacactggaaacaggcgtgcccagcagattttctggcagcggctctggcaccgactacaccctgacaatatccagcctccagcctgaggacttcgccacctactactgtcagcagagctggaacaccccttggacattcggccagggcaccaagctggaaatcaagagaggcggaggcggaagtggaggcggaggatctggcggcggaggctctcaagttcagcttcaacagcctggcgctgagctggtcaaacctggcgcttctgtgaagatgagctgcaaagccagcggctacgccttcagcagctactggatcaactggatgaagcagaaacccggccagggactcgaatggatcggccaaatctatcccggcgacggcgacaccaactacaacggcaagttcaagggcagagccacactgaccgccgatacctctagcagcacagcctacatgcagctgagcagcctgaccagcgaagatagcgccgtgtacttctgtgcccggtccatcacaacagtcgtgggctgcgctatggactattggggccagggaacaagcgtgaccgtgtctagtacgcgtgagcagaaactgatctcggaagaggatctggggagcggcaccccattcccttctctggcccctcccatcatgctgctggtggacggcaagcagcagatggtggtcgtgtgcctggtgctggatgtggccccacctggactggacagccccatctggtttagcgccggcaatggctctgccctggacgcctttacctacggcccaagccctgccaccgatggcacctggacaaatctggcccacctgagcctgcccagcgaggaactggcttcttgggagcctctcgtgtgccacacaggacctggcgctgagggacacagcagatccacccagcctatgcacctgtctggcgaggccagcaccgccagaacctgtcctcaggaacctctgagaggcacccctggcggagcactgtggctgggagtgctgagactgctgctgttcaagctgctgctgtttgacctgctgctgacctgctcctgtctgtgcgatcctgccggccctctgccttctcctgccaccaccacaagactgagagccctgggcagccacagactgcaccctgccacagagacaggcggcagagaggccacaagcagccctagaccccagcccagagacagaagatggggcgataccccccctggcagaaagcctggatctccagtccgcgccaagagaagcggatctggcgtgaagcagaccctgaatttcgacctgctgaagctggctggcgacgtggaatccaacccaggcccttctagatctagaggccatatgaccgagtacaagcccacggtgcgcctcgccacccgcgacgacgtccccagggccgtacgcaccctcgccgccgcgttcgccgactaccccgccacgcgccacaccgtcgatccggaccgccacatcgagcgggtcaccgagctgcaagaactcttcctcacgcgcgtcgggctcgacatcggcaaggtgtgggtcgcggacgacggcgccgcggtggcggtctggaccacgccggagagcgtcgaagcgggggcggtgttcgccgagatcggcccgcgcatggccgagttgagcggttcccggctggccgcgcagcaacagatggaaggcctcctggcgccgcaccggcccaaggagcccgcgtggttcctggccaccgtcggcgtctcgcccgaccaccagggcaagggtctgggcagcgccgtcgtgctccccggagtggaggcggccgagcgcgccggggtgcccgccttcctggagacctccgcgccccgcaacctccccttctacgagcggctcggcttcaccgtcaccgccgacgtcgaggtgcccgaaggaccgcgcacctggtgcatgacccgcaagcccggtgcctga

SEQ ID NO: 5011 - DNA, 2046 bp, Artificial Sequence
  Synthetic Polynucloetide
atggccttaccagtgaccgccttgctcctgccgctggccttgctgctccacgccgccaggccgcaggtccagctcgtcgagtccggcggcggcctcgtccaggccggcgactccgtcaccctctcctgcaccgcctccggccgcaccttctcctcctacgccctcgcctggttccgccagcgccccggcaaggagcgcgagttcgtcgccggcctccgctggggcggccccaccaactacgccgactccgtcaaggaccgcttcaccatctccggcgactccgccaagcacaccatgtacctccagatgaactccctcaagcccgaggacaccgccgtctactactgcggctacaaccccggcggctgggccgtcccctcccagtacgagtacgactcctggggccagggcacccaggtcaccgtctcctccggtaccggcggaggcggatctggcggcggaggtagcggtggcggaggatctgaattcgacatccagatgacacagagccctagcagcctgtctgccagcgtgggagacagagtgaccatcacatgcaaggccagcgaccacatcaacaactggctggcctggtatcagcagaagcctggacaggcccctaagctgctgatctacggcgctaccacactggaaacaggcgtgcccagcagattttctggcagcggctctggcaccgactacaccctgacaatatccagcctccagcctgaggacttcgccacctactactgtcagcagagctggaacaccccttggacattcggccagggcaccaagctggaaatcaagagactcgaggacctgaagaacgtgttcccacctgaggtggccgtgttcgagcctagcgaggccgagatcagccacacccagaaagccaccctcgtgtgcctggctaccggcttctaccccgaccatgtggaactgtcttggtgggtcaacggcaaagaggtgcacagcggcgtgtctaccgacccccagccactgaaagaacagcccgccctgaacgacagccggtactgcctgagcagcagactgagagtgtccgccaccttctggcagaacccccggaaccacttcagatgccaggtgcagttctacggcctgagcgagaacgacgagtggacccaggacagagccaagcccgtgacccagatcgtgtctgccgaagcctggggcagagccgattgcggctttaccagcgagagctaccagcagggcgtgctgagcgccaccatcctgtacgagatcctgctgggcaaggccaccctgtacgccgtgctggtgtctgccctggtgctgatggctatggtcaagcggaaggacagccggggaagggccaagcgatctggatctggagcaacaaacttctcactactcaaacaagcaggtgacgtggaggagaatcccgggcctactagaggccatatgaccgagtacaagcccacggtgcgcctcgccacccgcgacgacgtccccagggccgtacgcaccctcgccgccgcgttcgccgactaccccgccacgcgccacaccgtcgatccggaccgccacatcgagcgggtcaccgagctgcaagaactcttcctcacgcgcgtcgggctcgacatcggcaaggtgtgggtcgcggacgacggcgccgcggtggcggtctggaccacgccggagagcgtcgaagcgggggcggtgttcgccgagatcggcccgcgcatggccgagttgagcggttcccggctggccgcgcagcaacagatggaaggcctcctggcgccgcaccggcccaaggagcccgcgtggttcctggccaccgtcggcgtctcgcccgaccaccagggcaagggtctgggcagcgccgtcgtgctccccggagtggaggcggccgagcgcgccggggtgcccgccttcctggagacctccgcgccccgcaacctccccttctacgagcggctcggcttcaccgtcaccgccgacgtcgaggtgcccgaaggaccgcgcacctggtgcatgacccgcaagcccggtgcctga

SEQ ID NO: 5012 - DNA, 1353 bp, Artificial Sequence
  Synthetic Polynucloetide
atggccttaccagtgaccgccttgctcctgccgctggccttgctgctccacgccgccaggccgcaggtccagctcgtcgagtccggcggcggcctcgtccaggccggcgactccgtcaccctctcctgcaccgcctccggccgcaccttctcctcctacgccctcgcctggttccgccagcgccccggcaaggagcgcgagttcgtcgccggcctccgctggggcggccccaccaactacgccgactccgtcaaggaccgcttcaccatctccggcgactccgccaagcacaccatgtacctccagatgaactccctcaagcccgaggacaccgccgtctactactgcggctacaaccccggcggctgggccgtcccctcccagtacgagtacgactcctggggccagggcacccaggtcaccgtctcctccggtaccggcggaggcggatctggcggcggaggtagcggtggcggaggatctgaattcgacatccagatgacacagagccctagcagcctgtctgccagcgtgggagacagagtgaccatcacatgcaaggccagcgaccacatcaacaactggctggcctggtatcagcagaagcctggacaggcccctaagctgctgatctacggcgctaccacactggaaacaggcgtgcccagcagattttctggcagcggctctggcaccgactacaccctgacaatatccagcctccagcctgaggacttcgccacctactactgtcagcagagctggaacaccccttggacattcggccagggcaccaagctggaaatcaagagactcgaggacctgaagaacgtgttcccacctgaggtggccgtgttcgagcctagcgaggccgagatcagccacacccagaaagccaccctcgtgtgcctggctaccggcttctaccccgaccatgtggaactgtcttggtgggtcaacggcaaagaggtgcacagcggcgtgtctaccgacccccagccactgaaagaacagcccgccctgaacgacagccggtactgcctgagcagcagactgagagtgtccgccaccttctggcagaacccccggaaccacttcagatgccaggtgcagttctacggcctgagcgagaacgacgagtggacccaggacagagccaagcccgtgacccagatcgtgtctgccgaagcctggggcagagccgattgcggctttaccagcgagagctaccagcagggcgtgctgagcgccaccatcctgtacgagatcctgctgggcaaggccaccctgtacgccgtgctggtgtctgccctggtgctgatggctatggtcaagcggaaggacagccgggga

SEQ ID NO: 5013 - DNA, 2100 bp, Artificial Sequence
  Synthetic Polynucloetide
atggccttaccagtgaccgccttgctcctgccgctggccttgctgctccacgccgccaggccgcaggtccagctcgtcgagtccggcggcggcctcgtccaggccggcgactccgtcaccctctcctgcaccgcctccggccgcaccttctcctcctacgccctcgcctggttccgccagcgccccggcaaggagcgcgagttcgtcgccggcctccgctggggcggccccaccaactacgccgactccgtcaaggaccgcttcaccatctccggcgactccgccaagcacaccatgtacctccagatgaactccctcaagcccgaggacaccgccgtctactactgcggctacaaccccggcggctgggccgtcccctcccagtacgagtacgactcctggggccagggcacccaggtcaccgtctcctccggtaccggcggaggcggatctggcggcggaggtagcggtggcggaggatctgaattcgacatccagatgacacagagccctagcagcctgtctgccagcgtgggagacagagtgaccatcacatgcaaggccagcgaccacatcaacaactggctggcctggtatcagcagaagcctggacaggcccctaagctgctgatctacggcgctaccacactggaaacaggcgtgcccagcagattttctggcagcggctctggcaccgactacaccctgacaatatccagcctccagcctgaggacttcgccacctactactgtcagcagagctggaacaccccttggacattcggccagggcaccaagctggaaatcaagagactcgaggggaaaccaattcccaaccctcttctgggactggattcaaccggcagcggcgaggacctgaagaacgtgttcccacctgaggtggccgtgttcgagcctagcgaggccgagatcagccacacccagaaagccaccctcgtgtgcctggctaccggcttctaccccgaccatgtggaactgtcttggtgggtcaacggcaaagaggtgcacagcggcgtgtgtaccgacccccagccactgaaagaacagcccgccctgaacgacagccggtactgcctgagcagcagactgagagtgtccgccaccttctggcagaacccccggaaccacttcagatgccaggtgcagttctacggcctgagcgagaacgacgagtggacccaggacagagccaagcccgtgacccagatcgtgtctgccgaagcctggggcagagccgattgcggctttaccagcgagagctaccagcagggcgtgctgagcgccaccatcctgtacgagatcctgctgggcaaggccaccctgtacgccgtgctggtgtctgccctggtgctgatggctatggtcaagcggaaggacagccggggaagggccaagcgatctggatctggagcaacaaacttctcactactcaaacaagcaggtgacgtggaggagaatcccgggcctactagaggccatatgaccgagtacaagcccacggtgcgcctcgccacccgcgacgacgtccccagggccgtacgcaccctcgccgccgcgttcgccgactaccccgccacgcgccacaccgtcgatccggaccgccacatcgagcgggtcaccgagctgcaagaactcttcctcacgcgcgtcgggctcgacatcggcaaggtgtgggtcgcggacgacggcgccgcggtggcggtctggaccacgccggagagcgtcgaagcgggggcggtgttcgccgagatcggcccgcgcatggccgagttgagcggttcccggctggccgcgcagcaacagatggaaggcctcctggcgccgcaccggcccaaggagcccgcgtggttcctggccaccgtcggcgtctcgcccgaccaccagggcaagggtctgggcagcgccgtcgtgctccccggagtggaggcggccgagcgcgccggggtgcccgccttcctggagacctccgcgccccgcaacctccccttctacgagcggctcggcttcaccgtcaccgccgacgtcgaggtgcccgaaggaccgcgcacctggtgcatgacccgcaagcccggtgcctga

SEQ ID NO: 5014 - DNA, 1410 bp, Artificial Sequence
  Synthetic Polynucloetide
atggccttaccagtgaccgccttgctcctgccgctggccttgctgctccacgccgccaggccgcaggtccagctcgtcgagtccggcggcggcctcgtccaggccggcgactccgtcaccctctcctgcaccgcctccggccgcaccttctcctcctacgccctcgcctggttccgccagcgccccggcaaggagcgcgagttcgtcgccggcctccgctggggcggccccaccaactacgccgactccgtcaaggaccgcttcaccatctccggcgactccgccaagcacaccatgtacctccagatgaactccctcaagcccgaggacaccgccgtctactactgcggctacaaccccggcggctgggccgtcccctcccagtacgagtacgactcctggggccagggcacccaggtcaccgtctcctccggtaccggcggaggcggatctggcggcggaggtagcggtggcggaggatctgaattcgacatccagatgacacagagccctagcagcctgtctgccagcgtgggagacagagtgaccatcacatgcaaggccagcgaccacatcaacaactggctggcctggtatcagcagaagcctggacaggcccctaagctgctgatctacggcgctaccacactggaaacaggcgtgcccagcagattttctggcagcggctctggcaccgactacaccctgacaatatccagcctccagcctgaggacttcgccacctactactgtcagcagagctggaacaccccttggacattcggccagggcaccaagctggaaatcaagagactcgaggggaaaccaattcccaaccctcttctgggactggattcaaccggcagcggcgaggacctgaagaacgtgttcccacctgaggtggccgtgttcgagcctagcgaggccgagatcagccacacccagaaagccaccctcgtgtgcctggctaccggcttctaccccgaccatgtggaactgtcttggtgggtcaacggcaaagaggtgcacagcggcgtgtgtaccgacccccagccactgaaagaacagcccgccctgaacgacagccggtactgcctgagcagcagactgagagtgtccgccaccttctggcagaacccccggaaccacttcagatgccaggtgcagttctacggcctgagcgagaacgacgagtggacccaggacagagccaagcccgtgacccagatcgtgtctgccgaagcctggggcagagccgattgcggctttaccagcgagagctaccagcagggcgtgctgagcgccaccatcctgtacgagatcctgctgggcaaggccaccctgtacgccgtgctggtgtctgccctggtgctgatggctatggtcaagcggaaggacagccggggatga

SEQ ID NO: 5015 - DNA, 2358 bp, Artificial Sequence
  Synthetic Polynucloetide
atggccttaccagtgaccgccttgctcctgccgctggccttgctgctccacgccgccaggccgcaggtccagctcgtcgagtccggcggcggcctcgtccaggccggcgactccgtcaccctctcctgcaccgcctccggccgcaccttctcctcctacgccctcgcctggttccgccagcgccccggcaaggagcgcgagttcgtcgccggcctccgctggggcggccccaccaactacgccgactccgtcaaggaccgcttcaccatctccggcgactccgccaagcacaccatgtacctccagatgaactccctcaagcccgaggacaccgccgtctactactgcggctacaaccccggcggctgggccgtcccctcccagtacgagtacgactcctggggccagggcacccaggtcaccgtctcctccggtaccggcggaggcggatctggcggcggaggtagcggtggcggaggatctgaattcgacatccagatgacacagagccctagcagcctgtctgccagcgtgggagacagagtgaccatcacatgcaaggccagcgaccacatcaacaactggctggcctggtatcagcagaagcctggacaggcccctaagctgctgatctacggcgctaccacactggaaacaggcgtgcccagcagattttctggcagcggctctggcaccgactacaccctgacaatatccagcctccagcctgaggacttcgccacctactactgtcagcagagctggaacaccccttggacattcggccagggcaccaagctggaaatcaagagaggcggaggcggaagtggaggcggaggatctggcggcggaggctctcaagttcagcttcaacagcctggcgctgagctggtcaaacctggcgcttctgtgaagatgagctgcaaagccagcggctacgccttcagcagctactggatcaactggatgaagcagaaacccggccagggactcgaatggatcggccaaatctatcccggcgacggcgacaccaactacaacggcaagttcaagggcagagccacactgaccgccgatacctctagcagcacagcctacatgcagctgagcagcctgaccagcgaagatagcgccgtgtacttctgtgcccggtccatcacaacagtcgtgggctgcgctatggactattggggccagggaacaagcgtgaccgtgtctagtacgcgtgggagcggcatccagaaccctgatcctgccgtgtaccagctgcgggatagcaagagcagcgacaagagcgtgtgtctgttcaccgacttcgacagccagaccaacgtgtcccagagcaaggactccgacgtgtacatcaccgataagaccgtgctggacatgcggagcatggacttcaagagcaactccgccgtggcctggtccaacaagtccgatttcgcctgcgccaacgccttcaacaacagcattatccccgaggacacattcttcccaagcagcgacgtgccctgcgacgtgaagctggtggaaaagagcttcgagacagacaccaacctgaacttccagaacctgagcgtgatcggcttcagaatcctgctgctgaaagtggccggctttaacctgctgatgaccctgcggctgtggtccagccgcgccaagagaagcggatctggcgtgaagcagaccctgaatttcgacctgctgaagctggctggcgacgtggaatccaacccaggcccttctagaggccatatgaccgagtacaagcccacggtgcgcctcgccacccgcgacgacgtccccagggccgtacgcaccctcgccgccgcgttcgccgactaccccgccacgcgccacaccgtcgatccggaccgccacatcgagcgggtcaccgagctgcaagaactcttcctcacgcgcgtcgggctcgacatcggcaaggtgtgggtcgcggacgacggcgccgcggtggcggtctggaccacgccggagagcgtcgaagcgggggcggtgttcgccgagatcggcccgcgcatggccgagttgagcggttcccggctggccgcgcagcaacagatggaaggcctcctggcgccgcaccggcccaaggagcccgcgtggttcctggccaccgtcggcgtctcgcccgaccaccagggcaagggtctgggcagcgccgtcgtgctccccggagtggaggcggccgagcgcgccggggtgcccgccttcctggagacctccgcgccccgcaacctccccttctacgagcggctcggcttcaccgtcaccgccgacgtcgaggtgcccgaaggaccgcgcacctggtgcatgacccgcaagcccggtgcctga

SEQ ID NO: 5016 - DNA, 2454 bp, Artificial Sequence
  Synthetic Polynucloetide
atggccttaccagtgaccgccttgctcctgccgctggccttgctgctccacgccgccaggccgcaggtccagctcgtcgagtccggcggcggcctcgtccaggccggcgactccgtcaccctctcctgcaccgcctccggccgcaccttctcctcctacgccctcgcctggttccgccagcgccccggcaaggagcgcgagttcgtcgccggcctccgctggggcggccccaccaactacgccgactccgtcaaggaccgcttcaccatctccggcgactccgccaagcacaccatgtacctccagatgaactccctcaagcccgaggacaccgccgtctactactgcggctacaaccccggcggctgggccgtcccctcccagtacgagtacgactcctggggccagggcacccaggtcaccgtctcctccggtaccggcggaggcggatctggcggcggaggtagcggtggcggaggatctgaattcgacatccagatgacacagagccctagcagcctgtctgccagcgtgggagacagagtgaccatcacatgcaaggccagcgaccacatcaacaactggctggcctggtatcagcagaagcctggacaggcccctaagctgctgatctacggcgctaccacactggaaacaggcgtgcccagcagattttctggcagcggctctggcaccgactacaccctgacaatatccagcctccagcctgaggacttcgccacctactactgtcagcagagctggaacaccccttggacattcggccagggcaccaagctggaaatcaagagaggcggaggcggaagtggaggcggaggatctggcggcggaggctctcaagttcagcttcaacagcctggcgctgagctggtcaaacctggcgcttctgtgaagatgagctgcaaagccagcggctacgccttcagcagctactggatcaactggatgaagcagaaacccggccagggactcgaatggatcggccaaatctatcccggcgacggcgacaccaactacaacggcaagttcaagggcagagccacactgaccgccgatacctctagcagcacagcctacatgcagctgagcagcctgaccagcgaagatagcgccgtgtacttctgtgcccggtccatcacaacagtcgtgggctgcgctatggactattggggccagggaacaagcgtgaccgtgtctagtctcgaggacctgaagaacgtgttcccacctgaggtggccgtgttcgagcctagcaaggccgagatcgcccacacccagaaagccaccctcgtgtgcctggctaccggcttctaccccgaccatgtggaactgtcttggtgggtcaacggcaaagaggtgcacagcggcgtgtctaccgacccccagccactgaaagaacagcccgccctgaacgacagccggtactgcctgagcagcagactgagagtgtccgccaccttctggcagaacccccggaaccacttcagatgccaggtgcagttctacggcctgagcgagaacgacgagtggacccaggacagagccaagcccgtgacccagatcgtgtctgccgaagcctggggcagagccgattgcggcatcaccagcgccagctaccaccagggcgtgctgagcgccaccatcctgtacgagatcctgctgggcaaggccaccctgtacgccgtgctggtgtctgccctggtgctgatggctatggtcaagcggaaggacagccggggaagggccaagcgatctggatctggagcaacaaacttctcactactcaaacaagcaggtgacgtggaggagaatcccgggcctactagaggccatatgaccgagtacaagcccacggtgcgcctcgccacccgcgacgacgtccccagggccgtacgcaccctcgccgccgcgttcgccgactaccccgccacgcgccacaccgtcgatccggaccgccacatcgagcgggtcaccgagctgcaagaactcttcctcacgcgcgtcgggctcgacatcggcaaggtgtgggtcgcggacgacggcgccgcggtggcggtctggaccacgccggagagcgtcgaagcgggggcggtgttcgccgagatcggcccgcgcatggccgagttgagcggttcccggctggccgcgcagcaacagatggaaggcctcctggcgccgcaccggcccaaggagcccgcgtggttcctggccaccgtcggcgtctcgcccgaccaccagggcaagggtctgggcagcgccgtcgtgctccccggagtggaggcggccgagcgcgccggggtgcccgccttcctggagacctccgcgccccgcaacctccccttctacgagcggctcggcttcaccgtcaccgccgacgtcgaggtgcccgaaggaccgcgcacctggtgcatgacccgcaagcccggtgcctga

SEQ ID NO: 5017 - DNA, 1923 bp, Artificial Sequence; identical to SEQ ID NO: 4087
  Synthetic Polynucloetide

SEQ ID NO: 5018 - DNA, 2982 bp, Artificial Sequence; identical to SEQ ID NO: 4088
  Synthetic Polynucloetide

SEQ ID NO: 5019 - DNA, 2979 bp, Artificial Sequence; identical to SEQ ID NO: 4089
  Synthetic Polynucloetide

SEQ ID NO: 5020 - DNA, 2979 bp, Artificial Sequence; identical to SEQ ID NO: 4090
  Synthetic Polynucloetide

SEQ ID NO: 5021 - DNA, 2277 bp, Artificial Sequence; identical to SEQ ID NO: 4091
  Synthetic Polynucloetide

SEQ ID NO: 5022 - DNA, 2952 bp, Artificial Sequence; identical to SEQ ID NO: 4092
  Synthetic Polynucloetide

SEQ ID NO: 5023 - DNA, 2289 bp, Artificial Sequence; identical to SEQ ID NO: 4093
  Synthetic Polynucloetide

SEQ ID NO: 5024 - DNA, 2955 bp, Artificial Sequence; identical to SEQ ID NO: 4094
  Synthetic Polynucloetide

SEQ ID NO: 5025 - DNA, 2979 bp, Artificial Sequence; identical to SEQ ID NO: 4095
  Synthetic Polynucloetide

SEQ ID NO: 5026 - DNA, 3225 bp, Artificial Sequence; identical to SEQ ID NO: 4096
  Synthetic Polynucloetide

SEQ ID NO: 5027 - DNA, 3090 bp, Artificial Sequence; identical to SEQ ID NO: 4097
  Synthetic Polynucloetide

SEQ ID NO: 5028 - DNA, 2301 bp, Artificial Sequence; identical to SEQ ID NO: 4098
  Synthetic Polynucloetide

SEQ ID NO: 5029 - DNA, 3510 bp, Artificial Sequence; identical to SEQ ID NO: 4099
  Synthetic Polynucloetide

SEQ ID NO: 5030 - DNA, 2865 bp, Artificial Sequence; identical to SEQ ID NO: 4100
  Synthetic Polynucloetide

SEQ ID NO: 5031 - DNA, 2865 bp, Artificial Sequence; identical to SEQ ID NO: 4101
  Synthetic Polynucloetide

SEQ ID NO: 5032 - DNA, 3078 bp, Artificial Sequence; identical to SEQ ID NO: 4102
  Synthetic Polynucloetide

SEQ ID NO: 5033 - DNA, 3201 bp, Artificial Sequence; identical to SEQ ID NO: 4103
  Synthetic Polynucloetide

SEQ ID NO: 5034 - DNA, 3084 bp, Artificial Sequence; identical to SEQ ID NO: 4104
  Synthetic Polynucloetide

SEQ ID NO: 5035 - DNA, 3210 bp, Artificial Sequence; identical to SEQ ID NO: 4105
  Synthetic Polynucloetide

SEQ ID NO: 5036 - DNA, 2883 bp, Artificial Sequence; identical to SEQ ID NO: 4106
  Synthetic Polynucloetide

SEQ ID NO: 5037 - DNA, 2355 bp, Artificial Sequence; identical to SEQ ID NO: 4107
  Synthetic Polynucloetide

SEQ ID NO: 5038 - DNA, 2289 bp, Artificial Sequence; identical to SEQ ID NO: 4108
  Synthetic Polynucloetide

SEQ ID NO: 5039 - DNA, 2289 bp, Artificial Sequence; identical to SEQ ID NO: 4109
  Synthetic Polynucloetide

SEQ ID NO: 5040 - DNA, 1779 bp, Artificial Sequence; identical to SEQ ID NO: 4110
  Synthetic Polynucloetide

SEQ ID NO: 5041 - DNA, 1674 bp, Artificial Sequence; identical to SEQ ID NO: 4111
  Synthetic Polynucloetide

SEQ ID NO: 5042 - DNA, 1704 bp, Artificial Sequence; identical to SEQ ID NO: 4112
  Synthetic Polynucloetide

SEQ ID NO: 5043 - DNA, 1653 bp, Artificial Sequence; identical to SEQ ID NO: 4113
  Synthetic Polynucloetide

SEQ ID NO: 5044 - DNA, 1764 bp, Artificial Sequence; identical to SEQ ID NO: 4114
  Synthetic Polynucloetide

SEQ ID NO: 5045 - DNA, 1263 bp, Artificial Sequence; identical to SEQ ID NO: 4115
  Synthetic Polynucloetide

SEQ ID NO: 5046 - DNA, 1800 bp, Artificial Sequence; identical to SEQ ID NO: 4116
  Synthetic Polynucloetide

SEQ ID NO: 5047 - DNA, 1302 bp, Artificial Sequence; identical to SEQ ID NO: 4117
  Synthetic Polynucloetide

SEQ ID NO: 5048 - DNA, 3408 bp, Artificial Sequence
  Synthetic Polynucloetide
atggccttaccagtgaccgccttgctcctgccgctggccttgctgctccacgccgccaggccgcaggtccagctcgtcgagtccggcggcggcctcgtccaggccggcgactccgtcaccctctcctgcaccgcctccggccgcaccttctcctcctacgccctcgcctggttccgccagcgccccggcaaggagcgcgagttcgtcgccggcctccgctggggcggccccaccaactacgccgactccgtcaaggaccgcttcaccatctccggcgactccgccaagcacaccatgtacctccagatgaactccctcaagcccgaggacaccgccgtctactactgcggctacaaccccggcggctgggccgtcccctcccagtacgagtacgactcctggggccagggcacccaggtcaccgtctcctccggtaccggcggaggcggatctggcggcggaggtagcggtggcggaggatctgaattcgacatccagatgacacagagccctagcagcctgtctgccagcgtgggagacagagtgaccatcacatgcaaggccagcgaccacatcaacaactggctggcctggtatcagcagaagcctggacaggcccctaagctgctgatctacggcgctaccacactggaaacaggcgtgcccagcagattttctggcagcggctctggcaccgactacaccctgacaatatccagcctccagcctgaggacttcgccacctactactgtcagcagagctggaacaccccttggacattcggccagggcaccaagctggaaatcaagagactcgagatccagaaccctgatcctgccgtgtaccagctgcgggatagcaagagcagcgacaagagcgtgtgtctgttcaccgacttcgacagccagaccaacgtgtcccagagcaaggactccgacgtgtacatcaccgataagtgcgtgctggacatgcggagcatggacttcaagagcaactccgccgtggcctggtccaacaagtccgatttcgcctgcgccaacgccttcaacaacagcattatccccgaggacacattcttcccaagcagcgacgtgccctgcgacgtgaagctggtggaaaagagcttcgagacagacaccaacctgaacttccagaacctgagcgtgatcggcttcagaatcctgctgctgaaagtggccggctttaacctgctgatgaccctgcggctgtggtccagccgcgccaagagaagcggatctggcgtgaagcagaccctgaatttcgacctgctgaagctggctggcgacgtggaatccaacccaggccctactagtatggactggatttggcgcatccttttccttgtcggcgctgctaccggcgcccattccgggccccaggttcagctgcaagagtctggcggaggacttgctcaagctggcggaagcctgagactgtcttgtgccgcctctggcagaaccttcagcatgggctggtttagacaggcccctggcaaagagagagagttcgtcgccgccatcacatacagcggcggcagcccttactacgcctcttctgtcagaggccggttcaccatcagccgggacaacgccaagaacaccgtgtacctccagatgaacagcctgaagccagaggacaccgccgtgtactactgtgccgccaatccaacctacggcagcgactggaatgccgagaattggggccagggcacccaagtgacagtgtctagtggatccggcggcggaggatctggcggaggcggatctgggggcggaggctctttcgaacaagttcagcttcaacagcctggcgctgagctggtcaaacctggcgcttctgtgaagatgagctgcaaagccagcggctacgccttcagcagctactggatcaactggatgaagcagaaacccggccagggactcgaatggatcggccaaatctatcccggcgacggcgacaccaactacaacggcaagttcaagggcagagccacactgaccgccgatacctctagcagcacagcctacatgcagctgagcagcctgaccagcgaagatagcgccgtgtacttctgtgcccggtccatcacaacagtcgtgggctgcgctatggactattggggccagggaacaagcgtgaccgtgtctagtacgcgtgaggacctgaagaacgtgttcccacctgaggtggccgtgttcgagcctagcaaggccgagatcgcccacacccagaaagccaccctcgtgtgcctggctaccggcttctaccccgaccatgtggaactgtcttggtgggtcaacggcaaagaggtgcacagcggcgtgtgtaccgacccccagccactgaaagaacagcccgccctgaacgacagccggtactgcctgagcagcagactgagagtgtccgccaccttctggcagaacccccggaaccacttcagatgccaggtgcagttctacggcctgagcgagaacgacgagtggacccaggacagagccaagcccgtgacccagatcgtgtctgccgaagcctggggcagagccgattgcggcatcaccagcgccagctaccaccagggcgtgctgagcgccaccatcctgtacgagatcctgctgggcaaggccaccctgtacgccgtgctggtgtctgccctggtgctgatggctatggtcaagcggaaggacagccggggaagggccaagcgatctggatctggagcaacaaacttctcactactcaaacaagcaggtgacgtggaggagaatcccgggccttctagaggccatatgaccgagtacaagcccacggtgcgcctcgccacccgcgacgacgtccccagggccgtacgcaccctcgccgccgcgttcgccgactaccccgccacgcgccacaccgtcgatccggaccgccacatcgagcgggtcaccgagctgcaagaactcttcctcacgcgcgtcgggctcgacatcggcaaggtgtgggtcgcggacgacggcgccgcggtggcggtctggaccacgccggagagcgtcgaagcgggggcggtgttcgccgagatcggcccgcgcatggccgagttgagcggttcccggctggccgcgcagcaacagatggaaggcctcctggcgccgcaccggcccaaggagcccgcgtggttcctggccaccgtcggcgtctcgcccgaccaccagggcaagggtctgggcagcgccgtcgtgctccccggagtggaggcggccgagcgcgccggggtgcccgccttcctggagacctccgcgccccgcaacctccccttctacgagcggctcggcttcaccgtcaccgccgacgtcgaggtgcccgaaggaccgcgcacctggtgcatgacccgcaagcccggtgcctga

SEQ ID NO: 5049 - DNA, 3405 bp, Artificial Sequence
  Synthetic Polynucloetide
atggccttaccagtgaccgccttgctcctgccgctggccttgctgctccacgccgccaggccgcaggtccagctcgtcgagtccggcggcggcctcgtccaggccggcgactccgtcaccctctcctgcaccgcctccggccgcaccttctcctcctacgccctcgcctggttccgccagcgccccggcaaggagcgcgagttcgtcgccggcctccgctggggcggccccaccaactacgccgactccgtcaaggaccgcttcaccatctccggcgactccgccaagcacaccatgtacctccagatgaactccctcaagcccgaggacaccgccgtctactactgcggctacaaccccggcggctgggccgtcccctcccagtacgagtacgactcctggggccagggcacccaggtcaccgtctcctccggtaccggcggaggcggatctggcggcggaggtagcggtggcggaggatctgaattcgacatccagatgacacagagccctagcagcctgtctgccagcgtgggagacagagtgaccatcacatgcaaggccagcgaccacatcaacaactggctggcctggtatcagcagaagcctggacaggcccctaagctgctgatctacggcgctaccacactggaaacaggcgtgcccagcagattttctggcagcggctctggcaccgactacaccctgacaatatccagcctccagcctgaggacttcgccacctactactgtcagcagagctggaacaccccttggacattcggccagggcaccaagctggaaatcaagagactcgaggacctgaagaacgtgttcccacctgaggtggccgtgttcgagcctagcaaggccgagatcgcccacacccagaaagccaccctcgtgtgcctggctaccggcttctaccccgaccatgtggaactgtcttggtgggtcaacggcaaagaggtgcacagcggcgtgtgtaccgacccccagccactgaaagaacagcccgccctgaacgacagccggtactgcctgagcagcagactgagagtgtccgccaccttctggcagaacccccggaaccacttcagatgccaggtgcagttctacggcctgagcgagaacgacgagtggacccaggacagagccaagcccgtgacccagatcgtgtctgccgaagcctggggcagagccgattgcggcatcaccagcgccagctaccaccagggcgtgctgagcgccaccatcctgtacgagatcctgctgggcaaggccaccctgtacgccgtgctggtgtctgccctggtgctgatggctatggtcaagcggaaggacagccggggaagggccaagcgatctggatctggagcaacaaacttctcactactcaaacaagcaggtgacgtggaggagaatcccgggcctactagtatggactggatttggcgcatccttttccttgtcggcgctgctaccggcgcccattccgggccccaggttcagctgcaagagtctggcggaggacttgctcaagctggcggaagcctgagactgtcttgtgccgcctctggcagaaccttcagcatgggctggtttagacaggcccctggcaaagagagagagttcgtcgccgccatcacatacagcggcggcagcccttactacgcctcttctgtcagaggccggttcaccatcagccgggacaacgccaagaacaccgtgtacctccagatgaacagcctgaagccagaggacaccgccgtgtactactgtgccgccaatccaacctacggcagcgactggaatgccgagaattggggccagggcacccaagtgacagtgtctagtggatccggcggcggaggatctggcggaggcggatctgggggcggaggctctttcgaacaagttcagcttcaacagcctggcgctgagctggtcaaacctggcgcttctgtgaagatgagctgcaaagccagcggctacgccttcagcagctactggatcaactggatgaagcagaaacccggccagggactcgaatggatcggccaaatctatcccggcgacggcgacaccaactacaacggcaagttcaagggcagagccacactgaccgccgatacctctagcagcacagcctacatgcagctgagcagcctgaccagcgaagatagcgccgtgtacttctgtgcccggtccatcacaacagtcgtgggctgcgctatggactattggggccagggaacaagcgtgaccgtgtctagtacgcgtatccagaaccctgatcctgccgtgtaccagctgcgggatagcaagagcagcgacaagagcgtgtgtctgttcaccgacttcgacagccagaccaacgtgtcccagagcaaggactccgacgtgtacatcaccgataagtgcgtgctggacatgcggagcatggacttcaagagcaactccgccgtggcctggtccaacaagtccgatttcgcctgcgccaacgccttcaacaacagcattatccccgaggacacattcttcccaagcagcgacgtgccctgcgacgtgaagctggtggaaaagagcttcgagacagacaccaacctgaacttccagaacctgagcgtgatcggcttcagaatcctgctgctgaaagtggccggctttaacctgctgatgaccctgcggctgtggtccagccgcgccaagagaagcggatctggcgtgaagcagaccctgaatttcgacctgctgaagctggctggcgacgtggaatccaacccaggcccttctagaggccatatgaccgagtacaagcccacggtgcgcctcgccacccgcgacgacgtccccagggccgtacgcaccctcgccgccgcgttcgccgactaccccgccacgcgccacaccgtcgatccggaccgccacatcgagcgggtcaccgagctgcaagaactcttcctcacgcgcgtcgggctcgacatcggcaaggtgtgggtcgcggacgacggcgccgcggtggcggtctggaccacgccggagagcgtcgaagcgggggcggtgttcgccgagatcggcccgcgcatggccgagttgagcggttcccggctggccgcgcagcaacagatggaaggcctcctggcgccgcaccggcccaaggagcccgcgtggttcctggccaccgtcggcgtctcgcccgaccaccagggcaagggtctgggcagcgccgtcgtgctccccggagtggaggcggccgagcgcgccggggtgcccgccttcctggagacctccgcgccccgcaacctccccttctacgagcggctcggcttcaccgtcaccgccgacgtcgaggtgcccgaaggaccgcgcacctggtgcatgacccgcaagcccggtgcctga

SEQ ID NO: 5050 - DNA, 3405 bp, Artificial Sequence
  Synthetic Polynucloetide
atggccttaccagtgaccgccttgctcctgccgctggccttgctgctccacgccgccaggccgcaggtccagctcgtcgagtccggcggcggcctcgtccaggccggcgactccgtcaccctctcctgcaccgcctccggccgcaccttctcctcctacgccctcgcctggttccgccagcgccccggcaaggagcgcgagttcgtcgccggcctccgctggggcggccccaccaactacgccgactccgtcaaggaccgcttcaccatctccggcgactccgccaagcacaccatgtacctccagatgaactccctcaagcccgaggacaccgccgtctactactgcggctacaaccccggcggctgggccgtcccctcccagtacgagtacgactcctggggccagggcacccaggtcaccgtctcctccggtaccggcggaggcggatctggcggcggaggtagcggtggcggaggatctgaattcgacatccagatgacacagagccctagcagcctgtctgccagcgtgggagacagagtgaccatcacatgcaaggccagcgaccacatcaacaactggctggcctggtatcagcagaagcctggacaggcccctaagctgctgatctacggcgctaccacactggaaacaggcgtgcccagcagattttctggcagcggctctggcaccgactacaccctgacaatatccagcctccagcctgaggacttcgccacctactactgtcagcagagctggaacaccccttggacattcggccagggcaccaagctggaaatcaagagactcgaggacctgaagaacgtgttcccacctgaggtggccgtgttcgagcctagcgaggccgagatcagccacacccagaaagccaccctcgtgtgcctggctaccggcttctaccccgaccatgtggaactgtcttggtgggtcaacggcaaagaggtgcacagcggcgtgtgtaccgacccccagccactgaaagaacagcccgccctgaacgacagccggtactgcctgagcagcagactgagagtgtccgccaccttctggcagaacccccggaaccacttcagatgccaggtgcagttctacggcctgagcgagaacgacgagtggacccaggacagagccaagcccgtgacccagatcgtgtctgccgaagcctggggcagagccgattgcggctttaccagcgagagctaccagcagggcgtgctgagcgccaccatcctgtacgagatcctgctgggcaaggccaccctgtacgccgtgctggtgtctgccctggtgctgatggctatggtcaagcggaaggacagccggggaagggccaagcgatctggatctggagcaacaaacttctcactactcaaacaagcaggtgacgtggaggagaatcccgggcctactagtatggactggatttggcgcatccttttccttgtcggcgctgctaccggcgcccattccgggccccaggttcagctgcaagagtctggcggaggacttgctcaagctggcggaagcctgagactgtcttgtgccgcctctggcagaaccttcagcatgggctggtttagacaggcccctggcaaagagagagagttcgtcgccgccatcacatacagcggcggcagcccttactacgcctcttctgtcagaggccggttcaccatcagccgggacaacgccaagaacaccgtgtacctccagatgaacagcctgaagccagaggacaccgccgtgtactactgtgccgccaatccaacctacggcagcgactggaatgccgagaattggggccagggcacccaagtgacagtgtctagtggatccggcggcggaggatctggcggaggcggatctgggggcggaggctctttcgaacaagttcagcttcaacagcctggcgctgagctggtcaaacctggcgcttctgtgaagatgagctgcaaagccagcggctacgccttcagcagctactggatcaactggatgaagcagaaacccggccagggactcgaatggatcggccaaatctatcccggcgacggcgacaccaactacaacggcaagttcaagggcagagccacactgaccgccgatacctctagcagcacagcctacatgcagctgagcagcctgaccagcgaagatagcgccgtgtacttctgtgcccggtccatcacaacagtcgtgggctgcgctatggactattggggccagggaacaagcgtgaccgtgtctagtacgcgtatccagaaccctgatcctgccgtgtaccagctgcgggatagcaagagcagcgacaagagcgtgtgtctgttcaccgacttcgacagccagaccaacgtgtcccagagcaaggactccgacgtgtacatcaccgataagtgcgtgctggacatgcggagcatggacttcaagagcaactccgccgtggcctggtccaacaagtccgatttcgcctgcgccaacgccttcaacaacagcattatccccgaggacacattcttcccaagccccgagagcagctgcgacgtgaagctggtggaaaagagcttcgagacagacaccaacctgaacttccagaacctgagcgtgatcggcttcagaatcctgctgctgaaagtggccggctttaacctgctgatgaccctgcggctgtggtccagccgcgccaagagaagcggatctggcgtgaagcagaccctgaatttcgacctgctgaagctggctggcgacgtggaatccaacccaggcccttctagaggccatatgaccgagtacaagcccacggtgcgcctcgccacccgcgacgacgtccccagggccgtacgcaccctcgccgccgcgttcgccgactaccccgccacgcgccacaccgtcgatccggaccgccacatcgagcgggtcaccgagctgcaagaactcttcctcacgcgcgtcgggctcgacatcggcaaggtgtgggtcgcggacgacggcgccgcggtggcggtctggaccacgccggagagcgtcgaagcgggggcggtgttcgccgagatcggcccgcgcatggccgagttgagcggttcccggctggccgcgcagcaacagatggaaggcctcctggcgccgcaccggcccaaggagcccgcgtggttcctggccaccgtcggcgtctcgcccgaccaccagggcaagggtctgggcagcgccgtcgtgctccccggagtggaggcggccgagcgcgccggggtgcccgccttcctggagacctccgcgccccgcaacctccccttctacgagcggctcggcttcaccgtcaccgccgacgtcgaggtgcccgaaggaccgcgcacctggtgcatgacccgcaagcccggtgcctga

SEQ ID NO: 5051 - DNA, 2703 bp, Artificial Sequence
  Synthetic Polynucloetide
atggccttaccagtgaccgccttgctcctgccgctggccttgctgctccacgccgccaggccgcaggtccagctcgtcgagtccggcggcggcctcgtccaggccggcgactccgtcaccctctcctgcaccgcctccggccgcaccttctcctcctacgccctcgcctggttccgccagcgccccggcaaggagcgcgagttcgtcgccggcctccgctggggcggccccaccaactacgccgactccgtcaaggaccgcttcaccatctccggcgactccgccaagcacaccatgtacctccagatgaactccctcaagcccgaggacaccgccgtctactactgcggctacaaccccggcggctgggccgtcccctcccagtacgagtacgactcctggggccagggcacccaggtcaccgtctcctccggtaccggcggaggcggatctggcggcggaggtagcggtggcggaggatctgaattcgacatccagatgacacagagccctagcagcctgtctgccagcgtgggagacagagtgaccatcacatgcaaggccagcgaccacatcaacaactggctggcctggtatcagcagaagcctggacaggcccctaagctgctgatctacggcgctaccacactggaaacaggcgtgcccagcagattttctggcagcggctctggcaccgactacaccctgacaatatccagcctccagcctgaggacttcgccacctactactgtcagcagagctggaacaccccttggacattcggccagggcaccaagctggaaatcaagagactcgaggacctgaagaacgtgttcccacctgaggtggccgtgttcgagcctagcgaggccgagatcagccacacccagaaagccaccctcgtgtgcctggctaccggcttctaccccgaccatgtggaactgtcttggtgggtcaacggcaaagaggtgcacagcggcgtgtgtaccgacccccagccactgaaagaacagcccgccctgaacgacagccggtactgcctgagcagcagactgagagtgtccgccaccttctggcagaacccccggaaccacttcagatgccaggtgcagttctacggcctgagcgagaacgacgagtggacccaggacagagccaagcccgtgacccagatcgtgtctgccgaagcctggggcagagccgattgcggctttaccagcgagagctaccagcagggcgtgctgagcgccaccatcctgtacgagatcctgctgggcaaggccaccctgtacgccgtgctggtgtctgccctggtgctgatggctatggtcaagcggaaggacagccggggaagggccaagcgatctggatctggagcaacaaacttctcactactcaaacaagcaggtgacgtggaggagaatcccgggcctactagtatggactggatttggcgcatccttttccttgtcggcgctgctaccggcgcccattccgggccccaggttcagctgcaagagtctggcggaggacttgctcaagctggcggaagcctgagactgtcttgtgccgcctctggcagaaccttcagcatgggctggtttagacaggcccctggcaaagagagagagttcgtcgccgccatcacatacagcggcggcagcccttactacgcctcttctgtcagaggccggttcaccatcagccgggacaacgccaagaacaccgtgtacctccagatgaacagcctgaagccagaggacaccgccgtgtactactgtgccgccaatccaacctacggcagcgactggaatgccgagaattggggccagggcacccaagtgacagtgtctagtggatccggcggcggaggatctggcggaggcggatctgggggcggaggctctttcgaacaagttcagcttcaacagcctggcgctgagctggtcaaacctggcgcttctgtgaagatgagctgcaaagccagcggctacgccttcagcagctactggatcaactggatgaagcagaaacccggccagggactcgaatggatcggccaaatctatcccggcgacggcgacaccaactacaacggcaagttcaagggcagagccacactgaccgccgatacctctagcagcacagcctacatgcagctgagcagcctgaccagcgaagatagcgccgtgtacttctgtgcccggtccatcacaacagtcgtgggctgcgctatggactattggggccagggaacaagcgtgaccgtgtctagtacgcgtatccagaaccctgatcctgccgtgtaccagctgcgggatagcaagagcagcgacaagagcgtgtgtctgttcaccgacttcgacagccagaccaacgtgtcccagagcaaggactccgacgtgtacatcaccgataagtgcgtgctggacatgcggagcatggacttcaagagcaactccgccgtggcctggtccaacaagtccgatttcgcctgcgccaacgccttcaacaacagcattatccccgaggacacattcttcccaagccccgagagcagctgcgacgtgaagctggtggaaaagagcttcgagacagacaccaacctgaacttccagaacctgagcgtgatcggcttcagaatcctgctgctgaaagtggccggctttaacctgctgatgaccctgcggctgtggtccagc

SEQ ID NO: 5052 - DNA, 3378 bp, Artificial Sequence
  Synthetic Polynucloetide
atggccttaccagtgaccgccttgctcctgccgctggccttgctgctccacgccgccaggccgcaggtccagctcgtcgagtccggcggcggcctcgtccaggccggcgactccgtcaccctctcctgcaccgcctccggccgcaccttctcctcctacgccctcgcctggttccgccagcgccccggcaaggagcgcgagttcgtcgccggcctccgctggggcggccccaccaactacgccgactccgtcaaggaccgcttcaccatctccggcgactccgccaagcacaccatgtacctccagatgaactccctcaagcccgaggacaccgccgtctactactgcggctacaaccccggcggctgggccgtcccctcccagtacgagtacgactcctggggccagggcacccaggtcaccgtctcctccggtaccggcggaggcggatctggcggcggaggtagcggtggcggaggatctgaattcgacatccagatgacacagagccctagcagcctgtctgccagcgtgggagacagagtgaccatcacatgcaaggccagcgaccacatcaacaactggctggcctggtatcagcagaagcctggacaggcccctaagctgctgatctacggcgctaccacactggaaacaggcgtgcccagcagattttctggcagcggctctggcaccgactacaccctgacaatatccagcctccagcctgaggacttcgccacctactactgtcagcagagctggaacaccccttggacattcggccagggcaccaagctggaaatcaagagactcgaggacctgaagaacgtgttcccacctgaggtggccgtgttcgagcctagcgaggccgagatcagccacacccagaaagccaccctcgtgtgcctggctaccggcttctaccccgaccatgtggaactgtcttggtgggtcaacggcaaagaggtgcacagcggcgtgtgtaccgacccccagccactgaaagaacagcccgccctgaacgacagccggtactgcctgagcagcagactgagagtgtccgccaccttctggcagaacccccggaaccacttcagatgccaggtgcagttctacggcctgagcgagaacgacgagtggacccaggacagagccaagcccgtgacccagatcgtgtctgccgaagcctggggcagagccgattgcggctttaccagcgagagctaccagcagggcgtgctgagcgccaccatcctgtacgagatcctgctgggcaaggccaccctgtacgccgtgctggtgtctgccctggtgctgatggctatggtcaagcggaaggacagccggggaagggccaagcgatctggatctggagcaacaaacttctcactactcaaacaagcaggtgacgtggaggagaatcccgggcctactagtatggactggatttggcgcatccttttccttgtcggcgctgctaccggcgcccattccgggccccaggttcagctgcaagagtctggcggaggacttgctcaagctggcggaagcctgagactgtcttgtgccgcctctggcagaaccttcagcatgggctggtttagacaggcccctggcaaagagagagagttcgtcgccgccatcacatacagcggcggcagcccttactacgcctcttctgtcagaggccggttcaccatcagccgggacaacgccaagaacaccgtgtacctccagatgaacagcctgaagccagaggacaccgccgtgtactactgtgccgccaatccaacctacggcagcgactggaatgccgagaattggggccagggcacccaagtgacagtgtctagtggatccggcggcggaggatctggcggaggcggatctgggggcggaggctctttcgaacaagttcagcttcaacagcctggcgctgagctggtcaaacctggcgcttctgtgaagatgagctgcaaagccagcggctacgccttcagcagctactggatcaactggatgaagcagaaacccggccagggactcgaatggatcggccaaatctatcccggcgacggcgacaccaactacaacggcaagttcaagggcagagccacactgaccgccgatacctctagcagcacagcctacatgcagctgagcagcctgaccagcgaagatagcgccgtgtacttctgtgcccggtccatcacaacagtcgtgggctgcgctatggactattggggccagggaacaagcgtgaccgtgtctagtacgcgtatccagaaccctgatcctgccgtgtaccagctgcgggatagcaagagcagcgacaagagcgtgtgtctgttcaccgacttcgacagccagaccaacgtgtcccagagcaaggactccgacgtgtacatcaccgataagtgcgtgctggacatgcggagcatggacttcaagagcaactccgccgtggcctggtccaacaagtccgatttcgcctgcgccaacgccttcaacaacagcattatccccgaggacacattcttcccaagccccgagagcagctgcgacgtgaagctggtggaaaagagcttcgagacagacaccaacctgaacttccagaacctgagcgtgatcggcttcagaatcctgctgctgaaagtggccggctttaacctgctgatgaccctgcggctgtggtccagccgcgccaagagaagcggatctggcgtgaagcagaccctgaatttcgacctgctgaagctggctggcgacgtggaatccaacccaggcccttctagaggcgggatccacaccatggctacctacgaggtgctgtgcgaggtggcaagaaagctgggcaccgacgacagagaagtggtgctgttcctgctgaacgtgttcatccctcagcctacactggcccagctgatcggtgcactgagagccctgaaagaggaaggccggctgacctttcctctgctggccgaatgcctgttcagagccggaagaagggatctgctgcgggacctgctgcatctggaccccagatttctggaaagacacctggccggcaccatgagctacttcagcccttaccagctgaccgtgctgcacgttgacggcgaactgtgcgccagagatattcggagcctgatcttcctgagcaaggacaccatcggcagccggtctacccctcagacatttctgcactgggtgtactgcatggaaaacctggacctgctcggccccacagatgtggatgccctgatgtccatgctgagaagcctgagcagagtggacctccagagacaggtgcagacactgatgggactgcacctgagcggacctagccacagccagcactacagacacacccct

SEQ ID NO: 5053 - DNA, 2715 bp, Artificial Sequence
  Synthetic Polynucloetide
atggccttaccagtgaccgccttgctcctgccgctggccttgctgctccacgccgccaggccgcaggtccagctcgtcgagtccggcggcggcctcgtccaggccggcgactccgtcaccctctcctgcaccgcctccggccgcaccttctcctcctacgccctcgcctggttccgccagcgccccggcaaggagcgcgagttcgtcgccggcctccgctggggcggccccaccaactacgccgactccgtcaaggaccgcttcaccatctccggcgactccgccaagcacaccatgtacctccagatgaactccctcaagcccgaggacaccgccgtctactactgcggctacaaccccggcggctgggccgtcccctcccagtacgagtacgactcctggggccagggcacccaggtcaccgtctcctccggtaccggcggaggcggatctggcggcggaggtagcggtggcggaggatctgaattcgacatccagatgacacagagccctagcagcctgtctgccagcgtgggagacagagtgaccatcacatgcaaggccagcgaccacatcaacaactggctggcctggtatcagcagaagcctggacaggcccctaagctgctgatctacggcgctaccacactggaaacaggcgtgcccagcagattttctggcagcggctctggcaccgactacaccctgacaatatccagcctccagcctgaggacttcgccacctactactgtcagcagagctggaacaccccttggacattcggccagggcaccaagctggaaatcaagagactcgagatccagaaccctgatcctgccgtgtaccagctgcgggatagcaagagcagcgacaagagcgtgtgtctgttcaccgacttcgacagccagaccaacgtgtcccagagcaaggactccgacgtgtacatcaccgataagtgcgtgctggacatgcggagcatggacttcaagagcaactccgccgtggcctggtccaacaagtccgatttcgcctgcgccaacgccttcaacaacagcattatccccgaggacacattcttcccaagccccgagagcagctgcgacgtgaagctggtggaaaagagcttcgagacagacaccaacctgaacttccagaacctgagcgtgatcggcttcagaatcctgctgctgaaagtggccggctttaacctgctgatgaccctgcggctgtggtccagccgcgccaagagaagcggatctggcgtgaagcagaccctgaatttcgacctgctgaagctggctggcgacgtggaatccaacccaggccctactagtatggactggatttggcgcatccttttccttgtcggcgctgctaccggcgcccattccgggccccaggttcagctgcaagagtctggcggaggacttgctcaagctggcggaagcctgagactgtcttgtgccgcctctggcagaaccttcagcatgggctggtttagacaggcccctggcaaagagagagagttcgtcgccgccatcacatacagcggcggcagcccttactacgcctcttctgtcagaggccggttcaccatcagccgggacaacgccaagaacaccgtgtacctccagatgaacagcctgaagccagaggacaccgccgtgtactactgtgccgccaatccaacctacggcagcgactggaatgccgagaattggggccagggcacccaagtgacagtgtctagtggatccggcggcggaggatctggcggaggcggatctgggggcggaggctctttcgaacaagttcagcttcaacagcctggcgctgagctggtcaaacctggcgcttctgtgaagatgagctgcaaagccagcggctacgccttcagcagctactggatcaactggatgaagcagaaacccggccagggactcgaatggatcggccaaatctatcccggcgacggcgacaccaactacaacggcaagttcaagggcagagccacactgaccgccgatacctctagcagcacagcctacatgcagctgagcagcctgaccagcgaagatagcgccgtgtacttctgtgcccggtccatcacaacagtcgtgggctgcgctatggactattggggccagggaacaagcgtgaccgtgtctagtacgcgtgaggacctgaagaacgtgttcccacctgaggtggccgtgttcgagcctagcgaggccgagatcagccacacccagaaagccaccctcgtgtgcctggctaccggcttctaccccgaccatgtggaactgtcttggtgggtcaacggcaaagaggtgcacagcggcgtgtgtaccgacccccagccactgaaagaacagcccgccctgaacgacagccggtactgcctgagcagcagactgagagtgtccgccaccttctggcagaacccccggaaccacttcagatgccaggtgcagttctacggcctgagcgagaacgacgagtggacccaggacagagccaagcccgtgacccagatcgtgtctgccgaagcctggggcagagccgattgcggctttaccagcgagagctaccagcagggcgtgctgagcgccaccatcctgtacgagatcctgctgggcaaggccaccctgtacgccgtgctggtgtctgccctggtgctgatggctatggtcaagcggaaggacagccgggga

SEQ ID NO: 5054 - DNA, 3381 bp, Artificial Sequence
  Synthetic Polynucloetide
atggccttaccagtgaccgccttgctcctgccgctggccttgctgctccacgccgccaggccgcaggtccagctcgtcgagtccggcggcggcctcgtccaggccggcgactccgtcaccctctcctgcaccgcctccggccgcaccttctcctcctacgccctcgcctggttccgccagcgccccggcaaggagcgcgagttcgtcgccggcctccgctggggcggccccaccaactacgccgactccgtcaaggaccgcttcaccatctccggcgactccgccaagcacaccatgtacctccagatgaactccctcaagcccgaggacaccgccgtctactactgcggctacaaccccggcggctgggccgtcccctcccagtacgagtacgactcctggggccagggcacccaggtcaccgtctcctccggtaccggcggaggcggatctggcggcggaggtagcggtggcggaggatctgaattcgacatccagatgacacagagccctagcagcctgtctgccagcgtgggagacagagtgaccatcacatgcaaggccagcgaccacatcaacaactggctggcctggtatcagcagaagcctggacaggcccctaagctgctgatctacggcgctaccacactggaaacaggcgtgcccagcagattttctggcagcggctctggcaccgactacaccctgacaatatccagcctccagcctgaggacttcgccacctactactgtcagcagagctggaacaccccttggacattcggccagggcaccaagctggaaatcaagagactcgagatccagaaccctgatcctgccgtgtaccagctgcgggatagcaagagcagcgacaagagcgtgtgtctgttcaccgacttcgacagccagaccaacgtgtcccagagcaaggactccgacgtgtacatcaccgataagtgcgtgctggacatgcggagcatggacttcaagagcaactccgccgtggcctggtccaacaagtccgatttcgcctgcgccaacgccttcaacaacagcattatccccgaggacacattcttcccaagccccgagagcagctgcgacgtgaagctggtggaaaagagcttcgagacagacaccaacctgaacttccagaacctgagcgtgatcggcttcagaatcctgctgctgaaagtggccggctttaacctgctgatgaccctgcggctgtggtccagccgcgccaagagaagcggatctggcgtgaagcagaccctgaatttcgacctgctgaagctggctggcgacgtggaatccaacccaggccctactagtatggactggatttggcgcatccttttccttgtcggcgctgctaccggcgcccattccgggccccaggttcagctgcaagagtctggcggaggacttgctcaagctggcggaagcctgagactgtcttgtgccgcctctggcagaaccttcagcatgggctggtttagacaggcccctggcaaagagagagagttcgtcgccgccatcacatacagcggcggcagcccttactacgcctcttctgtcagaggccggttcaccatcagccgggacaacgccaagaacaccgtgtacctccagatgaacagcctgaagccagaggacaccgccgtgtactactgtgccgccaatccaacctacggcagcgactggaatgccgagaattggggccagggcacccaagtgacagtgtctagtggatccggcggcggaggatctggcggaggcggatctgggggcggaggctctttcgaacaagttcagcttcaacagcctggcgctgagctggtcaaacctggcgcttctgtgaagatgagctgcaaagccagcggctacgccttcagcagctactggatcaactggatgaagcagaaacccggccagggactcgaatggatcggccaaatctatcccggcgacggcgacaccaactacaacggcaagttcaagggcagagccacactgaccgccgatacctctagcagcacagcctacatgcagctgagcagcctgaccagcgaagatagcgccgtgtacttctgtgcccggtccatcacaacagtcgtgggctgcgctatggactattggggccagggaacaagcgtgaccgtgtctagtacgcgtgaggacctgaagaacgtgttcccacctgaggtggccgtgttcgagcctagcgaggccgagatcagccacacccagaaagccaccctcgtgtgcctggctaccggcttctaccccgaccatgtggaactgtcttggtgggtcaacggcaaagaggtgcacagcggcgtgtgtaccgacccccagccactgaaagaacagcccgccctgaacgacagccggtactgcctgagcagcagactgagagtgtccgccaccttctggcagaacccccggaaccacttcagatgccaggtgcagttctacggcctgagcgagaacgacgagtggacccaggacagagccaagcccgtgacccagatcgtgtctgccgaagcctggggcagagccgattgcggctttaccagcgagagctaccagcagggcgtgctgagcgccaccatcctgtacgagatcctgctgggcaaggccaccctgtacgccgtgctggtgtctgccctggtgctgatggctatggtcaagcggaaggacagccggggaagggccaagcgatctggatctggagcaacaaacttctcactactcaaacaagcaggtgacgtggaggagaatcccgggccttctagaggcgggatccacaccatggctacctacgaggtgctgtgcgaggtggcaagaaagctgggcaccgacgacagagaagtggtgctgttcctgctgaacgtgttcatccctcagcctacactggcccagctgatcggtgcactgagagccctgaaagaggaaggccggctgacctttcctctgctggccgaatgcctgttcagagccggaagaagggatctgctgcgggacctgctgcatctggaccccagatttctggaaagacacctggccggcaccatgagctacttcagcccttaccagctgaccgtgctgcacgttgacggcgaactgtgcgccagagatattcggagcctgatcttcctgagcaaggacaccatcggcagccggtctacccctcagacatttctgcactgggtgtactgcatggaaaacctggacctgctcggccccacagatgtggatgccctgatgtccatgctgagaagcctgagcagagtggacctccagagacaggtgcagacactgatgggactgcacctgagcggacctagccacagccagcactacagacacacccct

SEQ ID NO: 5055 - DNA, 3405 bp, Artificial Sequence
  Synthetic Polynucloetide
atggccttaccagtgaccgccttgctcctgccgctggccttgctgctccacgccgccaggccgcaggtccagctcgtcgagtccggcggcggcctcgtccaggccggcgactccgtcaccctctcctgcaccgcctccggccgcaccttctcctcctacgccctcgcctggttccgccagcgccccggcaaggagcgcgagttcgtcgccggcctccgctggggcggccccaccaactacgccgactccgtcaaggaccgcttcaccatctccggcgactccgccaagcacaccatgtacctccagatgaactccctcaagcccgaggacaccgccgtctactactgcggctacaaccccggcggctgggccgtcccctcccagtacgagtacgactcctggggccagggcacccaggtcaccgtctcctccggtaccggcggaggcggatctggcggcggaggtagcggtggcggaggatctgaattcgacatccagatgacacagagccctagcagcctgtctgccagcgtgggagacagagtgaccatcacatgcaaggccagcgaccacatcaacaactggctggcctggtatcagcagaagcctggacaggcccctaagctgctgatctacggcgctaccacactggaaacaggcgtgcccagcagattttctggcagcggctctggcaccgactacaccctgacaatatccagcctccagcctgaggacttcgccacctactactgtcagcagagctggaacaccccttggacattcggccagggcaccaagctggaaatcaagagactcgaggacctgaagaacgtgttcccacctgaggtggccgtgttcgagcctagcgaggccgagatcagccacacccagaaagccaccctcgtgtgcctggctaccggcttctaccccgaccatgtggaactgtcttggtgggtcaacggcaaagaggtgcacagcggcgtgtctaccgacccccagccactgaaagaacagcccgccctgaacgacagccggtactgcctgagcagcagactgagagtgtccgccaccttctggcagaacccccggaaccacttcagatgccaggtgcagttctacggcctgagcgagaacgacgagtggacccaggacagagccaagcccgtgacccagatcgtgtctgccgaagcctggggcagagccgattgcggctttaccagcgagagctaccagcagggcgtgctgagcgccaccatcctgtacgagatcctgctgggcaaggccaccctgtacgccgtgctggtgtctgccctggtgctgatggctatggtcaagcggaaggacagccggggaagggccaagcgatctggatctggagcaacaaacttctcactactcaaacaagcaggtgacgtggaggagaatcccgggcctactagtatggactggatttggcgcatccttttccttgtcggcgctgctaccggcgcccattccgggccccaggttcagctgcaagagtctggcggaggacttgctcaagctggcggaagcctgagactgtcttgtgccgcctctggcagaaccttcagcatgggctggtttagacaggcccctggcaaagagagagagttcgtcgccgccatcacatacagcggcggcagcccttactacgcctcttctgtcagaggccggttcaccatcagccgggacaacgccaagaacaccgtgtacctccagatgaacagcctgaagccagaggacaccgccgtgtactactgtgccgccaatccaacctacggcagcgactggaatgccgagaattggggccagggcacccaagtgacagtgtctagtggatccggcggcggaggatctggcggaggcggatctgggggcggaggctctttcgaacaagttcagcttcaacagcctggcgctgagctggtcaaacctggcgcttctgtgaagatgagctgcaaagccagcggctacgccttcagcagctactggatcaactggatgaagcagaaacccggccagggactcgaatggatcggccaaatctatcccggcgacggcgacaccaactacaacggcaagttcaagggcagagccacactgaccgccgatacctctagcagcacagcctacatgcagctgagcagcctgaccagcgaagatagcgccgtgtacttctgtgcccggtccatcacaacagtcgtgggctgcgctatggactattggggccagggaacaagcgtgaccgtgtctagtacgcgtatccagaaccctgatcctgccgtgtaccagctgcgggatagcaagagcagcgacaagagcgtgtgtctgttcaccgacttcgacagccagaccaacgtgtcccagagcaaggactccgacgtgtacatcaccgataagaccgtgctggacatgcggagcatggacttcaagagcaactccgccgtggcctggtccaacaagtccgatttcgcctgcgccaacgccttcaacaacagcattatccccgaggacacattcttcccaagccccgagagcagctgcgacgtgaagctggtggaaaagagcttcgagacagacaccaacctgaacttccagaacctgagcgtgatcggcttcagaatcctgctgctgaaagtggccggctttaacctgctgatgaccctgcggctgtggtccagccgcgccaagagaagcggatctggcgtgaagcagaccctgaatttcgacctgctgaagctggctggcgacgtggaatccaacccaggcccttctagaggccatatgaccgagtacaagcccacggtgcgcctcgccacccgcgacgacgtccccagggccgtacgcaccctcgccgccgcgttcgccgactaccccgccacgcgccacaccgtcgatccggaccgccacatcgagcgggtcaccgagctgcaagaactcttcctcacgcgcgtcgggctcgacatcggcaaggtgtgggtcgcggacgacggcgccgcggtggcggtctggaccacgccggagagcgtcgaagcgggggcggtgttcgccgagatcggcccgcgcatggccgagttgagcggttcccggctggccgcgcagcaacagatggaaggcctcctggcgccgcaccggcccaaggagcccgcgtggttcctggccaccgtcggcgtctcgcccgaccaccagggcaagggtctgggcagcgccgtcgtgctccccggagtggaggcggccgagcgcgccggggtgcccgccttcctggagacctccgcgccccgcaacctccccttctacgagcggctcggcttcaccgtcaccgccgacgtcgaggtgcccgaaggaccgcgcacctggtgcatgacccgcaagcccggtgcctga

SEQ ID NO: 5056 - DNA, 3651 bp, Artificial Sequence
  Synthetic Polynucloetide
atggccttaccagtgaccgccttgctcctgccgctggccttgctgctccacgccgccaggccgcaggtccagctcgtcgagtccggcggcggcctcgtccaggccggcgactccgtcaccctctcctgcaccgcctccggccgcaccttctcctcctacgccctcgcctggttccgccagcgccccggcaaggagcgcgagttcgtcgccggcctccgctggggcggccccaccaactacgccgactccgtcaaggaccgcttcaccatctccggcgactccgccaagcacaccatgtacctccagatgaactccctcaagcccgaggacaccgccgtctactactgcggctacaaccccggcggctgggccgtcccctcccagtacgagtacgactcctggggccagggcacccaggtcaccgtctcctccggtaccggcggaggcggatctggcggcggaggtagcggtggcggaggatctgaattcgacatccagatgacacagagccctagcagcctgtctgccagcgtgggagacagagtgaccatcacatgcaaggccagcgaccacatcaacaactggctggcctggtatcagcagaagcctggacaggcccctaagctgctgatctacggcgctaccacactggaaacaggcgtgcccagcagattttctggcagcggctctggcaccgactacaccctgacaatatccagcctccagcctgaggacttcgccacctactactgtcagcagagctggaacaccccttggacattcggccagggcaccaagctggaaatcaagagactcgaggacctgaagaacgtgttcccacctgaggtggccgtgttcgagcctagcgaggccgagatcagccacacccagaaagccaccctcgtgtgcctggctaccggcttctaccccgaccatgtggaactgtcttggtgggtcaacggcaaagaggtgcacagcggcgtgtctaccgacccccagccactgaaagaacagcccgccctgaacgacagccggtactgcctgagcagcagactgagagtgtccgccaccttctggcagaacccccggaaccacttcagatgccaggtgcagttctacggcctgagcgagaacgacgagtggacccaggacagagccaagcccgtgacccagatcgtgtctgccgaagcctggggcagagccgattgcggctttaccagcgagagctaccagcagggcgtgctgagcgccaccatcctgtacgagatcctgctgggcaaggccaccctgtacgccgtgctggtgtctgccctggtgctgatggctatggtcaagcggaaggacagccggggaagggccaagcgatctggatctggagcaacaaacttctcactactcaaacaagcaggtgacgtggaggagaatcccgggcctactagtatggactggatttggcgcatccttttccttgtcggcgctgctaccggcgcccattccgggccccaggttcagctgcaagagtctggcggaggacttgctcaagctggcggaagcctgagactgtcttgtgccgcctctggcagaaccttcagcatgggctggtttagacaggcccctggcaaagagagagagttcgtcgccgccatcacatacagcggcggcagcccttactacgcctcttctgtcagaggccggttcaccatcagccgggacaacgccaagaacaccgtgtacctccagatgaacagcctgaagccagaggacaccgccgtgtactactgtgccgccaatccaacctacggcagcgactggaatgccgagaattggggccagggcacccaagtgacagtgtctagtggatccggcggcggaggatctggcggaggcggatctgggggcggaggctctttcgaacaagttcagcttcaacagcctggcgctgagctggtcaaacctggcgcttctgtgaagatgagctgcaaagccagcggctacgccttcagcagctactggatcaactggatgaagcagaaacccggccagggactcgaatggatcggccaaatctatcccggcgacggcgacaccaactacaacggcaagttcaagggcagagccacactgaccgccgatacctctagcagcacagcctacatgcagctgagcagcctgaccagcgaagatagcgccgtgtacttctgtgcccggtccatcacaacagtcgtgggctgcgctatggactattggggccagggaacaagcgtgaccgtgtctagtacgcgtgagcagaaactgatctcggaagaggatgggagcggcaccccattcccttctctggcccctcccatcatgctgctggtggacggcaagcagcagatggtggtcgtgtgcctggtgctggatgtggccccacctggactggacagccccatctggtttagcgccggcaatggctctgccctggacgcctttacctacggcccaagccctgccaccgatggcacctggacaaatctggcccacctgagcctgcccagcgaggaactggcttcttgggagcctctcgtgtgccacacaggacctggcgctgagggacacagcagatccacccagcctatgcacctgtctggcgaggccagcaccgccagaacctgtcctcaggaacctctgagaggcacccctggcggagcactgtggctgggagtgctgagactgctgctgttcaagctgctgctgtttgacctgctgctgacctgctcctgtctgtgcgatcctgccggccctctgccttctcctgccaccaccacaagactgagagccctgggcagccacagactgcaccctgccacagagacaggcggcagagaggccacaagcagccctagaccccagcccagagacagaagatggggcgataccccccctggcagaaagcctggatctccagtccgcgccaagagaagcggatctggcgtgaagcagaccctgaatttcgacctgctgaagctggctggcgacgtggaatccaacccaggcccttctagaggccatatgaccgagtacaagcccacggtgcgcctcgccacccgcgacgacgtccccagggccgtacgcaccctcgccgccgcgttcgccgactaccccgccacgcgccacaccgtcgatccggaccgccacatcgagcgggtcaccgagctgcaagaactcttcctcacgcgcgtcgggctcgacatcggcaaggtgtgggtcgcggacgacggcgccgcggtggcggtctggaccacgccggagagcgtcgaagcgggggcggtgttcgccgagatcggcccgcgcatggccgagttgagcggttcccggctggccgcgcagcaacagatggaaggcctcctggcgccgcaccggcccaaggagcccgcgtggttcctggccaccgtcggcgtctcgcccgaccaccagggcaagggtctgggcagcgccgtcgtgctccccggagtggaggcggccgagcgcgccggggtgcccgccttcctggagacctccgcgccccgcaacctccccttctacgagcggctcggcttcaccgtcaccgccgacgtcgaggtgcccgaaggaccgcgcacctggtgcatgacccgcaagcccggtgcctga

SEQ ID NO: 5057 - DNA, 3516 bp, Artificial Sequence
  Synthetic Polynucloetide
atggccttaccagtgaccgccttgctcctgccgctggccttgctgctccacgccgccaggccgcaggtccagctcgtcgagtccggcggcggcctcgtccaggccggcgactccgtcaccctctcctgcaccgcctccggccgcaccttctcctcctacgccctcgcctggttccgccagcgccccggcaaggagcgcgagttcgtcgccggcctccgctggggcggccccaccaactacgccgactccgtcaaggaccgcttcaccatctccggcgactccgccaagcacaccatgtacctccagatgaactccctcaagcccgaggacaccgccgtctactactgcggctacaaccccggcggctgggccgtcccctcccagtacgagtacgactcctggggccagggcacccaggtcaccgtctcctccggtaccggcggaggcggatctggcggcggaggtagcggtggcggaggatctgaattcgacatccagatgacacagagccctagcagcctgtctgccagcgtgggagacagagtgaccatcacatgcaaggccagcgaccacatcaacaactggctggcctggtatcagcagaagcctggacaggcccctaagctgctgatctacggcgctaccacactggaaacaggcgtgcccagcagattttctggcagcggctctggcaccgactacaccctgacaatatccagcctccagcctgaggacttcgccacctactactgtcagcagagctggaacaccccttggacattcggccagggcaccaagctggaaatcaagagactcgaggggaaaccaattcccaaccctcttctgggactggattcaaccggcagcggcgacaagcagctggacgccgacgtgtcccccaagcctaccatcttcctgccctctatcgccgagacaaagctccagaaggccggcacctacctgtgcctgctggaaaagttcttcccagatgtgattaagatccactggcaggaaaagaagtccaacaccatcctgggcagccaggaaggcaacaccatgaagaccaacgacacctacatgaagttcagctggctgaccgtgcccgagaagtccctggacaaagaacacagatgcatcgtgcggcacgaaaacaacaagaacggcgtggaccaggaaatcatcttcccacccatcaagaccgatgtgattacaatggaccccaaggacaactgctccaaggacgccaacgataccctgctgctccagctgaccaacaccagcgcctactacatgtacttgttgctgctgctgaagtccgtggtgtacttcgccatcatcacatgctgcctgctgcggagaaccgccttctgctgcaacggcgagaagtctagggccaagcgatctggatctggagcaacaaacttctcactactcaaacaagcaggtgacgtggaggagaatcccgggcctactagtatggactggatttggcgcatccttttccttgtcggcgctgctaccggcgcccattccgggccccaggttcagctgcaagagtctggcggaggacttgctcaagctggcggaagcctgagactgtcttgtgccgcctctggcagaaccttcagcatgggctggtttagacaggcccctggcaaagagagagagttcgtcgccgccatcacatacagcggcggcagcccttactacgcctcttctgtcagaggccggttcaccatcagccgggacaacgccaagaacaccgtgtacctccagatgaacagcctgaagccagaggacaccgccgtgtactactgtgccgccaatccaacctacggcagcgactggaatgccgagaattggggccagggcacccaagtgacagtgtctagtggatccggcggcggaggatctggcggaggcggatctgggggcggaggctctttcgaacaagttcagcttcaacagcctggcgctgagctggtcaaacctggcgcttctgtgaagatgagctgcaaagccagcggctacgccttcagcagctactggatcaactggatgaagcagaaacccggccagggactcgaatggatcggccaaatctatcccggcgacggcgacaccaactacaacggcaagttcaagggcagagccacactgaccgccgatacctctagcagcacagcctacatgcagctgagcagcctgaccagcgaagatagcgccgtgtacttctgtgcccggtccatcacaacagtcgtgggctgcgctatggactattggggccagggaacaagcgtgaccgtgtctagtacgcgtgagcagaaactgatctcggaagaggatgggagcggcagccagcctcacaccaagcccagcgtgttcgtgatgaagaacggcaccaacgtggcctgcctcgtgaaagagttctaccccaaggacatcaggatcaacctggtgtccagcaagaagatcaccgagttcgaccccgccatcgtgatctcccccagcggcaagtacaacgccgtgaagctggggaagtacgaggacagcaacagcgtgacctgctccgtgcagcacgacaacaagaccgtgcacagcaccgactttgaagtgaaaaccgactccaccgaccacgtgaagcccaaagagacagagaacaccaagcagcccagcaagagctgccacaagcccaaggccatcgtgcacaccgagaaagtgaacatgatgagcctgaccgtgctgggcctgcggatgctgttcgccaaaaccgtggccgtgaacttcctgctgaccgccaagctgttcttcctccgcgccaagagaagcggatctggcgtgaagcagaccctgaatttcgacctgctgaagctggctggcgacgtggaatccaacccaggcccttctagaggccatatgaccgagtacaagcccacggtgcgcctcgccacccgcgacgacgtccccagggccgtacgcaccctcgccgccgcgttcgccgactaccccgccacgcgccacaccgtcgatccggaccgccacatcgagcgggtcaccgagctgcaagaactcttcctcacgcgcgtcgggctcgacatcggcaaggtgtgggtcgcggacgacggcgccgcggtggcggtctggaccacgccggagagcgtcgaagcgggggcggtgttcgccgagatcggcccgcgcatggccgagttgagcggttcccggctggccgcgcagcaacagatggaaggcctcctggcgccgcaccggcccaaggagcccgcgtggttcctggccaccgtcggcgtctcgcccgaccaccagggcaagggtctgggcagcgccgtcgtgctccccggagtggaggcggccgagcgcgccggggtgcccgccttcctggagacctccgcgccccgcaacctccccttctacgagcggctcggcttcaccgtcaccgccgacgtcgaggtgcccgaaggaccgcgcacctggtgcatgacccgcaagcccggtgcctga

SEQ ID NO: 5058 - DNA, 2727 bp, Artificial Sequence
  Synthetic Polynucloetide
atggccttaccagtgaccgccttgctcctgccgctggccttgctgctccacgccgccaggccgcaggtccagctcgtcgagtccggcggcggcctcgtccaggccggcgactccgtcaccctctcctgcaccgcctccggccgcaccttctcctcctacgccctcgcctggttccgccagcgccccggcaaggagcgcgagttcgtcgccggcctccgctggggcggccccaccaactacgccgactccgtcaaggaccgcttcaccatctccggcgactccgccaagcacaccatgtacctccagatgaactccctcaagcccgaggacaccgccgtctactactgcggctacaaccccggcggctgggccgtcccctcccagtacgagtacgactcctggggccagggcacccaggtcaccgtctcctccggtaccggcggaggcggatctggcggcggaggtagcggtggcggaggatctgaattcgacatccagatgacacagagccctagcagcctgtctgccagcgtgggagacagagtgaccatcacatgcaaggccagcgaccacatcaacaactggctggcctggtatcagcagaagcctggacaggcccctaagctgctgatctacggcgctaccacactggaaacaggcgtgcccagcagattttctggcagcggctctggcaccgactacaccctgacaatatccagcctccagcctgaggacttcgccacctactactgtcagcagagctggaacaccccttggacattcggccagggcaccaagctggaaatcaagagactcgagagccagcctcacaccaagcccagcgtgttcgtgatgaagaacggcaccaacgtggcctgcctcgtgaaagagttctaccccaaggacatcaggatcaacctggtgtccagcaagaagatcaccgagttcgaccccgccatcgtgatctcccccagcggcaagtacaacgccgtgaagctggggaagtacgaggacagcaacagcgtgacctgctccgtgcagcacgacaacaagaccgtgcacagcaccgactttgaagtgaaaaccgactccaccgaccacgtgaagcccaaagagacagagaacaccaagcagcccagcaagagctgccacaagcccaaggccatcgtgcacaccgagaaagtgaacatgatgagcctgaccgtgctgggcctgcggatgctgttcgccaaaaccgtggccgtgaacttcctgctgaccgccaagctgttcttcctcagggccaagcgatctggatctggagcaacaaacttctcactactcaaacaagcaggtgacgtggaggagaatcccgggcctactagtatggactggatttggcgcatccttttccttgtcggcgctgctaccggcgcccattccgggccccaggttcagctgcaagagtctggcggaggacttgctcaagctggcggaagcctgagactgtcttgtgccgcctctggcagaaccttcagcatgggctggtttagacaggcccctggcaaagagagagagttcgtcgccgccatcacatacagcggcggcagcccttactacgcctcttctgtcagaggccggttcaccatcagccgggacaacgccaagaacaccgtgtacctccagatgaacagcctgaagccagaggacaccgccgtgtactactgtgccgccaatccaacctacggcagcgactggaatgccgagaattggggccagggcacccaagtgacagtgtctagtggatccggcggcggaggatctggcggaggcggatctgggggcggaggctctttcgaacaagttcagcttcaacagcctggcgctgagctggtcaaacctggcgcttctgtgaagatgagctgcaaagccagcggctacgccttcagcagctactggatcaactggatgaagcagaaacccggccagggactcgaatggatcggccaaatctatcccggcgacggcgacaccaactacaacggcaagttcaagggcagagccacactgaccgccgatacctctagcagcacagcctacatgcagctgagcagcctgaccagcgaagatagcgccgtgtacttctgtgcccggtccatcacaacagtcgtgggctgcgctatggactattggggccagggaacaagcgtgaccgtgtctagtacgcgtgacaagcagctggacgccgacgtgtcccccaagcctaccatcttcctgccctctatcgccgagacaaagctccagaaggccggcacctacctgtgcctgctggaaaagttcttcccagatgtgattaagatccactggcaggaaaagaagtccaacaccatcctgggcagccaggaaggcaacaccatgaagaccaacgacacctacatgaagttcagctggctgaccgtgcccgagaagtccctggacaaagaacacagatgcatcgtgcggcacgaaaacaacaagaacggcgtggaccaggaaatcatcttcccacccatcaagaccgatgtgattacaatggaccccaaggacaactgctccaaggacgccaacgataccctgctgctccagctgaccaacaccagcgcctactacatgtacttgttgctgctgctgaagtccgtggtgtacttcgccatcatcacatgctgcctgctgcggagaaccgccttctgctgcaacggcgagaagtct

SEQ ID NO: 5059 - DNA, 3936 bp, Artificial Sequence
  Synthetic Polynucloetide
atggccttaccagtgaccgccttgctcctgccgctggccttgctgctccacgccgccaggccgcaggtccagctcgtcgagtccggcggcggcctcgtccaggccggcgactccgtcaccctctcctgcaccgcctccggccgcaccttctcctcctacgccctcgcctggttccgccagcgccccggcaaggagcgcgagttcgtcgccggcctccgctggggcggccccaccaactacgccgactccgtcaaggaccgcttcaccatctccggcgactccgccaagcacaccatgtacctccagatgaactccctcaagcccgaggacaccgccgtctactactgcggctacaaccccggcggctgggccgtcccctcccagtacgagtacgactcctggggccagggcacccaggtcaccgtctcctccggtaccggcggaggcggatctggcggcggaggtagcggtggcggaggatctgaattcgacatccagatgacacagagccctagcagcctgtctgccagcgtgggagacagagtgaccatcacatgcaaggccagcgaccacatcaacaactggctggcctggtatcagcagaagcctggacaggcccctaagctgctgatctacggcgctaccacactggaaacaggcgtgcccagcagattttctggcagcggctctggcaccgactacaccctgacaatatccagcctccagcctgaggacttcgccacctactactgtcagcagagctggaacaccccttggacattcggccagggcaccaagctggaaatcaagagaggacagcctaaggccaatcctaccgtgacactgttccctccaagcagcgaagaactccaggccaacaaggccacacttgtgtgcctgatctccgacttctaccctggggctgtgacagtggcttggaaggccgatggatctcctgtgaaagccggcgtggaaaccaccaagccatccaagcagagcaacaacaaatacgccgccagctcctacctgagcctgacacctgagcagtggaagtcccacagatcctacagctgccaagtgacccacgaaggcagcaccgtggaaaagacagtggcccctacagagtgcagcggatcccagagcttcggcctgctggaccccaagctgtgctacctgctggatggcatcctgttcatctacggcgtgatcctgaccgccctgttcctgagagtgaagttcagcagaagcgccgacgcccctgcctaccagcagggacagaaccaactgtacaacgagctgaacctgggcagacgggaagagtacgacgtgctggacaagcggagaggcagggaccctgagatgggcggaaagccccagcggagaaagaacccccaggaaggactgtataacgaactccagaaagacaagatggccgaagcctacagcgagatcggcatgaagggcgagcggagaagaggcaagggccacgatggcctgtaccagggcctgagcaccgccaccaaggacacctatgacgccctgcacatgcaggccctgcctccaagaagggccaagcgatctggatctggagcaacaaacttctcactactcaaacaagcaggtgacgtggaggagaatcccgggcctactagtatggactggatttggcgcatccttttccttgtcggcgctgctaccggcgcccattccgggccccaggttcagctgcaagagtctggcggaggacttgctcaagctggcggaagcctgagactgtcttgtgccgcctctggcagaaccttcagcatgggctggtttagacaggcccctggcaaagagagagagttcgtcgccgccatcacatacagcggcggcagcccttactacgcctcttctgtcagaggccggttcaccatcagccgggacaacgccaagaacaccgtgtacctccagatgaacagcctgaagccagaggacaccgccgtgtactactgtgccgccaatccaacctacggcagcgactggaatgccgagaattggggccagggcacccaagtgacagtgtctagtggatccggcggcggaggatctggcggaggcggatctgggggcggaggctctttcgaacaagttcagcttcaacagcctggcgctgagctggtcaaacctggcgcttctgtgaagatgagctgcaaagccagcggctacgccttcagcagctactggatcaactggatgaagcagaaacccggccagggactcgaatggatcggccaaatctatcccggcgacggcgacaccaactacaacggcaagttcaagggcagagccacactgaccgccgatacctctagcagcacagcctacatgcagctgagcagcctgaccagcgaagatagcgccgtgtacttctgtgcccggtccatcacaacagtcgtgggctgcgctatggactattggggccagggaacaagcgtgaccgtgtctagtgcctctacaaagggaccctccgtgtttcctctggctcccagcagcaagtctacaagcggaggaacagccgctctgggctgcctggtcaaggattactttcccgagcctgtgaccgtgtcctggaatagcggagcactgacaagcggcgtgcacacctttccagccgtgctgcaaagcagcggcctgtactctctgagcagcgtggtcacagtgcctagctctagcctgggcacccagacctacatctgcaatgtgaaccacaagcctagcaacaccaaggtggacaagagagtggaacccaagagctgtggtacccagagttttgggttgttggaccctaaattgtgctatctgttggacggaatcctgttcatttacggagtgatcctgaccgcattgttcctgcgggttaagttttccagatccgcagacgcacccgcttaccaacaagggcagaaccaactctacaatgaacttaatttggggcggagggaagagtacgacgttctggacaaaaggaggggacgagatcccgagatgggcggaaagcctcagcgaaggaagaatccgcaagaggggctttataacgaactccagaaagataaaatggcagaagcctatagtgagattgggatgaagggagaaaggaggaggggtaaaggtcacgatgggttgtaccaaggattgagcacagccactaaagatacctatgatgcgctccacatgcaggccctgccgccaagacgcgccaagagaagcggatctggcgtgaagcagaccctgaatttcgacctgctgaagctggctggcgacgtggaatccaacccaggcccttctagaggccatatgaccgagtacaagcccacggtgcgcctcgccacccgcgacgacgtccccagggccgtacgcaccctcgccgccgcgttcgccgactaccccgccacgcgccacaccgtcgatccggaccgccacatcgagcgggtcaccgagctgcaagaactcttcctcacgcgcgtcgggctcgacatcggcaaggtgtgggtcgcggacgacggcgccgcggtggcggtctggaccacgccggagagcgtcgaagcgggggcggtgttcgccgagatcggcccgcgcatggccgagttgagcggttcccggctggccgcgcagcaacagatggaaggcctcctggcgccgcaccggcccaaggagcccgcgtggttcctggccaccgtcggcgtctcgcccgaccaccagggcaagggtctgggcagcgccgtcgtgctccccggagtggaggcggccgagcgcgccggggtgcccgccttcctggagacctccgcgccccgcaacctccccttctacgagcggctcggcttcaccgtcaccgccgacgtcgaggtgcccgaaggaccgcgcacctggtgcatgacccgcaagcccggtgcctga

SEQ ID NO: 5060 - DNA, 3291 bp, Artificial Sequence
  Synthetic Polynucloetide
atggccttaccagtgaccgccttgctcctgccgctggccttgctgctccacgccgccaggccgcaggtccagctcgtcgagtccggcggcggcctcgtccaggccggcgactccgtcaccctctcctgcaccgcctccggccgcaccttctcctcctacgccctcgcctggttccgccagcgccccggcaaggagcgcgagttcgtcgccggcctccgctggggcggccccaccaactacgccgactccgtcaaggaccgcttcaccatctccggcgactccgccaagcacaccatgtacctccagatgaactccctcaagcccgaggacaccgccgtctactactgcggctacaaccccggcggctgggccgtcccctcccagtacgagtacgactcctggggccagggcacccaggtcaccgtctcctccggtaccggcggaggcggatctggcggcggaggtagcggtggcggaggatctgaattcgacatccagatgacacagagccctagcagcctgtctgccagcgtgggagacagagtgaccatcacatgcaaggccagcgaccacatcaacaactggctggcctggtatcagcagaagcctggacaggcccctaagctgctgatctacggcgctaccacactggaaacaggcgtgcccagcagattttctggcagcggctctggcaccgactacaccctgacaatatccagcctccagcctgaggacttcgccacctactactgtcagcagagctggaacaccccttggacattcggccagggcaccaagctggaaatcaagagactcgaggacctgaagaacgtgttcccacctgaggtggccgtgttcgagcctagcgaggccgagatcagccacacccagaaagccaccctcgtgtgcctggctaccggcttctaccccgaccatgtggaactgtcttggtgggtcaacggcaaagaggtgcacagcggcgtgtctaccgacccccagccactgaaagaacagcccgccctgaacgacagccggtactgcctgagcagcagactgagagtgtccgccaccttctggcagaacccccggaaccacttcagatgccaggtgcagttctacggcctgagcgagaacgacgagtggacccaggacagagccaagcccgtgacccagatcgtgtctgccgaagcctggggcagagccgattgcggatcccagagcttcggcctgctggaccccaagctgtgctacctgctggatggcatcctgttcatctacggcgtgatcctgaccgccctgttcctgagagtgaagttcagcagaagcgccgacgcccctgcctaccagcagggacagaaccaactgtacaacgagctgaacctgggcagacgggaagagtacgacgtgctggacaagcggagaggcagggaccctgagatgggcggaaagccccagcggagaaagaacccccaggaaggactgtataacgaactccagaaagacaagatggccgaagcctacagcgagatcggcatgaagggcgagcggagaagaggcaagggccacgatggcctgtaccagggcctgagcaccgccaccaaggacacctatgacgccctgcacatgcaggccctgcctccaagaagggccaagcgatctggatctggagcaacaaacttctcactactcaaacaagcaggtgacgtggaggagaatcccgggcctactagtatggactggatttggcgcatccttttccttgtcggcgctgctaccggcgcccattccgggccccaggttcagctgcaagagtctggcggaggacttgctcaagctggcggaagcctgagactgtcttgtgccgcctctggcagaaccttcagcatgggctggtttagacaggcccctggcaaagagagagagttcgtcgccgccatcacatacagcggcggcagcccttactacgcctcttctgtcagaggccggttcaccatcagccgggacaacgccaagaacaccgtgtacctccagatgaacagcctgaagccagaggacaccgccgtgtactactgtgccgccaatccaacctacggcagcgactggaatgccgagaattggggccagggcacccaagtgacagtgtctagtggatccggcggcggaggatctggcggaggcggatctgggggcggaggctctttcgaacaagttcagcttcaacagcctggcgctgagctggtcaaacctggcgcttctgtgaagatgagctgcaaagccagcggctacgccttcagcagctactggatcaactggatgaagcagaaacccggccagggactcgaatggatcggccaaatctatcccggcgacggcgacaccaactacaacggcaagttcaagggcagagccacactgaccgccgatacctctagcagcacagcctacatgcagctgagcagcctgaccagcgaagatagcgccgtgtacttctgtgcccggtccatcacaacagtcgtgggctgcgctatggactattggggccagggaacaagcgtgaccgtgtctagtacgcgtatccagaaccctgatcctgccgtgtaccagctgcgggatagcaagagcagcgacaagagcgtgtgtctgttcaccgacttcgacagccagaccaacgtgtcccagagcaaggactccgacgtgtacatcaccgataagaccgtgctggacatgcggagcatggacttcaagagcaactccgccgtggcctggtccaacaagtccgatttcgcctgcgccaacgccttcaacaacagcattatccccgaggacacattcttcccaagccccgagagcagctgcggtacccagagttttgggttgttggaccctaaattgtgctatctgttggacggaatcctgttcatttacggagtgatcctgaccgcattgttcctgcgggttaagttttccagatccgcagacgcacccgcttaccaacaagggcagaaccaactctacaatgaacttaatttggggcggagggaagagtacgacgttctggacaaaaggaggggacgagatcccgagatgggcggaaagcctcagcgaaggaagaatccgcaagaggggctttataacgaactccagaaagataaaatggcagaagcctatagtgagattgggatgaagggagaaaggaggaggggtaaaggtcacgatgggttgtaccaaggattgagcacagccactaaagatacctatgatgcgctccacatgcaggccctgccgccaaga

SEQ ID NO: 5061 - DNA, 3291 bp, Artificial Sequence
  Synthetic Polynucloetide
atggccttaccagtgaccgccttgctcctgccgctggccttgctgctccacgccgccaggccgcaggtccagctcgtcgagtccggcggcggcctcgtccaggccggcgactccgtcaccctctcctgcaccgcctccggccgcaccttctcctcctacgccctcgcctggttccgccagcgccccggcaaggagcgcgagttcgtcgccggcctccgctggggcggccccaccaactacgccgactccgtcaaggaccgcttcaccatctccggcgactccgccaagcacaccatgtacctccagatgaactccctcaagcccgaggacaccgccgtctactactgcggctacaaccccggcggctgggccgtcccctcccagtacgagtacgactcctggggccagggcacccaggtcaccgtctcctccggtaccggcggaggcggatctggcggcggaggtagcggtggcggaggatctgaattcgacatccagatgacacagagccctagcagcctgtctgccagcgtgggagacagagtgaccatcacatgcaaggccagcgaccacatcaacaactggctggcctggtatcagcagaagcctggacaggcccctaagctgctgatctacggcgctaccacactggaaacaggcgtgcccagcagattttctggcagcggctctggcaccgactacaccctgacaatatccagcctccagcctgaggacttcgccacctactactgtcagcagagctggaacaccccttggacattcggccagggcaccaagctggaaatcaagagactcgaggacctgaagaacgtgttcccacctgaggtggccgtgttcgagcctagcaaggccgagatcgcccacacccagaaagccaccctcgtgtgcctggctaccggcttctaccccgaccatgtggaactgtcttggtgggtcaacggcaaagaggtgcacagcggcgtgtgtaccgacccccagccactgaaagaacagcccgccctgaacgacagccggtactgcctgagcagcagactgagagtgtccgccaccttctggcagaacccccggaaccacttcagatgccaggtgcagttctacggcctgagcgagaacgacgagtggacccaggacagagccaagcccgtgacccagatcgtgtctgccgaagcctggggcagagccgattgcggatcccagagcttcggcctgctggaccccaagctgtgctacctgctggatggcatcctgttcatctacggcgtgatcctgaccgccctgttcctgagagtgaagttcagcagaagcgccgacgcccctgcctaccagcagggacagaaccaactgtacaacgagctgaacctgggcagacgggaagagtacgacgtgctggacaagcggagaggcagggaccctgagatgggcggaaagccccagcggagaaagaacccccaggaaggactgtataacgaactccagaaagacaagatggccgaagcctacagcgagatcggcatgaagggcgagcggagaagaggcaagggccacgatggcctgtaccagggcctgagcaccgccaccaaggacacctatgacgccctgcacatgcaggccctgcctccaagaagggccaagcgatctggatctggagcaacaaacttctcactactcaaacaagcaggtgacgtggaggagaatcccgggcctactagtatggactggatttggcgcatccttttccttgtcggcgctgctaccggcgcccattccgggccccaggttcagctgcaagagtctggcggaggacttgctcaagctggcggaagcctgagactgtcttgtgccgcctctggcagaaccttcagcatgggctggtttagacaggcccctggcaaagagagagagttcgtcgccgccatcacatacagcggcggcagcccttactacgcctcttctgtcagaggccggttcaccatcagccgggacaacgccaagaacaccgtgtacctccagatgaacagcctgaagccagaggacaccgccgtgtactactgtgccgccaatccaacctacggcagcgactggaatgccgagaattggggccagggcacccaagtgacagtgtctagtggatccggcggcggaggatctggcggaggcggatctgggggcggaggctctttcgaacaagttcagcttcaacagcctggcgctgagctggtcaaacctggcgcttctgtgaagatgagctgcaaagccagcggctacgccttcagcagctactggatcaactggatgaagcagaaacccggccagggactcgaatggatcggccaaatctatcccggcgacggcgacaccaactacaacggcaagttcaagggcagagccacactgaccgccgatacctctagcagcacagcctacatgcagctgagcagcctgaccagcgaagatagcgccgtgtacttctgtgcccggtccatcacaacagtcgtgggctgcgctatggactattggggccagggaacaagcgtgaccgtgtctagtacgcgtatccagaaccctgatcctgccgtgtaccagctgcgggatagcaagagcagcgacaagagcgtgtgtctgttcaccgacttcgacagccagaccaacgtgtcccagagcaaggactccgacgtgtacatcaccgataagtgcgtgctggacatgcggagcatggacttcaagagcaactccgccgtggcctggtccaacaagtccgatttcgcctgcgccaacgccttcaacaacagcattatccccgaggacacattcttcccaagcagcgacgtgccctgcggtacccagagttttgggttgttggaccctaaattgtgctatctgttggacggaatcctgttcatttacggagtgatcctgaccgcattgttcctgcgggttaagttttccagatccgcagacgcacccgcttaccaacaagggcagaaccaactctacaatgaacttaatttggggcggagggaagagtacgacgttctggacaaaaggaggggacgagatcccgagatgggcggaaagcctcagcgaaggaagaatccgcaagaggggctttataacgaactccagaaagataaaatggcagaagcctatagtgagattgggatgaagggagaaaggaggaggggtaaaggtcacgatgggttgtaccaaggattgagcacagccactaaagatacctatgatgcgctccacatgcaggccctgccgccaaga

SEQ ID NO: 5062 - DNA, 3504 bp, Artificial Sequence
  Synthetic Polynucloetide
atggccttaccagtgaccgccttgctcctgccgctggccttgctgctccacgccgccaggccgcaggtccagctcgtcgagtccggcggcggcctcgtccaggccggcgactccgtcaccctctcctgcaccgcctccggccgcaccttctcctcctacgccctcgcctggttccgccagcgccccggcaaggagcgcgagttcgtcgccggcctccgctggggcggccccaccaactacgccgactccgtcaaggaccgcttcaccatctccggcgactccgccaagcacaccatgtacctccagatgaactccctcaagcccgaggacaccgccgtctactactgcggctacaaccccggcggctgggccgtcccctcccagtacgagtacgactcctggggccagggcacccaggtcaccgtctcctccggtaccggcggaggcggatctggcggcggaggtagcggtggcggaggatctgaattcgacatccagatgacacagagccctagcagcctgtctgccagcgtgggagacagagtgaccatcacatgcaaggccagcgaccacatcaacaactggctggcctggtatcagcagaagcctggacaggcccctaagctgctgatctacggcgctaccacactggaaacaggcgtgcccagcagattttctggcagcggctctggcaccgactacaccctgacaatatccagcctccagcctgaggacttcgccacctactactgtcagcagagctggaacaccccttggacattcggccagggcaccaagctggaaatcaagagactcgaggggaaaccaattcccaaccctcttctgggactggattcaaccggcagcggcgaggacctgaagaacgtgttcccacctgaggtggccgtgttcgagcctagcgaggccgagatcagccacacccagaaagccaccctcgtgtgcctggctaccggcttctaccccgaccatgtggaactgtcttggtgggtcaacggcaaagaggtgcacagcggcgtgtctaccgacccccagccactgaaagaacagcccgccctgaacgacagccggtactgcctgagcagcagactgagagtgtccgccaccttctggcagaacccccggaaccacttcagatgccaggtgcagttctacggcctgagcgagaacgacgagtggacccaggacagagccaagcccgtgacccagatcgtgtctgccgaagcctggggcagagccgattgcggatcccagagcttcggcctgctggaccccaagctgtgctacctgctggatggcatcctgttcatctacggcgtgatcctgaccgccctgttcctgagagtgaagttcagcagaagcgccgacgcccctgcctaccagcagggacagaaccaactgtacaacgagctgaacctgggcagacgggaagagtacgacgtgctggacaagcggagaggcagggaccctgagatgggcggaaagccccagcggagaaagaacccccaggaaggactgtataacgaactccagaaagacaagatggccgaagcctacagcgagatcggcatgaagggcgagcggagaagaggcaagggccacgatggcctgtaccagggcctgagcaccgccaccaaggacacctatgacgccctgcacatgcaggccctgcctccaagaagggccaagcgatctggatctggagcaacaaacttctcactactcaaacaagcaggtgacgtggaggagaatcccgggcctactagtatggactggatttggcgcatccttttccttgtcggcgctgctaccggcgcccattccgggccccaggttcagctgcaagagtctggcggaggacttgctcaagctggcggaagcctgagactgtcttgtgccgcctctggcagaaccttcagcatgggctggtttagacaggcccctggcaaagagagagagttcgtcgccgccatcacatacagcggcggcagcccttactacgcctcttctgtcagaggccggttcaccatcagccgggacaacgccaagaacaccgtgtacctccagatgaacagcctgaagccagaggacaccgccgtgtactactgtgccgccaatccaacctacggcagcgactggaatgccgagaattggggccagggcacccaagtgacagtgtctagtggatccggcggcggaggatctggcggaggcggatctgggggcggaggctctttcgaacaagttcagcttcaacagcctggcgctgagctggtcaaacctggcgcttctgtgaagatgagctgcaaagccagcggctacgccttcagcagctactggatcaactggatgaagcagaaacccggccagggactcgaatggatcggccaaatctatcccggcgacggcgacaccaactacaacggcaagttcaagggcagagccacactgaccgccgatacctctagcagcacagcctacatgcagctgagcagcctgaccagcgaagatagcgccgtgtacttctgtgcccggtccatcacaacagtcgtgggctgcgctatggactattggggccagggaacaagcgtgaccgtgtctagtacgcgtgagcagaaactgatctcggaagaggatgggagcggcatccagaaccctgatcctgccgtgtaccagctgcgggatagcaagagcagcgacaagagcgtgtgtctgttcaccgacttcgacagccagaccaacgtgtcccagagcaaggactccgacgtgtacatcaccgataagaccgtgctggacatgcggagcatggacttcaagagcaactccgccgtggcctggtccaacaagtccgatttcgcctgcgccaacgccttcaacaacagcattatccccgaggacacattcttcccaagccccgagagcagctgcggtacccagagttttgggttgttggaccctaaattgtgctatctgttggacggaatcctgttcatttacggagtgatcctgaccgcattgttcctgaggagcaagcggtcacggctgctccacagcgattacatgaatatgacaccacgaagaccgggtcctactcgcaaacactaccaaccctacgcacctccccgcgactttgcagcgtaccgatctcgggttaagttttccagatccgcagacgcacccgcttaccaacaagggcagaaccaactctacaatgaacttaatttggggcggagggaagagtacgacgttctggacaaaaggaggggacgagatcccgagatgggcggaaagcctcagcgaaggaagaatccgcaagaggggctttataacgaactccagaaagataaaatggcagaagcctatagtgagattgggatgaagggagaaaggaggaggggtaaaggtcacgatgggttgtaccaaggattgagcacagccactaaagatacctatgatgcgctccacatgcaggccctgccgccaaga

SEQ ID NO: 5063 - DNA, 3627 bp, Artificial Sequence
  Synthetic Polynucloetide
atggccttaccagtgaccgccttgctcctgccgctggccttgctgctccacgccgccaggccgcaggtccagctcgtcgagtccggcggcggcctcgtccaggccggcgactccgtcaccctctcctgcaccgcctccggccgcaccttctcctcctacgccctcgcctggttccgccagcgccccggcaaggagcgcgagttcgtcgccggcctccgctggggcggccccaccaactacgccgactccgtcaaggaccgcttcaccatctccggcgactccgccaagcacaccatgtacctccagatgaactccctcaagcccgaggacaccgccgtctactactgcggctacaaccccggcggctgggccgtcccctcccagtacgagtacgactcctggggccagggcacccaggtcaccgtctcctccggtaccggcggaggcggatctggcggcggaggtagcggtggcggaggatctgaattcgacatccagatgacacagagccctagcagcctgtctgccagcgtgggagacagagtgaccatcacatgcaaggccagcgaccacatcaacaactggctggcctggtatcagcagaagcctggacaggcccctaagctgctgatctacggcgctaccacactggaaacaggcgtgcccagcagattttctggcagcggctctggcaccgactacaccctgacaatatccagcctccagcctgaggacttcgccacctactactgtcagcagagctggaacaccccttggacattcggccagggcaccaagctggaaatcaagagactcgaggggaaaccaattcccaaccctcttctgggactggattcaaccggcagcggcgaggacctgaagaacgtgttcccacctgaggtggccgtgttcgagcctagcgaggccgagatcagccacacccagaaagccaccctcgtgtgcctggctaccggcttctaccccgaccatgtggaactgtcttggtgggtcaacggcaaagaggtgcacagcggcgtgtctaccgacccccagccactgaaagaacagcccgccctgaacgacagccggtactgcctgagcagcagactgagagtgtccgccaccttctggcagaacccccggaaccacttcagatgccaggtgcagttctacggcctgagcgagaacgacgagtggacccaggacagagccaagcccgtgacccagatcgtgtctgccgaagcctggggcagagccgattgcggatcccagagcttcggcctgctggaccccaagctgtgctacctgctggatggcatcctgttcatctacggcgtgatcctgaccgccctgttcctgaggagtaagaggagcaggctcctgcacagtgactacatgaacatgactccacgccgccccggacccacccgcaagcattaccagccctatgccccaccacgcgacttcgcagcctatcgctccagagtgaagttcagcagaagcgccgacgcccctgcctaccagcagggacagaaccaactgtacaacgagctgaacctgggcagacgggaagagtacgacgtgctggacaagcggagaggcagggaccctgagatgggcggaaagccccagcggagaaagaacccccaggaaggactgtataacgaactccagaaagacaagatggccgaagcctacagcgagatcggcatgaagggcgagcggagaagaggcaagggccacgatggcctgtaccagggcctgagcaccgccaccaaggacacctatgacgccctgcacatgcaggccctgcctccaagaagggccaagcgatctggatctggagcaacaaacttctcactactcaaacaagcaggtgacgtggaggagaatcccgggcctactagtatggactggatttggcgcatccttttccttgtcggcgctgctaccggcgcccattccgggccccaggttcagctgcaagagtctggcggaggacttgctcaagctggcggaagcctgagactgtcttgtgccgcctctggcagaaccttcagcatgggctggtttagacaggcccctggcaaagagagagagttcgtcgccgccatcacatacagcggcggcagcccttactacgcctcttctgtcagaggccggttcaccatcagccgggacaacgccaagaacaccgtgtacctccagatgaacagcctgaagccagaggacaccgccgtgtactactgtgccgccaatccaacctacggcagcgactggaatgccgagaattggggccagggcacccaagtgacagtgtctagtggatccggcggcggaggatctggcggaggcggatctgggggcggaggctctttcgaacaagttcagcttcaacagcctggcgctgagctggtcaaacctggcgcttctgtgaagatgagctgcaaagccagcggctacgccttcagcagctactggatcaactggatgaagcagaaacccggccagggactcgaatggatcggccaaatctatcccggcgacggcgacaccaactacaacggcaagttcaagggcagagccacactgaccgccgatacctctagcagcacagcctacatgcagctgagcagcctgaccagcgaagatagcgccgtgtacttctgtgcccggtccatcacaacagtcgtgggctgcgctatggactattggggccagggaacaagcgtgaccgtgtctagtacgcgtgagcagaaactgatctcggaagaggatgggagcggcatccagaaccctgatcctgccgtgtaccagctgcgggatagcaagagcagcgacaagagcgtgtgtctgttcaccgacttcgacagccagaccaacgtgtcccagagcaaggactccgacgtgtacatcaccgataagaccgtgctggacatgcggagcatggacttcaagagcaactccgccgtggcctggtccaacaagtccgatttcgcctgcgccaacgccttcaacaacagcattatccccgaggacacattcttcccaagccccgagagcagctgcggtacccagagttttgggttgttggaccctaaattgtgctatctgttggacggaatcctgttcatttacggagtgatcctgaccgcattgttcctgaggagcaagcggtcacggctgctccacagcgattacatgaatatgacaccacgaagaccgggtcctactcgcaaacactaccaaccctacgcacctccccgcgactttgcagcgtaccgatctcgggttaagttttccagatccgcagacgcacccgcttaccaacaagggcagaaccaactctacaatgaacttaatttggggcggagggaagagtacgacgttctggacaaaaggaggggacgagatcccgagatgggcggaaagcctcagcgaaggaagaatccgcaagaggggctttataacgaactccagaaagataaaatggcagaagcctatagtgagattgggatgaagggagaaaggaggaggggtaaaggtcacgatgggttgtaccaaggattgagcacagccactaaagatacctatgatgcgctccacatgcaggccctgccgccaaga

SEQ ID NO: 5064 - DNA, 3510 bp, Artificial Sequence
  Synthetic Polynucloetide
atggccttaccagtgaccgccttgctcctgccgctggccttgctgctccacgccgccaggccgcaggtccagctcgtcgagtccggcggcggcctcgtccaggccggcgactccgtcaccctctcctgcaccgcctccggccgcaccttctcctcctacgccctcgcctggttccgccagcgccccggcaaggagcgcgagttcgtcgccggcctccgctggggcggccccaccaactacgccgactccgtcaaggaccgcttcaccatctccggcgactccgccaagcacaccatgtacctccagatgaactccctcaagcccgaggacaccgccgtctactactgcggctacaaccccggcggctgggccgtcccctcccagtacgagtacgactcctggggccagggcacccaggtcaccgtctcctccggtaccggcggaggcggatctggcggcggaggtagcggtggcggaggatctgaattcgacatccagatgacacagagccctagcagcctgtctgccagcgtgggagacagagtgaccatcacatgcaaggccagcgaccacatcaacaactggctggcctggtatcagcagaagcctggacaggcccctaagctgctgatctacggcgctaccacactggaaacaggcgtgcccagcagattttctggcagcggctctggcaccgactacaccctgacaatatccagcctccagcctgaggacttcgccacctactactgtcagcagagctggaacaccccttggacattcggccagggcaccaagctggaaatcaagagactcgaggggaaaccaattcccaaccctcttctgggactggattcaaccggcagcggcgaggacctgaagaacgtgttcccacctgaggtggccgtgttcgagcctagcgaggccgagatcagccacacccagaaagccaccctcgtgtgcctggctaccggcttctaccccgaccatgtggaactgtcttggtgggtcaacggcaaagaggtgcacagcggcgtgtctaccgacccccagccactgaaagaacagcccgccctgaacgacagccggtactgcctgagcagcagactgagagtgtccgccaccttctggcagaacccccggaaccacttcagatgccaggtgcagttctacggcctgagcgagaacgacgagtggacccaggacagagccaagcccgtgacccagatcgtgtctgccgaagcctggggcagagccgattgcggatcccagagcttcggcctgctggaccccaagctgtgctacctgctggatggcatcctgttcatctacggcgtgatcctgaccgccctgttcctgagagtgaagttcagcagaagcgccgacgcccctgcctaccagcagggacagaaccaactgtacaacgagctgaacctgggcagacgggaagagtacgacgtgctggacaagcggagaggcagggaccctgagatgggcggaaagccccagcggagaaagaacccccaggaaggactgtataacgaactccagaaagacaagatggccgaagcctacagcgagatcggcatgaagggcgagcggagaagaggcaagggccacgatggcctgtaccagggcctgagcaccgccaccaaggacacctatgacgccctgcacatgcaggccctgcctccaagaagggccaagcgatctggatctggagcaacaaacttctcactactcaaacaagcaggtgacgtggaggagaatcccgggcctactagtatggactggatttggcgcatccttttccttgtcggcgctgctaccggcgcccattccgggccccaggttcagctgcaagagtctggcggaggacttgctcaagctggcggaagcctgagactgtcttgtgccgcctctggcagaaccttcagcatgggctggtttagacaggcccctggcaaagagagagagttcgtcgccgccatcacatacagcggcggcagcccttactacgcctcttctgtcagaggccggttcaccatcagccgggacaacgccaagaacaccgtgtacctccagatgaacagcctgaagccagaggacaccgccgtgtactactgtgccgccaatccaacctacggcagcgactggaatgccgagaattggggccagggcacccaagtgacagtgtctagtggatccggcggcggaggatctggcggaggcggatctgggggcggaggctctttcgaacaagttcagcttcaacagcctggcgctgagctggtcaaacctggcgcttctgtgaagatgagctgcaaagccagcggctacgccttcagcagctactggatcaactggatgaagcagaaacccggccagggactcgaatggatcggccaaatctatcccggcgacggcgacaccaactacaacggcaagttcaagggcagagccacactgaccgccgatacctctagcagcacagcctacatgcagctgagcagcctgaccagcgaagatagcgccgtgtacttctgtgcccggtccatcacaacagtcgtgggctgcgctatggactattggggccagggaacaagcgtgaccgtgtctagtacgcgtgagcagaaactgatctcggaagaggatctggggagcggcatccagaaccctgatcctgccgtgtaccagctgcgggatagcaagagcagcgacaagagcgtgtgtctgttcaccgacttcgacagccagaccaacgtgtcccagagcaaggactccgacgtgtacatcaccgataagaccgtgctggacatgcggagcatggacttcaagagcaactccgccgtggcctggtccaacaagtccgatttcgcctgcgccaacgccttcaacaacagcattatccccgaggacacattcttcccaagccccgagagcagctgcggtacccagagttttgggttgttggaccctaaattgtgctatctgttggacggaatcctgttcatttacggagtgatcctgaccgcattgttcctgaagagaggccggaagaagctgctgtacatcttcaagcagcctttcatgcggcccgtgcagaccacccaggaagaggacggctgctcctgccggttccccgaggaagaagaaggcggctgcgagctgcgggttaagttttccagatccgcagacgcacccgcttaccaacaagggcagaaccaactctacaatgaacttaatttggggcggagggaagagtacgacgttctggacaaaaggaggggacgagatcccgagatgggcggaaagcctcagcgaaggaagaatccgcaagaggggctttataacgaactccagaaagataaaatggcagaagcctatagtgagattgggatgaagggagaaaggaggaggggtaaaggtcacgatgggttgtaccaaggattgagcacagccactaaagatacctatgatgcgctccacatgcaggccctgccgccaaga

SEQ ID NO: 5065 - DNA, 3636 bp, Artificial Sequence
  Synthetic Polynucloetide
atggccttaccagtgaccgccttgctcctgccgctggccttgctgctccacgccgccaggccgcaggtccagctcgtcgagtccggcggcggcctcgtccaggccggcgactccgtcaccctctcctgcaccgcctccggccgcaccttctcctcctacgccctcgcctggttccgccagcgccccggcaaggagcgcgagttcgtcgccggcctccgctggggcggccccaccaactacgccgactccgtcaaggaccgcttcaccatctccggcgactccgccaagcacaccatgtacctccagatgaactccctcaagcccgaggacaccgccgtctactactgcggctacaaccccggcggctgggccgtcccctcccagtacgagtacgactcctggggccagggcacccaggtcaccgtctcctccggtaccggcggaggcggatctggcggcggaggtagcggtggcggaggatctgaattcgacatccagatgacacagagccctagcagcctgtctgccagcgtgggagacagagtgaccatcacatgcaaggccagcgaccacatcaacaactggctggcctggtatcagcagaagcctggacaggcccctaagctgctgatctacggcgctaccacactggaaacaggcgtgcccagcagattttctggcagcggctctggcaccgactacaccctgacaatatccagcctccagcctgaggacttcgccacctactactgtcagcagagctggaacaccccttggacattcggccagggcaccaagctggaaatcaagagactcgaggggaaaccaattcccaaccctcttctgggactggattcaaccggcagcggcgaggacctgaagaacgtgttcccacctgaggtggccgtgttcgagcctagcgaggccgagatcagccacacccagaaagccaccctcgtgtgcctggctaccggcttctaccccgaccatgtggaactgtcttggtgggtcaacggcaaagaggtgcacagcggcgtgtctaccgacccccagccactgaaagaacagcccgccctgaacgacagccggtactgcctgagcagcagactgagagtgtccgccaccttctggcagaacccccggaaccacttcagatgccaggtgcagttctacggcctgagcgagaacgacgagtggacccaggacagagccaagcccgtgacccagatcgtgtctgccgaagcctggggcagagccgattgcggatcccagagcttcggcctgctggaccccaagctgtgctacctgctggatggcatcctgttcatctacggcgtgatcctgaccgccctgttcctgaaacggggcagaaagaaactcctgtatatattcaaacaaccatttatgagaccagtacaaactactcaagaggaagatggctgtagctgccgatttccagaagaagaagaaggaggatgtgaactgagagtgaagttcagcagaagcgccgacgcccctgcctaccagcagggacagaaccaactgtacaacgagctgaacctgggcagacgggaagagtacgacgtgctggacaagcggagaggcagggaccctgagatgggcggaaagccccagcggagaaagaacccccaggaaggactgtataacgaactccagaaagacaagatggccgaagcctacagcgagatcggcatgaagggcgagcggagaagaggcaagggccacgatggcctgtaccagggcctgagcaccgccaccaaggacacctatgacgccctgcacatgcaggccctgcctccaagaagggccaagcgatctggatctggagcaacaaacttctcactactcaaacaagcaggtgacgtggaggagaatcccgggcctactagtatggactggatttggcgcatccttttccttgtcggcgctgctaccggcgcccattccgggccccaggttcagctgcaagagtctggcggaggacttgctcaagctggcggaagcctgagactgtcttgtgccgcctctggcagaaccttcagcatgggctggtttagacaggcccctggcaaagagagagagttcgtcgccgccatcacatacagcggcggcagcccttactacgcctcttctgtcagaggccggttcaccatcagccgggacaacgccaagaacaccgtgtacctccagatgaacagcctgaagccagaggacaccgccgtgtactactgtgccgccaatccaacctacggcagcgactggaatgccgagaattggggccagggcacccaagtgacagtgtctagtggatccggcggcggaggatctggcggaggcggatctgggggcggaggctctttcgaacaagttcagcttcaacagcctggcgctgagctggtcaaacctggcgcttctgtgaagatgagctgcaaagccagcggctacgccttcagcagctactggatcaactggatgaagcagaaacccggccagggactcgaatggatcggccaaatctatcccggcgacggcgacaccaactacaacggcaagttcaagggcagagccacactgaccgccgatacctctagcagcacagcctacatgcagctgagcagcctgaccagcgaagatagcgccgtgtacttctgtgcccggtccatcacaacagtcgtgggctgcgctatggactattggggccagggaacaagcgtgaccgtgtctagtacgcgtgagcagaaactgatctcggaagaggatctggggagcggcatccagaaccctgatcctgccgtgtaccagctgcgggatagcaagagcagcgacaagagcgtgtgtctgttcaccgacttcgacagccagaccaacgtgtcccagagcaaggactccgacgtgtacatcaccgataagaccgtgctggacatgcggagcatggacttcaagagcaactccgccgtggcctggtccaacaagtccgatttcgcctgcgccaacgccttcaacaacagcattatccccgaggacacattcttcccaagccccgagagcagctgcggtacccagagttttgggttgttggaccctaaattgtgctatctgttggacggaatcctgttcatttacggagtgatcctgaccgcattgttcctgaagagaggccggaagaagctgctgtacatcttcaagcagcctttcatgcggcccgtgcagaccacccaggaagaggacggctgctcctgccggttccccgaggaagaagaaggcggctgcgagctgcgggttaagttttccagatccgcagacgcacccgcttaccaacaagggcagaaccaactctacaatgaacttaatttggggcggagggaagagtacgacgttctggacaaaaggaggggacgagatcccgagatgggcggaaagcctcagcgaaggaagaatccgcaagaggggctttataacgaactccagaaagataaaatggcagaagcctatagtgagattgggatgaagggagaaaggaggaggggtaaaggtcacgatgggttgtaccaaggattgagcacagccactaaagatacctatgatgcgctccacatgcaggccctgccgccaaga

SEQ ID NO: 5066 - DNA, 3309 bp, Artificial Sequence
  Synthetic Polynucloetide
atggccttaccagtgaccgccttgctcctgccgctggccttgctgctccacgccgccaggccgcaggtccagctcgtcgagtccggcggcggcctcgtccaggccggcgactccgtcaccctctcctgcaccgcctccggccgcaccttctcctcctacgccctcgcctggttccgccagcgccccggcaaggagcgcgagttcgtcgccggcctccgctggggcggccccaccaactacgccgactccgtcaaggaccgcttcaccatctccggcgactccgccaagcacaccatgtacctccagatgaactccctcaagcccgaggacaccgccgtctactactgcggctacaaccccggcggctgggccgtcccctcccagtacgagtacgactcctggggccagggcacccaggtcaccgtctcctccggtaccggcggaggcggatctggcggcggaggtagcggtggcggaggatctgaattcgacatccagatgacacagagccctagcagcctgtctgccagcgtgggagacagagtgaccatcacatgcaaggccagcgaccacatcaacaactggctggcctggtatcagcagaagcctggacaggcccctaagctgctgatctacggcgctaccacactggaaacaggcgtgcccagcagattttctggcagcggctctggcaccgactacaccctgacaatatccagcctccagcctgaggacttcgccacctactactgtcagcagagctggaacaccccttggacattcggccagggcaccaagctggaaatcaagagactcgagcagagcttcggcctgctggaccccaagctgtgctacctgctggatggcatcctgttcatctacggcgtgatcctgaccgccctgttcctgagagtgaagttcagcagaagcgccgacgcccctgcctaccagcagggacagaaccaactgtacaacgagctgaacctgggcagacgggaagagtacgacgtgctggacaagcggagaggcagggaccctgagatgggcggaaagccccagcggagaaagaacccccaggaaggactgtataacgaactccagaaagacaagatggccgaagcctacagcgagatcggcatgaagggcgagcggagaagaggcaagggccacgatggcctgtaccagggcctgagcaccgccaccaaggacacctatgacgccctgcacatgcaggccctgcctccaagaagggccaagcgatctggatctggagcaacaaacttctcactactcaaacaagcaggtgacgtggaggagaatcccgggcctactagtatggactggatttggcgcatccttttccttgtcggcgctgctaccggcgcccattccgggccccaggttcagctgcaagagtctggcggaggacttgctcaagctggcggaagcctgagactgtcttgtgccgcctctggcagaaccttcagcatgggctggtttagacaggcccctggcaaagagagagagttcgtcgccgccatcacatacagcggcggcagcccttactacgcctcttctgtcagaggccggttcaccatcagccgggacaacgccaagaacaccgtgtacctccagatgaacagcctgaagccagaggacaccgccgtgtactactgtgccgccaatccaacctacggcagcgactggaatgccgagaattggggccagggcacccaagtgacagtgtctagtggatccggcggcggaggatctggcggaggcggatctgggggcggaggctctttcgaacaagttcagcttcaacagcctggcgctgagctggtcaaacctggcgcttctgtgaagatgagctgcaaagccagcggctacgccttcagcagctactggatcaactggatgaagcagaaacccggccagggactcgaatggatcggccaaatctatcccggcgacggcgacaccaactacaacggcaagttcaagggcagagccacactgaccgccgatacctctagcagcacagcctacatgcagctgagcagcctgaccagcgaagatagcgccgtgtacttctgtgcccggtccatcacaacagtcgtgggctgcgctatggactattggggccagggaacaagcgtgaccgtgtctagtacgcgtcagagttttgggttgttggaccctaaattgtgctatctgttggacggaatcctgttcatttacggagtgatcctgaccgcattgttcctgcgggttaagttttccagatccgcagacgcacccgcttaccaacaagggcagaaccaactctacaatgaacttaatttggggcggagggaagagtacgacgttctggacaaaaggaggggacgagatcccgagatgggcggaaagcctcagcgaaggaagaatccgcaagaggggctttataacgaactccagaaagataaaatggcagaagcctatagtgagattgggatgaagggagaaaggaggaggggtaaaggtcacgatgggttgtaccaaggattgagcacagccactaaagatacctatgatgcgctccacatgcaggccctgccgccaagacgcgccaagagaagcggatctggcgtgaagcagaccctgaatttcgacctgctgaagctggctggcgacgtggaatccaacccaggcccttctagaggccatatgaccgagtacaagcccacggtgcgcctcgccacccgcgacgacgtccccagggccgtacgcaccctcgccgccgcgttcgccgactaccccgccacgcgccacaccgtcgatccggaccgccacatcgagcgggtcaccgagctgcaagaactcttcctcacgcgcgtcgggctcgacatcggcaaggtgtgggtcgcggacgacggcgccgcggtggcggtctggaccacgccggagagcgtcgaagcgggggcggtgttcgccgagatcggcccgcgcatggccgagttgagcggttcccggctggccgcgcagcaacagatggaaggcctcctggcgccgcaccggcccaaggagcccgcgtggttcctggccaccgtcggcgtctcgcccgaccaccagggcaagggtctgggcagcgccgtcgtgctccccggagtggaggcggccgagcgcgccggggtgcccgccttcctggagacctccgcgccccgcaacctccccttctacgagcggctcggcttcaccgtcaccgccgacgtcgaggtgcccgaaggaccgcgcacctggtgcatgacccgcaagcccggtgcctga

SEQ ID NO: 5067 - DNA, 2781 bp, Artificial Sequence
  Synthetic Polynucloetide
atggccttaccagtgaccgccttgctcctgccgctggccttgctgctccacgccgccaggccgcaggtccagctcgtcgagtccggcggcggcctcgtccaggccggcgactccgtcaccctctcctgcaccgcctccggccgcaccttctcctcctacgccctcgcctggttccgccagcgccccggcaaggagcgcgagttcgtcgccggcctccgctggggcggccccaccaactacgccgactccgtcaaggaccgcttcaccatctccggcgactccgccaagcacaccatgtacctccagatgaactccctcaagcccgaggacaccgccgtctactactgcggctacaaccccggcggctgggccgtcccctcccagtacgagtacgactcctggggccagggcacccaggtcaccgtctcctccggtaccggcggaggcggatctggcggcggaggtagcggtggcggaggatctgaattcgacatccagatgacacagagccctagcagcctgtctgccagcgtgggagacagagtgaccatcacatgcaaggccagcgaccacatcaacaactggctggcctggtatcagcagaagcctggacaggcccctaagctgctgatctacggcgctaccacactggaaacaggcgtgcccagcagattttctggcagcggctctggcaccgactacaccctgacaatatccagcctccagcctgaggacttcgccacctactactgtcagcagagctggaacaccccttggacattcggccagggcaccaagctggaaatcaagagactcgagggacagcctaaggccaatcctaccgtgacactgttccctccaagcagcgaagaactccaggccaacaaggccacacttgtgtgcctgatctccgacttctaccctggggctgtgacagtggcttggaaggccgatggatctcctgtgaaagccggcgtggaaaccaccaagccatccaagcagagcaacaacaaatacgccgccagctcctacctgagcctgacacctgagcagtggaagtcccacagatcctacagctgccaagtgacccacgaaggcagcaccgtggaaaagacagtggcccctacagagtgcagccccatcaagaccgatgtgattacaatggaccccaaggacaactgctccaaggacgccaacgataccctgctgctccagctgaccaacaccagcgcctactacatgtacttgttgctgctgctgaagtccgtggtgtacttcgccatcatcacatgctgcctgctgcggagaaccgccttctgctgcaacggcgagaagtctagggccaagcgatctggatctggagcaacaaacttctcactactcaaacaagcaggtgacgtggaggagaatcccgggcctactagtatggactggatttggcgcatccttttccttgtcggcgctgctaccggcgcccattccgggccccaggttcagctgcaagagtctggcggaggacttgctcaagctggcggaagcctgagactgtcttgtgccgcctctggcagaaccttcagcatgggctggtttagacaggcccctggcaaagagagagagttcgtcgccgccatcacatacagcggcggcagcccttactacgcctcttctgtcagaggccggttcaccatcagccgggacaacgccaagaacaccgtgtacctccagatgaacagcctgaagccagaggacaccgccgtgtactactgtgccgccaatccaacctacggcagcgactggaatgccgagaattggggccagggcacccaagtgacagtgtctagtggatccggcggcggaggatctggcggaggcggatctgggggcggaggctctttcgaacaagttcagcttcaacagcctggcgctgagctggtcaaacctggcgcttctgtgaagatgagctgcaaagccagcggctacgccttcagcagctactggatcaactggatgaagcagaaacccggccagggactcgaatggatcggccaaatctatcccggcgacggcgacaccaactacaacggcaagttcaagggcagagccacactgaccgccgatacctctagcagcacagcctacatgcagctgagcagcctgaccagcgaagatagcgccgtgtacttctgtgcccggtccatcacaacagtcgtgggctgcgctatggactattggggccagggaacaagcgtgaccgtgtctagtacgcgtgcctctacaaagggaccctccgtgtttcctctggctcccagcagcaagtctacaagcggaggaacagccgctctgggctgcctggtcaaggattactttcccgagcctgtgaccgtgtcctggaatagcggagcactgacaagcggcgtgcacacctttccagccgtgctgcaaagcagcggcctgtactctctgagcagcgtggtcacagtgcctagctctagcctgggcacccagacctacatctgcaatgtgaaccacaagcctagcaacaccaaggtggacaagagagtggaacccaagagctgtgaagtgaaaaccgactccaccgaccacgtgaagcccaaagagacagagaacaccaagcagcccagcaagagctgccacaagcccaaggccatcgtgcacaccgagaaagtgaacatgatgagcctgaccgtgctgggcctgcggatgctgttcgccaaaaccgtggccgtgaacttcctgctgaccgccaagctgttcttcctc

SEQ ID NO: 5068 - DNA, 2715 bp, Artificial Sequence
  Synthetic Polynucloetide
atggccttaccagtgaccgccttgctcctgccgctggccttgctgctccacgccgccaggccgcaggtccagctcgtcgagtccggcggcggcctcgtccaggccggcgactccgtcaccctctcctgcaccgcctccggccgcaccttctcctcctacgccctcgcctggttccgccagcgccccggcaaggagcgcgagttcgtcgccggcctccgctggggcggccccaccaactacgccgactccgtcaaggaccgcttcaccatctccggcgactccgccaagcacaccatgtacctccagatgaactccctcaagcccgaggacaccgccgtctactactgcggctacaaccccggcggctgggccgtcccctcccagtacgagtacgactcctggggccagggcacccaggtcaccgtctcctccggtaccggcggaggcggatctggcggcggaggtagcggtggcggaggatctgaattcgacatccagatgacacagagccctagcagcctgtctgccagcgtgggagacagagtgaccatcacatgcaaggccagcgaccacatcaacaactggctggcctggtatcagcagaagcctggacaggcccctaagctgctgatctacggcgctaccacactggaaacaggcgtgcccagcagattttctggcagcggctctggcaccgactacaccctgacaatatccagcctccagcctgaggacttcgccacctactactgtcagcagagctggaacaccccttggacattcggccagggcaccaagctggaaatcaagagactcgagggacagcctaaggccaatcctaccgtgacactgttccctccaagcagcgaagaactccaggccaacaaggccacacttgtgtgcctgatctccgacttctaccctggggctgtgacagtggcttggaaggccgatggatctcctgtgaaagccggcgtggaaaccaccaagccatccaagcagagcaacaacaaatacgccgccagctcctacctgagcctgacacctgagcagtggaagtcccacagatcctacagctgccaagtgacccacgaaggcagcaccgtggaaaagacagtggcccctacagagtgcagcggcagagccgattgcggcatcaccagcgccagctaccaccagggcgtgctgagcgccaccatcctgtacgagatcctgctgggcaaggccaccctgtacgccgtgctggtgtctgccctggtgctgatggctatggtcaagcggaaggacagccggggaagggccaagcgatctggatctggagcaacaaacttctcactactcaaacaagcaggtgacgtggaggagaatcccgggcctactagtatggactggatttggcgcatccttttccttgtcggcgctgctaccggcgcccattccgggccccaggttcagctgcaagagtctggcggaggacttgctcaagctggcggaagcctgagactgtcttgtgccgcctctggcagaaccttcagcatgggctggtttagacaggcccctggcaaagagagagagttcgtcgccgccatcacatacagcggcggcagcccttactacgcctcttctgtcagaggccggttcaccatcagccgggacaacgccaagaacaccgtgtacctccagatgaacagcctgaagccagaggacaccgccgtgtactactgtgccgccaatccaacctacggcagcgactggaatgccgagaattggggccagggcacccaagtgacagtgtctagtggatccggcggcggaggatctggcggaggcggatctgggggcggaggctctttcgaacaagttcagcttcaacagcctggcgctgagctggtcaaacctggcgcttctgtgaagatgagctgcaaagccagcggctacgccttcagcagctactggatcaactggatgaagcagaaacccggccagggactcgaatggatcggccaaatctatcccggcgacggcgacaccaactacaacggcaagttcaagggcagagccacactgaccgccgatacctctagcagcacagcctacatgcagctgagcagcctgaccagcgaagatagcgccgtgtacttctgtgcccggtccatcacaacagtcgtgggctgcgctatggactattggggccagggaacaagcgtgaccgtgtctagtacgcgtgcctctacaaagggaccctccgtgtttcctctggctcccagcagcaagtctacaagcggaggaacagccgctctgggctgcctggtcaaggattactttcccgagcctgtgaccgtgtcctggaatagcggagcactgacaagcggcgtgcacacctttccagccgtgctgcaaagcagcggcctgtactctctgagcagcgtggtcacagtgcctagctctagcctgggcacccagacctacatctgcaatgtgaaccacaagcctagcaacaccaaggtggacaagagagtggaacccaagagctgtatccccgaggacacattcttcccaagcagcgacgtgccctgcgacgtgaagctggtggaaaagagcttcgagacagacaccaacctgaacttccagaacctgagcgtgatcggcttcagaatcctgctgctgaaagtggccggctttaacctgctgatgaccctgcggctgtggtccagc

SEQ ID NO: 5069 - DNA, 2715 bp, Artificial Sequence
  Synthetic Polynucloetide
atggccttaccagtgaccgccttgctcctgccgctggccttgctgctccacgccgccaggccgcaggtccagctcgtcgagtccggcggcggcctcgtccaggccggcgactccgtcaccctctcctgcaccgcctccggccgcaccttctcctcctacgccctcgcctggttccgccagcgccccggcaaggagcgcgagttcgtcgccggcctccgctggggcggccccaccaactacgccgactccgtcaaggaccgcttcaccatctccggcgactccgccaagcacaccatgtacctccagatgaactccctcaagcccgaggacaccgccgtctactactgcggctacaaccccggcggctgggccgtcccctcccagtacgagtacgactcctggggccagggcacccaggtcaccgtctcctccggtaccggcggaggcggatctggcggcggaggtagcggtggcggaggatctgaattcgacatccagatgacacagagccctagcagcctgtctgccagcgtgggagacagagtgaccatcacatgcaaggccagcgaccacatcaacaactggctggcctggtatcagcagaagcctggacaggcccctaagctgctgatctacggcgctaccacactggaaacaggcgtgcccagcagattttctggcagcggctctggcaccgactacaccctgacaatatccagcctccagcctgaggacttcgccacctactactgtcagcagagctggaacaccccttggacattcggccagggcaccaagctggaaatcaagagactcgagggacagcctaaggccaatcctaccgtgacactgttccctccaagcagcgaagaactccaggccaacaaggccacacttgtgtgcctgatctccgacttctaccctggggctgtgacagtggcttggaaggccgatggatctcctgtgaaagccggcgtggaaaccaccaagccatccaagcagagcaacaacaaatacgccgccagctcctacctgagcctgacacctgagcagtggaagtcccacagatcctacagctgccaagtgacccacgaaggcagcaccgtggaaaagacagtggcccctacagagtgcagcggcagagccgattgcggctttaccagcgagagctaccagcagggcgtgctgagcgccaccatcctgtacgagatcctgctgggcaaggccaccctgtacgccgtgctggtgtctgccctggtgctgatggctatggtcaagcggaaggacagccggggaagggccaagcgatctggatctggagcaacaaacttctcactactcaaacaagcaggtgacgtggaggagaatcccgggcctactagtatggactggatttggcgcatccttttccttgtcggcgctgctaccggcgcccattccgggccccaggttcagctgcaagagtctggcggaggacttgctcaagctggcggaagcctgagactgtcttgtgccgcctctggcagaaccttcagcatgggctggtttagacaggcccctggcaaagagagagagttcgtcgccgccatcacatacagcggcggcagcccttactacgcctcttctgtcagaggccggttcaccatcagccgggacaacgccaagaacaccgtgtacctccagatgaacagcctgaagccagaggacaccgccgtgtactactgtgccgccaatccaacctacggcagcgactggaatgccgagaattggggccagggcacccaagtgacagtgtctagtggatccggcggcggaggatctggcggaggcggatctgggggcggaggctctttcgaacaagttcagcttcaacagcctggcgctgagctggtcaaacctggcgcttctgtgaagatgagctgcaaagccagcggctacgccttcagcagctactggatcaactggatgaagcagaaacccggccagggactcgaatggatcggccaaatctatcccggcgacggcgacaccaactacaacggcaagttcaagggcagagccacactgaccgccgatacctctagcagcacagcctacatgcagctgagcagcctgaccagcgaagatagcgccgtgtacttctgtgcccggtccatcacaacagtcgtgggctgcgctatggactattggggccagggaacaagcgtgaccgtgtctagtacgcgtgcctctacaaagggaccctccgtgtttcctctggctcccagcagcaagtctacaagcggaggaacagccgctctgggctgcctggtcaaggattactttcccgagcctgtgaccgtgtcctggaatagcggagcactgacaagcggcgtgcacacctttccagccgtgctgcaaagcagcggcctgtactctctgagcagcgtggtcacagtgcctagctctagcctgggcacccagacctacatctgcaatgtgaaccacaagcctagcaacaccaaggtggacaagagagtggaacccaagagctgtatccccgaggacacattcttcccaagccccgagagcagctgcgacgtgaagctggtggaaaagagcttcgagacagacaccaacctgaacttccagaacctgagcgtgatcggcttcagaatcctgctgctgaaagtggccggctttaacctgctgatgaccctgcggctgtggtccagc

SEQ ID NO: 5070 - DNA, 2304 bp, Artificial Sequence
  Synthetic Polynucloetide
atggccttaccagtgaccgccttgctcctgccgctggccttgctgctccacgccgccaggccggaggttcagctgcttgagtctggcggaggactggttcaacctggcggaagcctgagactgtcttgtgccgccagcggcttcacctttagcagctacgccatgagctgggtccgacaggctcctggcaaaggactggaatgggtgtccagcatcagcggcagcggcgactacatctactacgccgatagcgtgaagggcagattcaccatcagccgggacatcagcaagaacaccctgtacctccagatgaacagcctgagagccgaggacaccgccgtgtactactgtgccaaagaaggcaccggcgctaacagcagcctggccgattatagaggccagggcacactggtcaccgtgtctagtggcggaggaagcggcggaggatctcaggtccagctcgtcgagtccggcggcggcctcgtccaggccggcgactccgtcaccctctcctgcaccgcctccggccgcaccttctcctcctacgccctcgcctggttccgccagcgccccggcaaggagcgcgagttcgtcgccggcctccgctggggcggccccaccaactacgccgactccgtcaaggaccgcttcaccatctccggcgactccgccaagcacaccatgtacctccagatgaactccctcaagcccgaggacaccgccgtctactactgcggctacaaccccggcggctgggccgtcccctcccagtacgagtacgactcctggggccagggcacccaggtcaccgtctcctccggtaccggcggaggcggatctggcggcggaggtagcggtggcggaggatctgaattcgacatccagatgacacagagccctagcagcctgtctgccagcgtgggagacagagtgaccatcacatgcaaggccagcgaccacatcaacaactggctggcctggtatcagcagaagcctggacaggcccctaagctgctgatctacggcgctaccacactggaaacaggcgtgcccagcagattttctggcagcggctctggcaccgactacaccctgacaatatccagcctccagcctgaggacttcgccacctactactgtcagcagagctggaacaccccttggacattcggccagggcaccaagctggaaatcaagagaggcggaggcggaagtggaggcggaggatctggcggcggaggctctcaagttcagcttcaacagcctggcgctgagctggtcaaacctggcgcttctgtgaagatgagctgcaaagccagcggctacgccttcagcagctactggatcaactggatgaagcagaaacccggccagggactcgaatggatcggccaaatctatcccggcgacggcgacaccaactacaacggcaagttcaagggcagagccacactgaccgccgatacctctagcagcacagcctacatgcagctgagcagcctgaccagcgaagatagcgccgtgtacttctgtgcccggtccatcacaacagtcgtgggctgcgctatggactattggggccagggaacaagcgtgaccgtgtctagtacgcgtgagcagaaactgatctcggaagaggatctgaaaattgaagttatgtatcctcctccttacctagacaatgagaagagcaatggaaccattatccatgtgaaagggaaacacctttgtccaagtcccctatttcccggaccttctaagcccttttgggtgctggtggtggttgggggagtcctggcttgctatagcttgctagtaacagtggcctttattattttctgggtgaggagtaagaggagcaggctcctgcacagtgactacatgaacatgactccacgccgccccggacccacccgcaagcattaccagccctatgccccaccacgcgacttcgcagcctatcgctccagagtgaagttcagcaggagcgcagacgcccccgcgtaccagcagggccagaaccagctctataacgagctcaatctaggacgaagagaggagtacgatgttttggacaagagacgtggccgggaccctgagatggggggaaagccgagaaggaagaaccctcaggaaggcctgtacaatgaactgcagaaagataagatggcggaggcctacagtgagattgggatgaaaggcgagcgccggaggggcaaggggcacgatggcctttaccagggtctcagtacagccaccaaggacacctacgacgcccttcacatgcaggccctgccccctcgc

SEQ ID NO: 5071 - DNA, 2325 bp, Artificial Sequence
  Synthetic Polynucloetide
atggccttaccagtgaccgccttgctcctgccgctggccttgctgctccacgccgccaggccggaggttcagctgcttgagtctggcggaggactggttcaacctggcggaagcctgagactgtcttgtgccgccagcggcttcacctttagcagctacgccatgagctgggtccgacaggctcctggcaaaggactggaatgggtgtccagcatcagcggcagcggcgactacatctactacgccgatagcgtgaagggcagattcaccatcagccgggacatcagcaagaacaccctgtacctccagatgaacagcctgagagccgaggacaccgccgtgtactactgtgccaaagaaggcaccggcgctaacagcagcctggccgattatagaggccagggcacactggtcaccgtgtctagtggcggaggaagcggcggaggatctcaggtccagctcgtcgagtccggcggcggcctcgtccaggccggcgactccgtcaccctctcctgcaccgcctccggccgcaccttctcctcctacgccctcgcctggttccgccagcgccccggcaaggagcgcgagttcgtcgccggcctccgctggggcggccccaccaactacgccgactccgtcaaggaccgcttcaccatctccggcgactccgccaagcacaccatgtacctccagatgaactccctcaagcccgaggacaccgccgtctactactgcggctacaaccccggcggctgggccgtcccctcccagtacgagtacgactcctggggccagggcacccaggtcaccgtctcctccggtaccggcggaggcggatctggcggcggaggtagcggtggcggaggatctgaattcgacatccagatgacacagagccctagcagcctgtctgccagcgtgggagacagagtgaccatcacatgcaaggccagcgaccacatcaacaactggctggcctggtatcagcagaagcctggacaggcccctaagctgctgatctacggcgctaccacactggaaacaggcgtgcccagcagattttctggcagcggctctggcaccgactacaccctgacaatatccagcctccagcctgaggacttcgccacctactactgtcagcagagctggaacaccccttggacattcggccagggcaccaagctggaaatcaagagaggcggaggcggaagtggaggcggaggatctggcggcggaggctctcaagttcagcttcaacagcctggcgctgagctggtcaaacctggcgcttctgtgaagatgagctgcaaagccagcggctacgccttcagcagctactggatcaactggatgaagcagaaacccggccagggactcgaatggatcggccaaatctatcccggcgacggcgacaccaactacaacggcaagttcaagggcagagccacactgaccgccgatacctctagcagcacagcctacatgcagctgagcagcctgaccagcgaagatagcgccgtgtacttctgtgcccggtccatcacaacagtcgtgggctgcgctatggactattggggccagggaacaagcgtgaccgtgtctagtacgcgtgagcagaaactgatctcggaagaggatctggcgaagcccaccacgacgccagcgccgcgaccaccaacaccggcgcccaccatcgcgtcgcagcccctgtccctgcgcccagaggcgtgccggccagcggcggggggcgcagtgcacacgagggggctggacttcgcctgtgacatctacatctgggcgcccttggccgggacttgtggggtccttctcctgtcactggttatcaccctttactgcaaacggggcagaaagaaactcctgtatatattcaaacaaccatttatgagaccagtacaaactactcaagaggaagatggctgtagctgccgatttccagaagaagaagaaggaggatgtgaactgagagtgaagttcagcaggagcgcagacgcccccgcgtaccagcagggccagaaccagctctataacgagctgaatctaggacgaagagaggagtacgatgttttggacaagagacgtggccgggaccctgagatggggggaaagccgagaaggaagaaccctcaggaaggcctgtacaatgaactgcagaaagataagatggcggaggcctacagtgagattgggatgaaaggcgagcgccggaggggcaaggggcacgatggcctttaccagggtctcagtacagccaccaaggacacctacgacgcccttcacatgcaggccctgccccctcgctga

SEQ ID NO: 5072 - DNA, 3564 bp, Artificial Sequence
  Synthetic Polynucloetide
atggccttaccagtgaccgccttgctcctgccgctggccttgctgctccacgccgccaggccggaggttcagctgcttgagtctggcggaggactggttcaacctggcggaagcctgagactgtcttgtgccgccagcggcttcacctttagcagctacgccatgagctgggtccgacaggctcctggcaaaggactggaatgggtgtccagcatcagcggcagcggcgactacatctactacgccgatagcgtgaagggcagattcaccatcagccgggacatcagcaagaacaccctgtacctccagatgaacagcctgagagccgaggacaccgccgtgtactactgtgccaaagaaggcaccggcgctaacagcagcctggccgattatagaggccagggcacactggtcaccgtgtctagtggcggaggaagcggcggaggatctcaggtccagctcgtcgagtccggcggcggcctcgtccaggccggcgactccgtcaccctctcctgcaccgcctccggccgcaccttctcctcctacgccctcgcctggttccgccagcgccccggcaaggagcgcgagttcgtcgccggcctccgctggggcggccccaccaactacgccgactccgtcaaggaccgcttcaccatctccggcgactccgccaagcacaccatgtacctccagatgaactccctcaagcccgaggacaccgccgtctactactgcggctacaaccccggcggctgggccgtcccctcccagtacgagtacgactcctggggccagggcacccaggtcaccgtctcctccggtaccggcggaggcggatctggcggcggaggtagcggtggcggaggatctgaattcgacatccagatgacacagagccctagcagcctgtctgccagcgtgggagacagagtgaccatcacatgcaaggccagcgaccacatcaacaactggctggcctggtatcagcagaagcctggacaggcccctaagctgctgatctacggcgctaccacactggaaacaggcgtgcccagcagattttctggcagcggctctggcaccgactacaccctgacaatatccagcctccagcctgaggacttcgccacctactactgtcagcagagctggaacaccccttggacattcggccagggcaccaagctggaaatcaagagaggcggaggcggaagtggaggcggaggatctggcggcggaggctctcaagttcagcttcaacagcctggcgctgagctggtcaaacctggcgcttctgtgaagatgagctgcaaagccagcggctacgccttcagcagctactggatcaactggatgaagcagaaacccggccagggactcgaatggatcggccaaatctatcccggcgacggcgacaccaactacaacggcaagttcaagggcagagccacactgaccgccgatacctctagcagcacagcctacatgcagctgagcagcctgaccagcgaagatagcgccgtgtacttctgtgcccggtccatcacaacagtcgtgggctgcgctatggactattggggccagggaacaagcgtgaccgtgtctagtacgcgtgagcagaaactgatctcggaagaggatctggcgaagcccaccacgacgccagcgccgcgaccaccaacaccggcgcccaccatcgcgtcgcagcccctgtccctgcgcccagaggcgtgccggccagcggcggggggcgcagtgcacacgagggggctggacttcgcctgtgacatctacatctgggcgcccttggccgggacttgtggggtccttctcctgtcactggttatcaccctttactgcgggcgcgccagagtgaagttcagcaggagcgcagacgcccccgcgtaccagcagggccagaaccagctctataacgagctgaatctaggacgaagagaggagtacgatgttttggacaagagacgtggccgggaccctgagatggggggaaagccgagaaggaagaaccctcaggaaggcctgtacaatgaactgcagaaagataagatggcggaggcctacagtgagattgggatgaaaggcgagcgccggaggggcaaggggcacgatggcctttaccagggtctcagtacagccaccaaggacacctacgacgcccttcacatgcaggccctgccccctcgctctagaggatctggagcaacaaacttctcactactcaaacaagcaggtgacgtggaggagaatcccgggcctgggatccacatggccacttacgaggttctctgtgaggtggcgcggaaactgggcacggatgacagggaagtggtattgttcctcctaaacgtgttcatacctcaacccacactggcccaattaattggagctcttagagctttaaaggaggagggcaggttaacgtttcccctgttagcggaatgtctgtttcgtgcaggtcgcagagacctcttgcgcgacctgcttcacttagacccgcgttttttagagcgccacctagcgggcacaatgagttatttcagcccttatcagctcactgttctccacgtagacggggagctgtgtgcgagggatattaggtctttgatatttttaagcaaggacactatagggtctcgcagcacaccacagacattcttacactgggtgtactgtatggaaaacttagacctactgggtcccactgacgtggatgccctaatgtcaatgcttagatctttgtcaagagtagacctacagcgccaagtgcaaaccctaatgggccttcacctttccggcccatcacactcccaacactatcgccatacaccactcgagaccgatttctacgactacaaggacgacgatgacaagactagtggctccggcgagggcagaggaagtctactaacctgcggagatgtggaagaaaatcctggcccacatatgaccgagtacaagcccacggtgcgcctcgccacccgcgacgacgtccccagggccgtacgcaccctcgccgccgcgttcgccgactaccccgccacgcgccacaccgtcgatccggaccgccacatcgagcgggtcaccgagctgcaagaactcttcctcacgcgcgtcgggctcgacatcggcaaggtgtgggtcgcggacgacggcgccgcggtggcggtctggaccacgccggagagcgtcgaagcgggggcggtgttcgccgagatcggcccgcgcatggccgagttgagcggttcccggctggccgcgcagcaacagatggaaggcctcctggcgccgcaccggcccaaggagcccgcgtggttcctggccaccgtcggcgtctcgcccgaccaccagggcaagggtctgggcagcgccgtcgtgctccccggagtggaggcggccgagcgcgccggggtgcccgccttcctggagacctccgcgccccgcaacctccccttctacgagcggctcggcttcaccgtcaccgccgacgtcgaggtgcccgaaggaccgcgcacctggtgcatgacccgcaagcccggtgcctga

SEQ ID NO: 5073 - DNA, 3384 bp, Artificial Sequence
  Synthetic Polynucloetide
atggccttaccagtgaccgccttgctcctgccgctggccttgctgctccacgccgccaggccggaggttcagctgcttgagtctggcggaggactggttcaacctggcggaagcctgagactgtcttgtgccgccagcggcttcacctttagcagctacgccatgagctgggtccgacaggctcctggcaaaggactggaatgggtgtccagcatcagcggcagcggcgactacatctactacgccgatagcgtgaagggcagattcaccatcagccgggacatcagcaagaacaccctgtacctccagatgaacagcctgagagccgaggacaccgccgtgtactactgtgccaaagaaggcaccggcgctaacagcagcctggccgattatagaggccagggcacactggtcaccgtgtctagtggcggaggaagcggcggaggatctcaggtccagctcgtcgagtccggcggcggcctcgtccaggccggcgactccgtcaccctctcctgcaccgcctccggccgcaccttctcctcctacgccctcgcctggttccgccagcgccccggcaaggagcgcgagttcgtcgccggcctccgctggggcggccccaccaactacgccgactccgtcaaggaccgcttcaccatctccggcgactccgccaagcacaccatgtacctccagatgaactccctcaagcccgaggacaccgccgtctactactgcggctacaaccccggcggctgggccgtcccctcccagtacgagtacgactcctggggccagggcacccaggtcaccgtctcctccggtaccggcggaggcggatctggcggcggaggtagcggtggcggaggatctgaattcgacatccagatgacacagagccctagcagcctgtctgccagcgtgggagacagagtgaccatcacatgcaaggccagcgaccacatcaacaactggctggcctggtatcagcagaagcctggacaggcccctaagctgctgatctacggcgctaccacactggaaacaggcgtgcccagcagattttctggcagcggctctggcaccgactacaccctgacaatatccagcctccagcctgaggacttcgccacctactactgtcagcagagctggaacaccccttggacattcggccagggcaccaagctggaaatcaagagactcgagatccagaaccctgatcctgccgtgtaccagctgcgggatagcaagagcagcgacaagagcgtgtgtctgttcaccgacttcgacagccagaccaacgtgtcccagagcaaggactccgacgtgtacatcaccgataagtgcgtgctggacatgcggagcatggacttcaagagcaactccgccgtggcctggtccaacaagtccgatttcgcctgcgccaacgccttcaacaacagcattatccccgaggacacattcttcccaagcagcgacgtgccctgcgacgtgaagctggtggaaaagagcttcgagacagacaccaacctgaacttccagaacctgagcgtgatcggcttcagaatcctgctgctgaaagtggccggctttaacctgctgatgaccctgcggctgtggtccagccgcgccaagagaagcggatctggcgtgaagcagaccctgaatttcgacctgctgaagctggctggcgacgtggaatccaacccaggccctactagtatggactggatttggcgcatccttttccttgtcggcgctgctaccggcgcgcattccttcgaacaagttcagcttcaacagcctggcgctgagctggtcaaacctggcgcttctgtgaagatgagctgcaaagccagcggctacgccttcagcagctactggatcaactggatgaagcagaaacccggccagggactcgaatggatcggccaaatctatcccggcgacggcgacaccaactacaacggcaagttcaagggcagagccacactgaccgccgatacctctagcagcacagcctacatgcagctgagcagcctgaccagcgaagatagcgccgtgtacttctgtgcccggtccatcacaacagtcgtgggctgcgctatggactattggggccagggaacaagcgtgaccgtgtctagtacgcgtgaggacctgaagaacgtgttcccacctgaggtggccgtgttcgagcctagcaaggccgagatcgcccacacccagaaagccaccctcgtgtgcctggctaccggcttctaccccgaccatgtggaactgtcttggtgggtcaacggcaaagaggtgcacagcggcgtgtgtaccgacccccagccactgaaagaacagcccgccctgaacgacagccggtactgcctgagcagcagactgagagtgtccgccaccttctggcagaacccccggaaccacttcagatgccaggtgcagttctacggcctgagcgagaacgacgagtggacccaggacagagccaagcccgtgacccagatcgtgtctgccgaagcctggggcagagccgattgcggcatcaccagcgccagctaccaccagggcgtgctgagcgccaccatcctgtacgagatcctgctgggcaaggccaccctgtacgccgtgctggtgtctgccctggtgctgatggctatggtcaagcggaaggacagccggggaagggccaagcgatctggatctggagcaacaaacttctcactactcaaacaagcaggtgacgtggaggagaatcccgggccttctagaggccatatgaccgagtacaagcccacggtgcgcctcgccacccgcgacgacgtccccagggccgtacgcaccctcgccgccgcgttcgccgactaccccgccacgcgccacaccgtcgatccggaccgccacatcgagcgggtcaccgagctgcaagaactcttcctcacgcgcgtcgggctcgacatcggcaaggtgtgggtcgcggacgacggcgccgcggtggcggtctggaccacgccggagagcgtcgaagcgggggcggtgttcgccgagatcggcccgcgcatggccgagttgagcggttcccggctggccgcgcagcaacagatggaaggcctcctggcgccgcaccggcccaaggagcccgcgtggttcctggccaccgtcggcgtctcgcccgaccaccagggcaagggtctgggcagcgccgtcgtgctccccggagtggaggcggccgagcgcgccggggtgcccgccttcctggagacctccgcgccccgcaacctccccttctacgagcggctcggcttcaccgtcaccgccgacgtcgaggtgcccgaaggaccgcgcacctggtgcatgacccgcaagcccggtgcctga

SEQ ID NO: 5074 - DNA, 3381 bp, Artificial Sequence
  Synthetic Polynucloetide
atggccttaccagtgaccgccttgctcctgccgctggccttgctgctccacgccgccaggccggaggttcagctgcttgagtctggcggaggactggttcaacctggcggaagcctgagactgtcttgtgccgccagcggcttcacctttagcagctacgccatgagctgggtccgacaggctcctggcaaaggactggaatgggtgtccagcatcagcggcagcggcgactacatctactacgccgatagcgtgaagggcagattcaccatcagccgggacatcagcaagaacaccctgtacctccagatgaacagcctgagagccgaggacaccgccgtgtactactgtgccaaagaaggcaccggcgctaacagcagcctggccgattatagaggccagggcacactggtcaccgtgtctagtggcggaggaagcggcggaggatctcaggtccagctcgtcgagtccggcggcggcctcgtccaggccggcgactccgtcaccctctcctgcaccgcctccggccgcaccttctcctcctacgccctcgcctggttccgccagcgccccggcaaggagcgcgagttcgtcgccggcctccgctggggcggccccaccaactacgccgactccgtcaaggaccgcttcaccatctccggcgactccgccaagcacaccatgtacctccagatgaactccctcaagcccgaggacaccgccgtctactactgcggctacaaccccggcggctgggccgtcccctcccagtacgagtacgactcctggggccagggcacccaggtcaccgtctcctccggtaccggcggaggcggatctggcggcggaggtagcggtggcggaggatctgaattcgacatccagatgacacagagccctagcagcctgtctgccagcgtgggagacagagtgaccatcacatgcaaggccagcgaccacatcaacaactggctggcctggtatcagcagaagcctggacaggcccctaagctgctgatctacggcgctaccacactggaaacaggcgtgcccagcagattttctggcagcggctctggcaccgactacaccctgacaatatccagcctccagcctgaggacttcgccacctactactgtcagcagagctggaacaccccttggacattcggccagggcaccaagctggaaatcaagagactcgaggacctgaagaacgtgttcccacctgaggtggccgtgttcgagcctagcaaggccgagatcgcccacacccagaaagccaccctcgtgtgcctggctaccggcttctaccccgaccatgtggaactgtcttggtgggtcaacggcaaagaggtgcacagcggcgtgtgtaccgacccccagccactgaaagaacagcccgccctgaacgacagccggtactgcctgagcagcagactgagagtgtccgccaccttctggcagaacccccggaaccacttcagatgccaggtgcagttctacggcctgagcgagaacgacgagtggacccaggacagagccaagcccgtgacccagatcgtgtctgccgaagcctggggcagagccgattgcggcatcaccagcgccagctaccaccagggcgtgctgagcgccaccatcctgtacgagatcctgctgggcaaggccaccctgtacgccgtgctggtgtctgccctggtgctgatggctatggtcaagcggaaggacagccggggaagggccaagcgatctggatctggagcaacaaacttctcactactcaaacaagcaggtgacgtggaggagaatcccgggcctactagtatggactggatttggcgcatccttttccttgtcggcgctgctaccggcgcgcattccttcgaacaagttcagcttcaacagcctggcgctgagctggtcaaacctggcgcttctgtgaagatgagctgcaaagccagcggctacgccttcagcagctactggatcaactggatgaagcagaaacccggccagggactcgaatggatcggccaaatctatcccggcgacggcgacaccaactacaacggcaagttcaagggcagagccacactgaccgccgatacctctagcagcacagcctacatgcagctgagcagcctgaccagcgaagatagcgccgtgtacttctgtgcccggtccatcacaacagtcgtgggctgcgctatggactattggggccagggaacaagcgtgaccgtgtctagtacgcgtatccagaaccctgatcctgccgtgtaccagctgcgggatagcaagagcagcgacaagagcgtgtgtctgttcaccgacttcgacagccagaccaacgtgtcccagagcaaggactccgacgtgtacatcaccgataagtgcgtgctggacatgcggagcatggacttcaagagcaactccgccgtggcctggtccaacaagtccgatttcgcctgcgccaacgccttcaacaacagcattatccccgaggacacattcttcccaagcagcgacgtgccctgcgacgtgaagctggtggaaaagagcttcgagacagacaccaacctgaacttccagaacctgagcgtgatcggcttcagaatcctgctgctgaaagtggccggctttaacctgctgatgaccctgcggctgtggtccagccgcgccaagagaagcggatctggcgtgaagcagaccctgaatttcgacctgctgaagctggctggcgacgtggaatccaacccaggcccttctagaggccatatgaccgagtacaagcccacggtgcgcctcgccacccgcgacgacgtccccagggccgtacgcaccctcgccgccgcgttcgccgactaccccgccacgcgccacaccgtcgatccggaccgccacatcgagcgggtcaccgagctgcaagaactcttcctcacgcgcgtcgggctcgacatcggcaaggtgtgggtcgcggacgacggcgccgcggtggcggtctggaccacgccggagagcgtcgaagcgggggcggtgttcgccgagatcggcccgcgcatggccgagttgagcggttcccggctggccgcgcagcaacagatggaaggcctcctggcgccgcaccggcccaaggagcccgcgtggttcctggccaccgtcggcgtctcgcccgaccaccagggcaagggtctgggcagcgccgtcgtgctccccggagtggaggcggccgagcgcgccggggtgcccgccttcctggagacctccgcgccccgcaacctccccttctacgagcggctcggcttcaccgtcaccgccgacgtcgaggtgcccgaaggaccgcgcacctggtgcatgacccgcaagcccggtgcctga

SEQ ID NO: 5075 - DNA, 2679 bp, Artificial Sequence
  Synthetic Polynucloetide
atggccttaccagtgaccgccttgctcctgccgctggccttgctgctccacgccgccaggccggaggttcagctgcttgagtctggcggaggactggttcaacctggcggaagcctgagactgtcttgtgccgccagcggcttcacctttagcagctacgccatgagctgggtccgacaggctcctggcaaaggactggaatgggtgtccagcatcagcggcagcggcgactacatctactacgccgatagcgtgaagggcagattcaccatcagccgggacatcagcaagaacaccctgtacctccagatgaacagcctgagagccgaggacaccgccgtgtactactgtgccaaagaaggcaccggcgctaacagcagcctggccgattatagaggccagggcacactggtcaccgtgtctagtggcggaggaagcggcggaggatctcaggtccagctcgtcgagtccggcggcggcctcgtccaggccggcgactccgtcaccctctcctgcaccgcctccggccgcaccttctcctcctacgccctcgcctggttccgccagcgccccggcaaggagcgcgagttcgtcgccggcctccgctggggcggccccaccaactacgccgactccgtcaaggaccgcttcaccatctccggcgactccgccaagcacaccatgtacctccagatgaactccctcaagcccgaggacaccgccgtctactactgcggctacaaccccggcggctgggccgtcccctcccagtacgagtacgactcctggggccagggcacccaggtcaccgtctcctccggtaccggcggaggcggatctggcggcggaggtagcggtggcggaggatctgaattcgacatccagatgacacagagccctagcagcctgtctgccagcgtgggagacagagtgaccatcacatgcaaggccagcgaccacatcaacaactggctggcctggtatcagcagaagcctggacaggcccctaagctgctgatctacggcgctaccacactggaaacaggcgtgcccagcagattttctggcagcggctctggcaccgactacaccctgacaatatccagcctccagcctgaggacttcgccacctactactgtcagcagagctggaacaccccttggacattcggccagggcaccaagctggaaatcaagagactcgaggacctgaagaacgtgttcccacctgaggtggccgtgttcgagcctagcgaggccgagatcagccacacccagaaagccaccctcgtgtgcctggctaccggcttctaccccgaccatgtggaactgtcttggtgggtcaacggcaaagaggtgcacagcggcgtgtgtaccgacccccagccactgaaagaacagcccgccctgaacgacagccggtactgcctgagcagcagactgagagtgtccgccaccttctggcagaacccccggaaccacttcagatgccaggtgcagttctacggcctgagcgagaacgacgagtggacccaggacagagccaagcccgtgacccagatcgtgtctgccgaagcctggggcagagccgattgcggctttaccagcgagagctaccagcagggcgtgctgagcgccaccatcctgtacgagatcctgctgggcaaggccaccctgtacgccgtgctggtgtctgccctggtgctgatggctatggtcaagcggaaggacagccggggaagggccaagcgatctggatctggagcaacaaacttctcactactcaaacaagcaggtgacgtggaggagaatcccgggcctactagtatggactggatttggcgcatccttttccttgtcggcgctgctaccggcgcgcattccttcgaacaagttcagcttcaacagcctggcgctgagctggtcaaacctggcgcttctgtgaagatgagctgcaaagccagcggctacgccttcagcagctactggatcaactggatgaagcagaaacccggccagggactcgaatggatcggccaaatctatcccggcgacggcgacaccaactacaacggcaagttcaagggcagagccacactgaccgccgatacctctagcagcacagcctacatgcagctgagcagcctgaccagcgaagatagcgccgtgtacttctgtgcccggtccatcacaacagtcgtgggctgcgctatggactattggggccagggaacaagcgtgaccgtgtctagtacgcgtatccagaaccctgatcctgccgtgtaccagctgcgggatagcaagagcagcgacaagagcgtgtgtctgttcaccgacttcgacagccagaccaacgtgtcccagagcaaggactccgacgtgtacatcaccgataagtgcgtgctggacatgcggagcatggacttcaagagcaactccgccgtggcctggtccaacaagtccgatttcgcctgcgccaacgccttcaacaacagcattatccccgaggacacattcttcccaagccccgagagcagctgcgacgtgaagctggtggaaaagagcttcgagacagacaccaacctgaacttccagaacctgagcgtgatcggcttcagaatcctgctgctgaaagtggccggctttaacctgctgatgaccctgcggctgtggtccagc

SEQ ID NO: 5076 - DNA, 3354 bp, Artificial Sequence
  Synthetic Polynucloetide
atggccttaccagtgaccgccttgctcctgccgctggccttgctgctccacgccgccaggccggaggttcagctgcttgagtctggcggaggactggttcaacctggcggaagcctgagactgtcttgtgccgccagcggcttcacctttagcagctacgccatgagctgggtccgacaggctcctggcaaaggactggaatgggtgtccagcatcagcggcagcggcgactacatctactacgccgatagcgtgaagggcagattcaccatcagccgggacatcagcaagaacaccctgtacctccagatgaacagcctgagagccgaggacaccgccgtgtactactgtgccaaagaaggcaccggcgctaacagcagcctggccgattatagaggccagggcacactggtcaccgtgtctagtggcggaggaagcggcggaggatctcaggtccagctcgtcgagtccggcggcggcctcgtccaggccggcgactccgtcaccctctcctgcaccgcctccggccgcaccttctcctcctacgccctcgcctggttccgccagcgccccggcaaggagcgcgagttcgtcgccggcctccgctggggcggccccaccaactacgccgactccgtcaaggaccgcttcaccatctccggcgactccgccaagcacaccatgtacctccagatgaactccctcaagcccgaggacaccgccgtctactactgcggctacaaccccggcggctgggccgtcccctcccagtacgagtacgactcctggggccagggcacccaggtcaccgtctcctccggtaccggcggaggcggatctggcggcggaggtagcggtggcggaggatctgaattcgacatccagatgacacagagccctagcagcctgtctgccagcgtgggagacagagtgaccatcacatgcaaggccagcgaccacatcaacaactggctggcctggtatcagcagaagcctggacaggcccctaagctgctgatctacggcgctaccacactggaaacaggcgtgcccagcagattttctggcagcggctctggcaccgactacaccctgacaatatccagcctccagcctgaggacttcgccacctactactgtcagcagagctggaacaccccttggacattcggccagggcaccaagctggaaatcaagagactcgaggacctgaagaacgtgttcccacctgaggtggccgtgttcgagcctagcgaggccgagatcagccacacccagaaagccaccctcgtgtgcctggctaccggcttctaccccgaccatgtggaactgtcttggtgggtcaacggcaaagaggtgcacagcggcgtgtgtaccgacccccagccactgaaagaacagcccgccctgaacgacagccggtactgcctgagcagcagactgagagtgtccgccaccttctggcagaacccccggaaccacttcagatgccaggtgcagttctacggcctgagcgagaacgacgagtggacccaggacagagccaagcccgtgacccagatcgtgtctgccgaagcctggggcagagccgattgcggctttaccagcgagagctaccagcagggcgtgctgagcgccaccatcctgtacgagatcctgctgggcaaggccaccctgtacgccgtgctggtgtctgccctggtgctgatggctatggtcaagcggaaggacagccggggaagggccaagcgatctggatctggagcaacaaacttctcactactcaaacaagcaggtgacgtggaggagaatcccgggcctactagtatggactggatttggcgcatccttttccttgtcggcgctgctaccggcgcgcattccttcgaacaagttcagcttcaacagcctggcgctgagctggtcaaacctggcgcttctgtgaagatgagctgcaaagccagcggctacgccttcagcagctactggatcaactggatgaagcagaaacccggccagggactcgaatggatcggccaaatctatcccggcgacggcgacaccaactacaacggcaagttcaagggcagagccacactgaccgccgatacctctagcagcacagcctacatgcagctgagcagcctgaccagcgaagatagcgccgtgtacttctgtgcccggtccatcacaacagtcgtgggctgcgctatggactattggggccagggaacaagcgtgaccgtgtctagtacgcgtatccagaaccctgatcctgccgtgtaccagctgcgggatagcaagagcagcgacaagagcgtgtgtctgttcaccgacttcgacagccagaccaacgtgtcccagagcaaggactccgacgtgtacatcaccgataagtgcgtgctggacatgcggagcatggacttcaagagcaactccgccgtggcctggtccaacaagtccgatttcgcctgcgccaacgccttcaacaacagcattatccccgaggacacattcttcccaagccccgagagcagctgcgacgtgaagctggtggaaaagagcttcgagacagacaccaacctgaacttccagaacctgagcgtgatcggcttcagaatcctgctgctgaaagtggccggctttaacctgctgatgaccctgcggctgtggtccagccgcgccaagagaagcggatctggcgtgaagcagaccctgaatttcgacctgctgaagctggctggcgacgtggaatccaacccaggcccttctagaggcgggatccacaccatggctacctacgaggtgctgtgcgaggtggcaagaaagctgggcaccgacgacagagaagtggtgctgttcctgctgaacgtgttcatccctcagcctacactggcccagctgatcggtgcactgagagccctgaaagaggaaggccggctgacctttcctctgctggccgaatgcctgttcagagccggaagaagggatctgctgcgggacctgctgcatctggaccccagatttctggaaagacacctggccggcaccatgagctacttcagcccttaccagctgaccgtgctgcacgttgacggcgaactgtgcgccagagatattcggagcctgatcttcctgagcaaggacaccatcggcagccggtctacccctcagacatttctgcactgggtgtactgcatggaaaacctggacctgctcggccccacagatgtggatgccctgatgtccatgctgagaagcctgagcagagtggacctccagagacaggtgcagacactgatgggactgcacctgagcggacctagccacagccagcactacagacacacccct

SEQ ID NO: 5077 - DNA, 2691 bp, Artificial Sequence
  Synthetic Polynucloetide
atggccttaccagtgaccgccttgctcctgccgctggccttgctgctccacgccgccaggccggaggttcagctgcttgagtctggcggaggactggttcaacctggcggaagcctgagactgtcttgtgccgccagcggcttcacctttagcagctacgccatgagctgggtccgacaggctcctggcaaaggactggaatgggtgtccagcatcagcggcagcggcgactacatctactacgccgatagcgtgaagggcagattcaccatcagccgggacatcagcaagaacaccctgtacctccagatgaacagcctgagagccgaggacaccgccgtgtactactgtgccaaagaaggcaccggcgctaacagcagcctggccgattatagaggccagggcacactggtcaccgtgtctagtggcggaggaagcggcggaggatctcaggtccagctcgtcgagtccggcggcggcctcgtccaggccggcgactccgtcaccctctcctgcaccgcctccggccgcaccttctcctcctacgccctcgcctggttccgccagcgccccggcaaggagcgcgagttcgtcgccggcctccgctggggcggccccaccaactacgccgactccgtcaaggaccgcttcaccatctccggcgactccgccaagcacaccatgtacctccagatgaactccctcaagcccgaggacaccgccgtctactactgcggctacaaccccggcggctgggccgtcccctcccagtacgagtacgactcctggggccagggcacccaggtcaccgtctcctccggtaccggcggaggcggatctggcggcggaggtagcggtggcggaggatctgaattcgacatccagatgacacagagccctagcagcctgtctgccagcgtgggagacagagtgaccatcacatgcaaggccagcgaccacatcaacaactggctggcctggtatcagcagaagcctggacaggcccctaagctgctgatctacggcgctaccacactggaaacaggcgtgcccagcagattttctggcagcggctctggcaccgactacaccctgacaatatccagcctccagcctgaggacttcgccacctactactgtcagcagagctggaacaccccttggacattcggccagggcaccaagctggaaatcaagagactcgagatccagaaccctgatcctgccgtgtaccagctgcgggatagcaagagcagcgacaagagcgtgtgtctgttcaccgacttcgacagccagaccaacgtgtcccagagcaaggactccgacgtgtacatcaccgataagtgcgtgctggacatgcggagcatggacttcaagagcaactccgccgtggcctggtccaacaagtccgatttcgcctgcgccaacgccttcaacaacagcattatccccgaggacacattcttcccaagccccgagagcagctgcgacgtgaagctggtggaaaagagcttcgagacagacaccaacctgaacttccagaacctgagcgtgatcggcttcagaatcctgctgctgaaagtggccggctttaacctgctgatgaccctgcggctgtggtccagccgcgccaagagaagcggatctggcgtgaagcagaccctgaatttcgacctgctgaagctggctggcgacgtggaatccaacccaggccctactagtatggactggatttggcgcatccttttccttgtcggcgctgctaccggcgcgcattccttcgaacaagttcagcttcaacagcctggcgctgagctggtcaaacctggcgcttctgtgaagatgagctgcaaagccagcggctacgccttcagcagctactggatcaactggatgaagcagaaacccggccagggactcgaatggatcggccaaatctatcccggcgacggcgacaccaactacaacggcaagttcaagggcagagccacactgaccgccgatacctctagcagcacagcctacatgcagctgagcagcctgaccagcgaagatagcgccgtgtacttctgtgcccggtccatcacaacagtcgtgggctgcgctatggactattggggccagggaacaagcgtgaccgtgtctagtacgcgtgaggacctgaagaacgtgttcccacctgaggtggccgtgttcgagcctagcgaggccgagatcagccacacccagaaagccaccctcgtgtgcctggctaccggcttctaccccgaccatgtggaactgtcttggtgggtcaacggcaaagaggtgcacagcggcgtgtgtaccgacccccagccactgaaagaacagcccgccctgaacgacagccggtactgcctgagcagcagactgagagtgtccgccaccttctggcagaacccccggaaccacttcagatgccaggtgcagttctacggcctgagcgagaacgacgagtggacccaggacagagccaagcccgtgacccagatcgtgtctgccgaagcctggggcagagccgattgcggctttaccagcgagagctaccagcagggcgtgctgagcgccaccatcctgtacgagatcctgctgggcaaggccaccctgtacgccgtgctggtgtctgccctggtgctgatggctatggtcaagcggaaggacagccgggga

SEQ ID NO: 5078 - DNA, 3357 bp, Artificial Sequence
  Synthetic Polynucloetide
atggccttaccagtgaccgccttgctcctgccgctggccttgctgctccacgccgccaggccggaggttcagctgcttgagtctggcggaggactggttcaacctggcggaagcctgagactgtcttgtgccgccagcggcttcacctttagcagctacgccatgagctgggtccgacaggctcctggcaaaggactggaatgggtgtccagcatcagcggcagcggcgactacatctactacgccgatagcgtgaagggcagattcaccatcagccgggacatcagcaagaacaccctgtacctccagatgaacagcctgagagccgaggacaccgccgtgtactactgtgccaaagaaggcaccggcgctaacagcagcctggccgattatagaggccagggcacactggtcaccgtgtctagtggcggaggaagcggcggaggatctcaggtccagctcgtcgagtccggcggcggcctcgtccaggccggcgactccgtcaccctctcctgcaccgcctccggccgcaccttctcctcctacgccctcgcctggttccgccagcgccccggcaaggagcgcgagttcgtcgccggcctccgctggggcggccccaccaactacgccgactccgtcaaggaccgcttcaccatctccggcgactccgccaagcacaccatgtacctccagatgaactccctcaagcccgaggacaccgccgtctactactgcggctacaaccccggcggctgggccgtcccctcccagtacgagtacgactcctggggccagggcacccaggtcaccgtctcctccggtaccggcggaggcggatctggcggcggaggtagcggtggcggaggatctgaattcgacatccagatgacacagagccctagcagcctgtctgccagcgtgggagacagagtgaccatcacatgcaaggccagcgaccacatcaacaactggctggcctggtatcagcagaagcctggacaggcccctaagctgctgatctacggcgctaccacactggaaacaggcgtgcccagcagattttctggcagcggctctggcaccgactacaccctgacaatatccagcctccagcctgaggacttcgccacctactactgtcagcagagctggaacaccccttggacattcggccagggcaccaagctggaaatcaagagactcgagatccagaaccctgatcctgccgtgtaccagctgcgggatagcaagagcagcgacaagagcgtgtgtctgttcaccgacttcgacagccagaccaacgtgtcccagagcaaggactccgacgtgtacatcaccgataagtgcgtgctggacatgcggagcatggacttcaagagcaactccgccgtggcctggtccaacaagtccgatttcgcctgcgccaacgccttcaacaacagcattatccccgaggacacattcttcccaagccccgagagcagctgcgacgtgaagctggtggaaaagagcttcgagacagacaccaacctgaacttccagaacctgagcgtgatcggcttcagaatcctgctgctgaaagtggccggctttaacctgctgatgaccctgcggctgtggtccagccgcgccaagagaagcggatctggcgtgaagcagaccctgaatttcgacctgctgaagctggctggcgacgtggaatccaacccaggccctactagtatggactggatttggcgcatccttttccttgtcggcgctgctaccggcgcgcattccttcgaacaagttcagcttcaacagcctggcgctgagctggtcaaacctggcgcttctgtgaagatgagctgcaaagccagcggctacgccttcagcagctactggatcaactggatgaagcagaaacccggccagggactcgaatggatcggccaaatctatcccggcgacggcgacaccaactacaacggcaagttcaagggcagagccacactgaccgccgatacctctagcagcacagcctacatgcagctgagcagcctgaccagcgaagatagcgccgtgtacttctgtgcccggtccatcacaacagtcgtgggctgcgctatggactattggggccagggaacaagcgtgaccgtgtctagtacgcgtgaggacctgaagaacgtgttcccacctgaggtggccgtgttcgagcctagcgaggccgagatcagccacacccagaaagccaccctcgtgtgcctggctaccggcttctaccccgaccatgtggaactgtcttggtgggtcaacggcaaagaggtgcacagcggcgtgtgtaccgacccccagccactgaaagaacagcccgccctgaacgacagccggtactgcctgagcagcagactgagagtgtccgccaccttctggcagaacccccggaaccacttcagatgccaggtgcagttctacggcctgagcgagaacgacgagtggacccaggacagagccaagcccgtgacccagatcgtgtctgccgaagcctggggcagagccgattgcggctttaccagcgagagctaccagcagggcgtgctgagcgccaccatcctgtacgagatcctgctgggcaaggccaccctgtacgccgtgctggtgtctgccctggtgctgatggctatggtcaagcggaaggacagccggggaagggccaagcgatctggatctggagcaacaaacttctcactactcaaacaagcaggtgacgtggaggagaatcccgggccttctagaggcgggatccacaccatggctacctacgaggtgctgtgcgaggtggcaagaaagctgggcaccgacgacagagaagtggtgctgttcctgctgaacgtgttcatccctcagcctacactggcccagctgatcggtgcactgagagccctgaaagaggaaggccggctgacctttcctctgctggccgaatgcctgttcagagccggaagaagggatctgctgcgggacctgctgcatctggaccccagatttctggaaagacacctggccggcaccatgagctacttcagcccttaccagctgaccgtgctgcacgttgacggcgaactgtgcgccagagatattcggagcctgatcttcctgagcaaggacaccatcggcagccggtctacccctcagacatttctgcactgggtgtactgcatggaaaacctggacctgctcggccccacagatgtggatgccctgatgtccatgctgagaagcctgagcagagtggacctccagagacaggtgcagacactgatgggactgcacctgagcggacctagccacagccagcactacagacacacccct

SEQ ID NO: 5079 - DNA, 3516 bp, Artificial Sequence
  Synthetic Polynucloetide
atggccttaccagtgaccgccttgctcctgccgctggccttgctgctccacgccgccaggccgctcgaggggaaaccaattcccaaccctcttctgggactggattcaaccggcagcggcgaggacctgaagaacgtgttcccacctgaggtggccgtgttcgagcctagcaaggccgagatcgcccacacccagaaagccaccctcgtgtgcctggctaccggcttctaccccgaccatgtggaactgtcttggtgggtcaacggcaaagaggtgcacagcggcgtgtgtaccgacccccagccactgaaagaacagcccgccctgaacgacagccggtactgcctgagcagcagactgagagtgtccgccaccttctggcagaacccccggaaccacttcagatgccaggtgcagttctacggcctgagcgagaacgacgagtggacccaggacagagccaagcccgtgacccagatcgtgtctgccgaagcctggggcagagccgattgcggcatcaccagcgccagctaccaccagggcgtgctgagcgccaccatcctgtacgagatcctgctgggcaaggccaccctgtacgccgtgctggtgtctgccctggtgctgatggctatggtcaagcggaaggacagccggggaagggccaagcgatctggatctggagcaacaaacttctcactactcaaacaagcaggtgacgtggaggagaatcccgggcctactagcatggccttaccagtgaccgccttgctcctgccgctggccttgctgctccacgccgccaggccggaggttcagctgcttgagtctggcggaggactggttcaacctggcggaagcctgagactgtcttgtgccgccagcggcttcacctttagcagctacgccatgagctgggtccgacaggctcctggcaaaggactggaatgggtgtccagcatcagcggcagcggcgactacatctactacgccgatagcgtgaagggcagattcaccatcagccgggacatcagcaagaacaccctgtacctccagatgaacagcctgagagccgaggacaccgccgtgtactactgtgccaaagaaggcaccggcgctaacagcagcctggccgattatagaggccagggcacactggtcaccgtgtctagtggcggaggaagcggcggaggatctcaggtccagctcgtcgagtccggcggcggcctcgtccaggccggcgactccgtcaccctctcctgcaccgcctccggccgcaccttctcctcctacgccctcgcctggttccgccagcgccccggcaaggagcgcgagttcgtcgccggcctccgctggggcggccccaccaactacgccgactccgtcaaggaccgcttcaccatctccggcgactccgccaagcacaccatgtacctccagatgaactccctcaagcccgaggacaccgccgtctactactgcggctacaaccccggcggctgggccgtcccctcccagtacgagtacgactcctggggccagggcacccaggtcaccgtctcctccggtaccggcggaggcggatctggcggcggaggtagcggtggcggaggatctgaattcgacatccagatgacacagagccctagcagcctgtctgccagcgtgggagacagagtgaccatcacatgcaaggccagcgaccacatcaacaactggctggcctggtatcagcagaagcctggacaggcccctaagctgctgatctacggcgctaccacactggaaacaggcgtgcccagcagattttctggcagcggctctggcaccgactacaccctgacaatatccagcctccagcctgaggacttcgccacctactactgtcagcagagctggaacaccccttggacattcggccagggcaccaagctggaaatcaagagaggcggaggcggaagtggaggcggaggatctggcggcggaggctctcaagttcagcttcaacagcctggcgctgagctggtcaaacctggcgcttctgtgaagatgagctgcaaagccagcggctacgccttcagcagctactggatcaactggatgaagcagaaacccggccagggactcgaatggatcggccaaatctatcccggcgacggcgacaccaactacaacggcaagttcaagggcagagccacactgaccgccgatacctctagcagcacagcctacatgcagctgagcagcctgaccagcgaagatagcgccgtgtacttctgtgcccggtccatcacaacagtcgtgggctgcgctatggactattggggccagggaacaagcgtgaccgtgtctagtacgcgtgagcagaaactgatctcggaagaggatgggagcggcatccagaaccctgatcctgccgtgtaccagctgcgggatagcaagagcagcgacaagagcgtgtgtctgttcaccgacttcgacagccagaccaacgtgtcccagagcaaggactccgacgtgtacatcaccgataagtgcgtgctggacatgcggagcatggacttcaagagcaactccgccgtggcctggtccaacaagtccgatttcgcctgcgccaacgccttcaacaacagcattatccccgaggacacattcttcccaagcagcgacgtgccctgcgacgtgaagctggtggaaaagagcttcgagacagacaccaacctgaacttccagaacctgagcgtgatcggcttcagaatcctgctgctgaaagtggccggctttaacctgctgatgaccctgcggctgtggtccagccgcgccaagagaagcggatctggcgtgaagcagaccctgaatttcgacctgctgaagctggctggcgacgtggaatccaacccaggcccttctagaggccatatgaccgagtacaagcccacggtgcgcctcgccacccgcgacgacgtccccagggccgtacgcaccctcgccgccgcgttcgccgactaccccgccacgcgccacaccgtcgatccggaccgccacatcgagcgggtcaccgagctgcaagaactcttcctcacgcgcgtcgggctcgacatcggcaaggtgtgggtcgcggacgacggcgccgcggtggcggtctggaccacgccggagagcgtcgaagcgggggcggtgttcgccgagatcggcccgcgcatggccgagttgagcggttcccggctggccgcgcagcaacagatggaaggcctcctggcgccgcaccggcccaaggagcccgcgtggttcctggccaccgtcggcgtctcgcccgaccaccagggcaagggtctgggcagcgccgtcgtgctccccggagtggaggcggccgagcgcgccggggtgcccgccttcctggagacctccgcgccccgcaacctccccttctacgagcggctcggcttcaccgtcaccgccgacgtcgaggtgcccgaaggaccgcgcacctggtgcatgacccgcaagcccggtgcctga

SEQ ID NO: 5080 - DNA, 3519 bp, Artificial Sequence
  Synthetic Polynucloetide
atggccttaccagtgaccgccttgctcctgccgctggccttgctgctccacgccgccaggccgctcgagcagaaactgatctcggaagaggatctgggctccggcgatcgccctgatcctgccgtgtaccagctgcgggatagcaagagcagcgacaagagcgtgtgtctgttcaccgacttcgacagccagaccaacgtgtcccagagcaaggactccgacgtgtacatcaccgataagtgcgtgctggacatgcggagcatggacttcaagagcaactccgccgtggcctggtccaacaagtccgatttcgcctgcgccaacgccttcaacaacagcattatccccgaggacacattcttcccaagccccgagagcagctgcgacgtgaagctggtggaaaagagcttcgagacagacaccaacctgaacttccagaacctgagcgtgatcggcttcagaatcctgctgctgaaagtggccggctttaacctgctgatgaccctgcggctgtggtccagctctagtcgcgccaagagaagcggatctggcgtgaagcagaccctgaatttcgacctgctgaagctggctggcgacgtggaatccaacccaggccccactagcatggccttaccagtgaccgccttgctcctgccgctggccttgctgctccacgccgccaggccggaggttcagctgcttgagtctggcggaggactggttcaacctggcggaagcctgagactgtcttgtgccgccagcggcttcacctttagcagctacgccatgagctgggtccgacaggctcctggcaaaggactggaatgggtgtccagcatcagcggcagcggcgactacatctactacgccgatagcgtgaagggcagattcaccatcagccgggacatcagcaagaacaccctgtacctccagatgaacagcctgagagccgaggacaccgccgtgtactactgtgccaaagaaggcaccggcgctaacagcagcctggccgattatagaggccagggcacactggtcaccgtgtctagtggcggaggaagcggcggaggatctcaggtccagctcgtcgagtccggcggcggcctcgtccaggccggcgactccgtcaccctctcctgcaccgcctccggccgcaccttctcctcctacgccctcgcctggttccgccagcgccccggcaaggagcgcgagttcgtcgccggcctccgctggggcggccccaccaactacgccgactccgtcaaggaccgcttcaccatctccggcgactccgccaagcacaccatgtacctccagatgaactccctcaagcccgaggacaccgccgtctactactgcggctacaaccccggcggctgggccgtcccctcccagtacgagtacgactcctggggccagggcacccaggtcaccgtctcctccggtaccggcggaggcggatctggcggcggaggtagcggtggcggaggatctgaattcgacatccagatgacacagagccctagcagcctgtctgccagcgtgggagacagagtgaccatcacatgcaaggccagcgaccacatcaacaactggctggcctggtatcagcagaagcctggacaggcccctaagctgctgatctacggcgctaccacactggaaacaggcgtgcccagcagattttctggcagcggctctggcaccgactacaccctgacaatatccagcctccagcctgaggacttcgccacctactactgtcagcagagctggaacaccccttggacattcggccagggcaccaagctggaaatcaagagaggcggaggcggaagtggaggcggaggatctggcggcggaggctctcaagttcagcttcaacagcctggcgctgagctggtcaaacctggcgcttctgtgaagatgagctgcaaagccagcggctacgccttcagcagctactggatcaactggatgaagcagaaacccggccagggactcgaatggatcggccaaatctatcccggcgacggcgacaccaactacaacggcaagttcaagggcagagccacactgaccgccgatacctctagcagcacagcctacatgcagctgagcagcctgaccagcgaagatagcgccgtgtacttctgtgcccggtccatcacaacagtcgtgggctgcgctatggactattggggccagggaacaagcgtgaccgtgtctagtacgcgtgggaaaccaattcccaaccctcttctgggactggattcaaccggcagcggcgaggacctgaagaacgtgttcccacctgaggtggccgtgttcgagcctagcgaggccgagatcagccacacccagaaagccaccctcgtgtgcctggctaccggcttctaccccgaccatgtggaactgtcttggtgggtcaacggcaaagaggtgcacagcggcgtgtgtaccgacccccagccactgaaagaacagcccgccctgaacgacagccggtactgcctgagcagcagactgagagtgtccgccaccttctggcagaacccccggaaccacttcagatgccaggtgcagttctacggcctgagcgagaacgacgagtggacccaggacagagccaagcccgtgacccagatcgtgtctgccgaagcctggggcagagccgattgcggctttaccagcgagagctaccagcagggcgtgctgagcgccaccatcctgtacgagatcctgctgggcaaggccaccctgtacgccgtgctggtgtctgccctggtgctgatggctatggtcaagcggaaggacagccggggaagggccaagcgatctggatctggagcaacaaacttctcactactcaaacaagcaggtgacgtggaggagaatcccgggccttctagaggccatatgaccgagtacaagcccacggtgcgcctcgccacccgcgacgacgtccccagggccgtacgcaccctcgccgccgcgttcgccgactaccccgccacgcgccacaccgtcgatccggaccgccacatcgagcgggtcaccgagctgcaagaactcttcctcacgcgcgtcgggctcgacatcggcaaggtgtgggtcgcggacgacggcgccgcggtggcggtctggaccacgccggagagcgtcgaagcgggggcggtgttcgccgagatcggcccgcgcatggccgagttgagcggttcccggctggccgcgcagcaacagatggaaggcctcctggcgccgcaccggcccaaggagcccgcgtggttcctggccaccgtcggcgtctcgcccgaccaccagggcaagggtctgggcagcgccgtcgtgctccccggagtggaggcggccgagcgcgccggggtgcccgccttcctggagacctccgcgccccgcaacctccccttctacgagcggctcggcttcaccgtcaccgccgacgtcgaggtgcccgaaggaccgcgcacctggtgcatgacccgcaagcccggtgcctga

SEQ ID NO: 5081 - DNA, 3381 bp, Artificial Sequence
  Synthetic Polynucloetide
atggccttaccagtgaccgccttgctcctgccgctggccttgctgctccacgccgccaggccggaggttcagctgcttgagtctggcggaggactggttcaacctggcggaagcctgagactgtcttgtgccgccagcggcttcacctttagcagctacgccatgagctgggtccgacaggctcctggcaaaggactggaatgggtgtccagcatcagcggcagcggcgactacatctactacgccgatagcgtgaagggcagattcaccatcagccgggacatcagcaagaacaccctgtacctccagatgaacagcctgagagccgaggacaccgccgtgtactactgtgccaaagaaggcaccggcgctaacagcagcctggccgattatagaggccagggcacactggtcaccgtgtctagtggcggaggaagcggcggaggatctcaggtccagctcgtcgagtccggcggcggcctcgtccaggccggcgactccgtcaccctctcctgcaccgcctccggccgcaccttctcctcctacgccctcgcctggttccgccagcgccccggcaaggagcgcgagttcgtcgccggcctccgctggggcggccccaccaactacgccgactccgtcaaggaccgcttcaccatctccggcgactccgccaagcacaccatgtacctccagatgaactccctcaagcccgaggacaccgccgtctactactgcggctacaaccccggcggctgggccgtcccctcccagtacgagtacgactcctggggccagggcacccaggtcaccgtctcctccggtaccggcggaggcggatctggcggcggaggtagcggtggcggaggatctgaattcgacatccagatgacacagagccctagcagcctgtctgccagcgtgggagacagagtgaccatcacatgcaaggccagcgaccacatcaacaactggctggcctggtatcagcagaagcctggacaggcccctaagctgctgatctacggcgctaccacactggaaacaggcgtgcccagcagattttctggcagcggctctggcaccgactacaccctgacaatatccagcctccagcctgaggacttcgccacctactactgtcagcagagctggaacaccccttggacattcggccagggcaccaagctggaaatcaagagactcgaggacctgaagaacgtgttcccacctgaggtggccgtgttcgagcctagcgaggccgagatcagccacacccagaaagccaccctcgtgtgcctggctaccggcttctaccccgaccatgtggaactgtcttggtgggtcaacggcaaagaggtgcacagcggcgtgtctaccgacccccagccactgaaagaacagcccgccctgaacgacagccggtactgcctgagcagcagactgagagtgtccgccaccttctggcagaacccccggaaccacttcagatgccaggtgcagttctacggcctgagcgagaacgacgagtggacccaggacagagccaagcccgtgacccagatcgtgtctgccgaagcctggggcagagccgattgcggctttaccagcgagagctaccagcagggcgtgctgagcgccaccatcctgtacgagatcctgctgggcaaggccaccctgtacgccgtgctggtgtctgccctggtgctgatggctatggtcaagcggaaggacagccggggaagggccaagcgatctggatctggagcaacaaacttctcactactcaaacaagcaggtgacgtggaggagaatcccgggcctactagtatggactggatttggcgcatccttttccttgtcggcgctgctaccggcgcgcattccttcgaacaagttcagcttcaacagcctggcgctgagctggtcaaacctggcgcttctgtgaagatgagctgcaaagccagcggctacgccttcagcagctactggatcaactggatgaagcagaaacccggccagggactcgaatggatcggccaaatctatcccggcgacggcgacaccaactacaacggcaagttcaagggcagagccacactgaccgccgatacctctagcagcacagcctacatgcagctgagcagcctgaccagcgaagatagcgccgtgtacttctgtgcccggtccatcacaacagtcgtgggctgcgctatggactattggggccagggaacaagcgtgaccgtgtctagtacgcgtatccagaaccctgatcctgccgtgtaccagctgcgggatagcaagagcagcgacaagagcgtgtgtctgttcaccgacttcgacagccagaccaacgtgtcccagagcaaggactccgacgtgtacatcaccgataagaccgtgctggacatgcggagcatggacttcaagagcaactccgccgtggcctggtccaacaagtccgatttcgcctgcgccaacgccttcaacaacagcattatccccgaggacacattcttcccaagccccgagagcagctgcgacgtgaagctggtggaaaagagcttcgagacagacaccaacctgaacttccagaacctgagcgtgatcggcttcagaatcctgctgctgaaagtggccggctttaacctgctgatgaccctgcggctgtggtccagccgcgccaagagaagcggatctggcgtgaagcagaccctgaatttcgacctgctgaagctggctggcgacgtggaatccaacccaggcccttctagaggccatatgaccgagtacaagcccacggtgcgcctcgccacccgcgacgacgtccccagggccgtacgcaccctcgccgccgcgttcgccgactaccccgccacgcgccacaccgtcgatccggaccgccacatcgagcgggtcaccgagctgcaagaactcttcctcacgcgcgtcgggctcgacatcggcaaggtgtgggtcgcggacgacggcgccgcggtggcggtctggaccacgccggagagcgtcgaagcgggggcggtgttcgccgagatcggcccgcgcatggccgagttgagcggttcccggctggccgcgcagcaacagatggaaggcctcctggcgccgcaccggcccaaggagcccgcgtggttcctggccaccgtcggcgtctcgcccgaccaccagggcaagggtctgggcagcgccgtcgtgctccccggagtggaggcggccgagcgcgccggggtgcccgccttcctggagacctccgcgccccgcaacctccccttctacgagcggctcggcttcaccgtcaccgccgacgtcgaggtgcccgaaggaccgcgcacctggtgcatgacccgcaagcccggtgcctga

SEQ ID NO: 5082 - DNA, 3627 bp, Artificial Sequence
  Synthetic Polynucloetide
atggccttaccagtgaccgccttgctcctgccgctggccttgctgctccacgccgccaggccggaggttcagctgcttgagtctggcggaggactggttcaacctggcggaagcctgagactgtcttgtgccgccagcggcttcacctttagcagctacgccatgagctgggtccgacaggctcctggcaaaggactggaatgggtgtccagcatcagcggcagcggcgactacatctactacgccgatagcgtgaagggcagattcaccatcagccgggacatcagcaagaacaccctgtacctccagatgaacagcctgagagccgaggacaccgccgtgtactactgtgccaaagaaggcaccggcgctaacagcagcctggccgattatagaggccagggcacactggtcaccgtgtctagtggcggaggaagcggcggaggatctcaggtccagctcgtcgagtccggcggcggcctcgtccaggccggcgactccgtcaccctctcctgcaccgcctccggccgcaccttctcctcctacgccctcgcctggttccgccagcgccccggcaaggagcgcgagttcgtcgccggcctccgctggggcggccccaccaactacgccgactccgtcaaggaccgcttcaccatctccggcgactccgccaagcacaccatgtacctccagatgaactccctcaagcccgaggacaccgccgtctactactgcggctacaaccccggcggctgggccgtcccctcccagtacgagtacgactcctggggccagggcacccaggtcaccgtctcctccggtaccggcggaggcggatctggcggcggaggtagcggtggcggaggatctgaattcgacatccagatgacacagagccctagcagcctgtctgccagcgtgggagacagagtgaccatcacatgcaaggccagcgaccacatcaacaactggctggcctggtatcagcagaagcctggacaggcccctaagctgctgatctacggcgctaccacactggaaacaggcgtgcccagcagattttctggcagcggctctggcaccgactacaccctgacaatatccagcctccagcctgaggacttcgccacctactactgtcagcagagctggaacaccccttggacattcggccagggcaccaagctggaaatcaagagactcgaggacctgaagaacgtgttcccacctgaggtggccgtgttcgagcctagcgaggccgagatcagccacacccagaaagccaccctcgtgtgcctggctaccggcttctaccccgaccatgtggaactgtcttggtgggtcaacggcaaagaggtgcacagcggcgtgtctaccgacccccagccactgaaagaacagcccgccctgaacgacagccggtactgcctgagcagcagactgagagtgtccgccaccttctggcagaacccccggaaccacttcagatgccaggtgcagttctacggcctgagcgagaacgacgagtggacccaggacagagccaagcccgtgacccagatcgtgtctgccgaagcctggggcagagccgattgcggctttaccagcgagagctaccagcagggcgtgctgagcgccaccatcctgtacgagatcctgctgggcaaggccaccctgtacgccgtgctggtgtctgccctggtgctgatggctatggtcaagcggaaggacagccggggaagggccaagcgatctggatctggagcaacaaacttctcactactcaaacaagcaggtgacgtggaggagaatcccgggcctactagtatggactggatttggcgcatccttttccttgtcggcgctgctaccggcgcgcattccttcgaacaagttcagcttcaacagcctggcgctgagctggtcaaacctggcgcttctgtgaagatgagctgcaaagccagcggctacgccttcagcagctactggatcaactggatgaagcagaaacccggccagggactcgaatggatcggccaaatctatcccggcgacggcgacaccaactacaacggcaagttcaagggcagagccacactgaccgccgatacctctagcagcacagcctacatgcagctgagcagcctgaccagcgaagatagcgccgtgtacttctgtgcccggtccatcacaacagtcgtgggctgcgctatggactattggggccagggaacaagcgtgaccgtgtctagtacgcgtgagcagaaactgatctcggaagaggatgggagcggcaccccattcccttctctggcccctcccatcatgctgctggtggacggcaagcagcagatggtggtcgtgtgcctggtgctggatgtggccccacctggactggacagccccatctggtttagcgccggcaatggctctgccctggacgcctttacctacggcccaagccctgccaccgatggcacctggacaaatctggcccacctgagcctgcccagcgaggaactggcttcttgggagcctctcgtgtgccacacaggacctggcgctgagggacacagcagatccacccagcctatgcacctgtctggcgaggccagcaccgccagaacctgtcctcaggaacctctgagaggcacccctggcggagcactgtggctgggagtgctgagactgctgctgttcaagctgctgctgtttgacctgctgctgacctgctcctgtctgtgcgatcctgccggccctctgccttctcctgccaccaccacaagactgagagccctgggcagccacagactgcaccctgccacagagacaggcggcagagaggccacaagcagccctagaccccagcccagagacagaagatggggcgataccccccctggcagaaagcctggatctccagtccgcgccaagagaagcggatctggcgtgaagcagaccctgaatttcgacctgctgaagctggctggcgacgtggaatccaacccaggcccttctagaggccatatgaccgagtacaagcccacggtgcgcctcgccacccgcgacgacgtccccagggccgtacgcaccctcgccgccgcgttcgccgactaccccgccacgcgccacaccgtcgatccggaccgccacatcgagcgggtcaccgagctgcaagaactcttcctcacgcgcgtcgggctcgacatcggcaaggtgtgggtcgcggacgacggcgccgcggtggcggtctggaccacgccggagagcgtcgaagcgggggcggtgttcgccgagatcggcccgcgcatggccgagttgagcggttcccggctggccgcgcagcaacagatggaaggcctcctggcgccgcaccggcccaaggagcccgcgtggttcctggccaccgtcggcgtctcgcccgaccaccagggcaagggtctgggcagcgccgtcgtgctccccggagtggaggcggccgagcgcgccggggtgcccgccttcctggagacctccgcgccccgcaacctccccttctacgagcggctcggcttcaccgtcaccgccgacgtcgaggtgcccgaaggaccgcgcacctggtgcatgacccgcaagcccggtgcctga

SEQ ID NO: 5083 - DNA, 3681 bp, Artificial Sequence
  Synthetic Polynucloetide
atggccttaccagtgaccgccttgctcctgccgctggccttgctgctccacgccgccaggccgctcgaggacctgaagaacgtgttcccacctgaggtggccgtgttcgagcctagcgaggccgagatcagccacacccagaaagccaccctcgtgtgcctggctaccggcttctaccccgaccatgtggaactgtcttggtgggtcaacggcaaagaggtgcacagcggcgtgtctaccgacccccagccactgaaagaacagcccgccctgaacgacagccggtactgcctgagcagcagactgagagtgtccgccaccttctggcagaacccccggaaccacttcagatgccaggtgcagttctacggcctgagcgagaacgacgagtggacccaggacagagccaagcccgtgacccagatcgtgtctgccgaagcctggggcagagccgattgcggctttaccagcgagagctaccagcagggcgtgctgagcgccaccatcctgtacgagatcctgctgggcaaggccaccctgtacgccgtgctggtgtctgccctggtgctgatggctatggtcaagcggaaggacagccggggaagggccaagcgatctggatctggagcaacaaacttctcactactcaaacaagcaggtgacgtggaggagaatcccgggcctactagcatggccttaccagtgaccgccttgctcctgccgctggccttgctgctccacgccgccaggccggaggttcagctgcttgagtctggcggaggactggttcaacctggcggaagcctgagactgtcttgtgccgccagcggcttcacctttagcagctacgccatgagctgggtccgacaggctcctggcaaaggactggaatgggtgtccagcatcagcggcagcggcgactacatctactacgccgatagcgtgaagggcagattcaccatcagccgggacatcagcaagaacaccctgtacctccagatgaacagcctgagagccgaggacaccgccgtgtactactgtgccaaagaaggcaccggcgctaacagcagcctggccgattatagaggccagggcacactggtcaccgtgtctagtggcggaggaagcggcggaggatctcaggtccagctcgtcgagtccggcggcggcctcgtccaggccggcgactccgtcaccctctcctgcaccgcctccggccgcaccttctcctcctacgccctcgcctggttccgccagcgccccggcaaggagcgcgagttcgtcgccggcctccgctggggcggccccaccaactacgccgactccgtcaaggaccgcttcaccatctccggcgactccgccaagcacaccatgtacctccagatgaactccctcaagcccgaggacaccgccgtctactactgcggctacaaccccggcggctgggccgtcccctcccagtacgagtacgactcctggggccagggcacccaggtcaccgtctcctccggtaccggcggaggcggatctggcggcggaggtagcggtggcggaggatctgaattcgacatccagatgacacagagccctagcagcctgtctgccagcgtgggagacagagtgaccatcacatgcaaggccagcgaccacatcaacaactggctggcctggtatcagcagaagcctggacaggcccctaagctgctgatctacggcgctaccacactggaaacaggcgtgcccagcagattttctggcagcggctctggcaccgactacaccctgacaatatccagcctccagcctgaggacttcgccacctactactgtcagcagagctggaacaccccttggacattcggccagggcaccaagctggaaatcaagagaggcggaggcggaagtggaggcggaggatctggcggcggaggctctcaagttcagcttcaacagcctggcgctgagctggtcaaacctggcgcttctgtgaagatgagctgcaaagccagcggctacgccttcagcagctactggatcaactggatgaagcagaaacccggccagggactcgaatggatcggccaaatctatcccggcgacggcgacaccaactacaacggcaagttcaagggcagagccacactgaccgccgatacctctagcagcacagcctacatgcagctgagcagcctgaccagcgaagatagcgccgtgtacttctgtgcccggtccatcacaacagtcgtgggctgcgctatggactattggggccagggaacaagcgtgaccgtgtctagtacgcgtgagcagaaactgatctcggaagaggatctggggagcggcaccccattcccttctctggcccctcccatcatgctgctggtggacggcaagcagcagatggtggtcgtgtgcctggtgctggatgtggccccacctggactggacagccccatctggtttagcgccggcaatggctctgccctggacgcctttacctacggcccaagccctgccaccgatggcacctggacaaatctggcccacctgagcctgcccagcgaggaactggcttcttgggagcctctcgtgtgccacacaggacctggcgctgagggacacagcagatccacccagcctatgcacctgtctggcgaggccagcaccgccagaacctgtcctcaggaacctctgagaggcacccctggcggagcactgtggctgggagtgctgagactgctgctgttcaagctgctgctgtttgacctgctgctgacctgctcctgtctgtgcgatcctgccggccctctgccttctcctgccaccaccacaagactgagagccctgggcagccacagactgcaccctgccacagagacaggcggcagagaggccacaagcagccctagaccccagcccagagacagaagatggggcgataccccccctggcagaaagcctggatctccagtccgcgccaagagaagcggatctggcgtgaagcagaccctgaatttcgacctgctgaagctggctggcgacgtggaatccaacccaggcccttctagatctagaggccatatgaccgagtacaagcccacggtgcgcctcgccacccgcgacgacgtccccagggccgtacgcaccctcgccgccgcgttcgccgactaccccgccacgcgccacaccgtcgatccggaccgccacatcgagcgggtcaccgagctgcaagaactcttcctcacgcgcgtcgggctcgacatcggcaaggtgtgggtcgcggacgacggcgccgcggtggcggtctggaccacgccggagagcgtcgaagcgggggcggtgttcgccgagatcggcccgcgcatggccgagttgagcggttcccggctggccgcgcagcaacagatggaaggcctcctggcgccgcaccggcccaaggagcccgcgtggttcctggccaccgtcggcgtctcgcccgaccaccagggcaagggtctgggcagcgccgtcgtgctccccggagtggaggcggccgagcgcgccggggtgcccgccttcctggagacctccgcgccccgcaacctccccttctacgagcggctcggcttcaccgtcaccgccgacgtcgaggtgcccgaaggaccgcgcacctggtgcatgacccgcaagcccggtgcctga

SEQ ID NO: 5084 - DNA, 3492 bp, Artificial Sequence
  Synthetic Polynucloetide
atggccttaccagtgaccgccttgctcctgccgctggccttgctgctccacgccgccaggccggaggttcagctgcttgagtctggcggaggactggttcaacctggcggaagcctgagactgtcttgtgccgccagcggcttcacctttagcagctacgccatgagctgggtccgacaggctcctggcaaaggactggaatgggtgtccagcatcagcggcagcggcgactacatctactacgccgatagcgtgaagggcagattcaccatcagccgggacatcagcaagaacaccctgtacctccagatgaacagcctgagagccgaggacaccgccgtgtactactgtgccaaagaaggcaccggcgctaacagcagcctggccgattatagaggccagggcacactggtcaccgtgtctagtggcggaggaagcggcggaggatctcaggtccagctcgtcgagtccggcggcggcctcgtccaggccggcgactccgtcaccctctcctgcaccgcctccggccgcaccttctcctcctacgccctcgcctggttccgccagcgccccggcaaggagcgcgagttcgtcgccggcctccgctggggcggccccaccaactacgccgactccgtcaaggaccgcttcaccatctccggcgactccgccaagcacaccatgtacctccagatgaactccctcaagcccgaggacaccgccgtctactactgcggctacaaccccggcggctgggccgtcccctcccagtacgagtacgactcctggggccagggcacccaggtcaccgtctcctccggtaccggcggaggcggatctggcggcggaggtagcggtggcggaggatctgaattcgacatccagatgacacagagccctagcagcctgtctgccagcgtgggagacagagtgaccatcacatgcaaggccagcgaccacatcaacaactggctggcctggtatcagcagaagcctggacaggcccctaagctgctgatctacggcgctaccacactggaaacaggcgtgcccagcagattttctggcagcggctctggcaccgactacaccctgacaatatccagcctccagcctgaggacttcgccacctactactgtcagcagagctggaacaccccttggacattcggccagggcaccaagctggaaatcaagagactcgaggggaaaccaattcccaaccctcttctgggactggattcaaccggcagcggcgacaagcagctggacgccgacgtgtcccccaagcctaccatcttcctgccctctatcgccgagacaaagctccagaaggccggcacctacctgtgcctgctggaaaagttcttcccagatgtgattaagatccactggcaggaaaagaagtccaacaccatcctgggcagccaggaaggcaacaccatgaagaccaacgacacctacatgaagttcagctggctgaccgtgcccgagaagtccctggacaaagaacacagatgcatcgtgcggcacgaaaacaacaagaacggcgtggaccaggaaatcatcttcccacccatcaagaccgatgtgattacaatggaccccaaggacaactgctccaaggacgccaacgataccctgctgctccagctgaccaacaccagcgcctactacatgtacttgttgctgctgctgaagtccgtggtgtacttcgccatcatcacatgctgcctgctgcggagaaccgccttctgctgcaacggcgagaagtctagggccaagcgatctggatctggagcaacaaacttctcactactcaaacaagcaggtgacgtggaggagaatcccgggcctactagtatggactggatttggcgcatccttttccttgtcggcgctgctaccggcgcgcattccttcgaacaagttcagcttcaacagcctggcgctgagctggtcaaacctggcgcttctgtgaagatgagctgcaaagccagcggctacgccttcagcagctactggatcaactggatgaagcagaaacccggccagggactcgaatggatcggccaaatctatcccggcgacggcgacaccaactacaacggcaagttcaagggcagagccacactgaccgccgatacctctagcagcacagcctacatgcagctgagcagcctgaccagcgaagatagcgccgtgtacttctgtgcccggtccatcacaacagtcgtgggctgcgctatggactattggggccagggaacaagcgtgaccgtgtctagtacgcgtgagcagaaactgatctcggaagaggatgggagcggcagccagcctcacaccaagcccagcgtgttcgtgatgaagaacggcaccaacgtggcctgcctcgtgaaagagttctaccccaaggacatcaggatcaacctggtgtccagcaagaagatcaccgagttcgaccccgccatcgtgatctcccccagcggcaagtacaacgccgtgaagctggggaagtacgaggacagcaacagcgtgacctgctccgtgcagcacgacaacaagaccgtgcacagcaccgactttgaagtgaaaaccgactccaccgaccacgtgaagcccaaagagacagagaacaccaagcagcccagcaagagctgccacaagcccaaggccatcgtgcacaccgagaaagtgaacatgatgagcctgaccgtgctgggcctgcggatgctgttcgccaaaaccgtggccgtgaacttcctgctgaccgccaagctgttcttcctccgcgccaagagaagcggatctggcgtgaagcagaccctgaatttcgacctgctgaagctggctggcgacgtggaatccaacccaggcccttctagaggccatatgaccgagtacaagcccacggtgcgcctcgccacccgcgacgacgtccccagggccgtacgcaccctcgccgccgcgttcgccgactaccccgccacgcgccacaccgtcgatccggaccgccacatcgagcgggtcaccgagctgcaagaactcttcctcacgcgcgtcgggctcgacatcggcaaggtgtgggtcgcggacgacggcgccgcggtggcggtctggaccacgccggagagcgtcgaagcgggggcggtgttcgccgagatcggcccgcgcatggccgagttgagcggttcccggctggccgcgcagcaacagatggaaggcctcctggcgccgcaccggcccaaggagcccgcgtggttcctggccaccgtcggcgtctcgcccgaccaccagggcaagggtctgggcagcgccgtcgtgctccccggagtggaggcggccgagcgcgccggggtgcccgccttcctggagacctccgcgccccgcaacctccccttctacgagcggctcggcttcaccgtcaccgccgacgtcgaggtgcccgaaggaccgcgcacctggtgcatgacccgcaagcccggtgcctga

SEQ ID NO: 5085 - DNA, 2703 bp, Artificial Sequence
  Synthetic Polynucloetide
atggccttaccagtgaccgccttgctcctgccgctggccttgctgctccacgccgccaggccggaggttcagctgcttgagtctggcggaggactggttcaacctggcggaagcctgagactgtcttgtgccgccagcggcttcacctttagcagctacgccatgagctgggtccgacaggctcctggcaaaggactggaatgggtgtccagcatcagcggcagcggcgactacatctactacgccgatagcgtgaagggcagattcaccatcagccgggacatcagcaagaacaccctgtacctccagatgaacagcctgagagccgaggacaccgccgtgtactactgtgccaaagaaggcaccggcgctaacagcagcctggccgattatagaggccagggcacactggtcaccgtgtctagtggcggaggaagcggcggaggatctcaggtccagctcgtcgagtccggcggcggcctcgtccaggccggcgactccgtcaccctctcctgcaccgcctccggccgcaccttctcctcctacgccctcgcctggttccgccagcgccccggcaaggagcgcgagttcgtcgccggcctccgctggggcggccccaccaactacgccgactccgtcaaggaccgcttcaccatctccggcgactccgccaagcacaccatgtacctccagatgaactccctcaagcccgaggacaccgccgtctactactgcggctacaaccccggcggctgggccgtcccctcccagtacgagtacgactcctggggccagggcacccaggtcaccgtctcctccggtaccggcggaggcggatctggcggcggaggtagcggtggcggaggatctgaattcgacatccagatgacacagagccctagcagcctgtctgccagcgtgggagacagagtgaccatcacatgcaaggccagcgaccacatcaacaactggctggcctggtatcagcagaagcctggacaggcccctaagctgctgatctacggcgctaccacactggaaacaggcgtgcccagcagattttctggcagcggctctggcaccgactacaccctgacaatatccagcctccagcctgaggacttcgccacctactactgtcagcagagctggaacaccccttggacattcggccagggcaccaagctggaaatcaagagactcgagagccagcctcacaccaagcccagcgtgttcgtgatgaagaacggcaccaacgtggcctgcctcgtgaaagagttctaccccaaggacatcaggatcaacctggtgtccagcaagaagatcaccgagttcgaccccgccatcgtgatctcccccagcggcaagtacaacgccgtgaagctggggaagtacgaggacagcaacagcgtgacctgctccgtgcagcacgacaacaagaccgtgcacagcaccgactttgaagtgaaaaccgactccaccgaccacgtgaagcccaaagagacagagaacaccaagcagcccagcaagagctgccacaagcccaaggccatcgtgcacaccgagaaagtgaacatgatgagcctgaccgtgctgggcctgcggatgctgttcgccaaaaccgtggccgtgaacttcctgctgaccgccaagctgttcttcctcagggccaagcgatctggatctggagcaacaaacttctcactactcaaacaagcaggtgacgtggaggagaatcccgggcctactagtatggactggatttggcgcatccttttccttgtcggcgctgctaccggcgcgcattccttcgaacaagttcagcttcaacagcctggcgctgagctggtcaaacctggcgcttctgtgaagatgagctgcaaagccagcggctacgccttcagcagctactggatcaactggatgaagcagaaacccggccagggactcgaatggatcggccaaatctatcccggcgacggcgacaccaactacaacggcaagttcaagggcagagccacactgaccgccgatacctctagcagcacagcctacatgcagctgagcagcctgaccagcgaagatagcgccgtgtacttctgtgcccggtccatcacaacagtcgtgggctgcgctatggactattggggccagggaacaagcgtgaccgtgtctagtacgcgtgacaagcagctggacgccgacgtgtcccccaagcctaccatcttcctgccctctatcgccgagacaaagctccagaaggccggcacctacctgtgcctgctggaaaagttcttcccagatgtgattaagatccactggcaggaaaagaagtccaacaccatcctgggcagccaggaaggcaacaccatgaagaccaacgacacctacatgaagttcagctggctgaccgtgcccgagaagtccctggacaaagaacacagatgcatcgtgcggcacgaaaacaacaagaacggcgtggaccaggaaatcatcttcccacccatcaagaccgatgtgattacaatggaccccaaggacaactgctccaaggacgccaacgataccctgctgctccagctgaccaacaccagcgcctactacatgtacttgttgctgctgctgaagtccgtggtgtacttcgccatcatcacatgctgcctgctgcggagaaccgccttctgctgcaacggcgagaagtct

SEQ ID NO: 5086 - DNA, 3537 bp, Artificial Sequence
  Synthetic Polynucloetide
atggccttaccagtgaccgccttgctcctgccgctggccttgctgctccacgccgccaggccgctcgaggggaaaccaattcccaaccctcttctgggactggattcaaccggcagcggcgacaagcagctggacgccgacgtgtcccccaagcctaccatcttcctgccctctatcgccgagacaaagctccagaaggccggcacctacctgtgcctgctggaaaagttcttcccagatgtgattaagatccactggcaggaaaagaagtccaacaccatcctgggcagccaggaaggcaacaccatgaagaccaacgacacctacatgaagttcagctggctgaccgtgcccgagaagtccctggacaaagaacacagatgcatcgtgcggcacgaaaacaacaagaacggcgtggaccaggaaatcatcttcccacccatcaagaccgatgtgattacaatggaccccaaggacaactgctccaaggacgccaacgataccctgctgctccagctgaccaacaccagcgcctactacatgtacttgttgctgctgctgaagtccgtggtgtacttcgccatcatcacatgctgcctgctgcggagaaccgccttctgctgcaacggcgagaagtctagggccaagcgatctggatctggagcaacaaacttctcactactcaaacaagcaggtgacgtggaggagaatcccgggcctactagcatggccttaccagtgaccgccttgctcctgccgctggccttgctgctccacgccgccaggccggaggttcagctgcttgagtctggcggaggactggttcaacctggcggaagcctgagactgtcttgtgccgccagcggcttcacctttagcagctacgccatgagctgggtccgacaggctcctggcaaaggactggaatgggtgtccagcatcagcggcagcggcgactacatctactacgccgatagcgtgaagggcagattcaccatcagccgggacatcagcaagaacaccctgtacctccagatgaacagcctgagagccgaggacaccgccgtgtactactgtgccaaagaaggcaccggcgctaacagcagcctggccgattatagaggccagggcacactggtcaccgtgtctagtggcggaggaagcggcggaggatctcaggtccagctcgtcgagtccggcggcggcctcgtccaggccggcgactccgtcaccctctcctgcaccgcctccggccgcaccttctcctcctacgccctcgcctggttccgccagcgccccggcaaggagcgcgagttcgtcgccggcctccgctggggcggccccaccaactacgccgactccgtcaaggaccgcttcaccatctccggcgactccgccaagcacaccatgtacctccagatgaactccctcaagcccgaggacaccgccgtctactactgcggctacaaccccggcggctgggccgtcccctcccagtacgagtacgactcctggggccagggcacccaggtcaccgtctcctccggtaccggcggaggcggatctggcggcggaggtagcggtggcggaggatctgaattcgacatccagatgacacagagccctagcagcctgtctgccagcgtgggagacagagtgaccatcacatgcaaggccagcgaccacatcaacaactggctggcctggtatcagcagaagcctggacaggcccctaagctgctgatctacggcgctaccacactggaaacaggcgtgcccagcagattttctggcagcggctctggcaccgactacaccctgacaatatccagcctccagcctgaggacttcgccacctactactgtcagcagagctggaacaccccttggacattcggccagggcaccaagctggaaatcaagagaggcggaggcggaagtggaggcggaggatctggcggcggaggctctcaagttcagcttcaacagcctggcgctgagctggtcaaacctggcgcttctgtgaagatgagctgcaaagccagcggctacgccttcagcagctactggatcaactggatgaagcagaaacccggccagggactcgaatggatcggccaaatctatcccggcgacggcgacaccaactacaacggcaagttcaagggcagagccacactgaccgccgatacctctagcagcacagcctacatgcagctgagcagcctgaccagcgaagatagcgccgtgtacttctgtgcccggtccatcacaacagtcgtgggctgcgctatggactattggggccagggaacaagcgtgaccgtgtctagtacgcgtgagcagaaactgatctcggaagaggatgggagcggcagccagcctcacaccaagcccagcgtgttcgtgatgaagaacggcaccaacgtggcctgcctcgtgaaagagttctaccccaaggacatcaggatcaacctggtgtccagcaagaagatcaccgagttcgaccccgccatcgtgatctcccccagcggcaagtacaacgccgtgaagctggggaagtacgaggacagcaacagcgtgacctgctccgtgcagcacgacaacaagaccgtgcacagcaccgactttgaagtgaaaaccgactccaccgaccacgtgaagcccaaagagacagagaacaccaagcagcccagcaagagctgccacaagcccaaggccatcgtgcacaccgagaaagtgaacatgatgagcctgaccgtgctgggcctgcggatgctgttcgccaaaaccgtggccgtgaacttcctgctgaccgccaagctgttcttcctccgcgccaagagaagcggatctggcgtgaagcagaccctgaatttcgacctgctgaagctggctggcgacgtggaatccaacccaggcccttctagaggccatatgaccgagtacaagcccacggtgcgcctcgccacccgcgacgacgtccccagggccgtacgcaccctcgccgccgcgttcgccgactaccccgccacgcgccacaccgtcgatccggaccgccacatcgagcgggtcaccgagctgcaagaactcttcctcacgcgcgtcgggctcgacatcggcaaggtgtgggtcgcggacgacggcgccgcggtggcggtctggaccacgccggagagcgtcgaagcgggggcggtgttcgccgagatcggcccgcgcatggccgagttgagcggttcccggctggccgcgcagcaacagatggaaggcctcctggcgccgcaccggcccaaggagcccgcgtggttcctggccaccgtcggcgtctcgcccgaccaccagggcaagggtctgggcagcgccgtcgtgctccccggagtggaggcggccgagcgcgccggggtgcccgccttcctggagacctccgcgccccgcaacctccccttctacgagcggctcggcttcaccgtcaccgccgacgtcgaggtgcccgaaggaccgcgcacctggtgcatgacccgcaagcccggtgcctga

SEQ ID NO: 5087 - DNA, 3912 bp, Artificial Sequence
  Synthetic Polynucloetide
atggccttaccagtgaccgccttgctcctgccgctggccttgctgctccacgccgccaggccggaggttcagctgcttgagtctggcggaggactggttcaacctggcggaagcctgagactgtcttgtgccgccagcggcttcacctttagcagctacgccatgagctgggtccgacaggctcctggcaaaggactggaatgggtgtccagcatcagcggcagcggcgactacatctactacgccgatagcgtgaagggcagattcaccatcagccgggacatcagcaagaacaccctgtacctccagatgaacagcctgagagccgaggacaccgccgtgtactactgtgccaaagaaggcaccggcgctaacagcagcctggccgattatagaggccagggcacactggtcaccgtgtctagtggcggaggaagcggcggaggatctcaggtccagctcgtcgagtccggcggcggcctcgtccaggccggcgactccgtcaccctctcctgcaccgcctccggccgcaccttctcctcctacgccctcgcctggttccgccagcgccccggcaaggagcgcgagttcgtcgccggcctccgctggggcggccccaccaactacgccgactccgtcaaggaccgcttcaccatctccggcgactccgccaagcacaccatgtacctccagatgaactccctcaagcccgaggacaccgccgtctactactgcggctacaaccccggcggctgggccgtcccctcccagtacgagtacgactcctggggccagggcacccaggtcaccgtctcctccggtaccggcggaggcggatctggcggcggaggtagcggtggcggaggatctgaattcgacatccagatgacacagagccctagcagcctgtctgccagcgtgggagacagagtgaccatcacatgcaaggccagcgaccacatcaacaactggctggcctggtatcagcagaagcctggacaggcccctaagctgctgatctacggcgctaccacactggaaacaggcgtgcccagcagattttctggcagcggctctggcaccgactacaccctgacaatatccagcctccagcctgaggacttcgccacctactactgtcagcagagctggaacaccccttggacattcggccagggcaccaagctggaaatcaagagaggacagcctaaggccaatcctaccgtgacactgttccctccaagcagcgaagaactccaggccaacaaggccacacttgtgtgcctgatctccgacttctaccctggggctgtgacagtggcttggaaggccgatggatctcctgtgaaagccggcgtggaaaccaccaagccatccaagcagagcaacaacaaatacgccgccagctcctacctgagcctgacacctgagcagtggaagtcccacagatcctacagctgccaagtgacccacgaaggcagcaccgtggaaaagacagtggcccctacagagtgcagcggatcccagagcttcggcctgctggaccccaagctgtgctacctgctggatggcatcctgttcatctacggcgtgatcctgaccgccctgttcctgagagtgaagttcagcagaagcgccgacgcccctgcctaccagcagggacagaaccaactgtacaacgagctgaacctgggcagacgggaagagtacgacgtgctggacaagcggagaggcagggaccctgagatgggcggaaagccccagcggagaaagaacccccaggaaggactgtataacgaactccagaaagacaagatggccgaagcctacagcgagatcggcatgaagggcgagcggagaagaggcaagggccacgatggcctgtaccagggcctgagcaccgccaccaaggacacctatgacgccctgcacatgcaggccctgcctccaagaagggccaagcgatctggatctggagcaacaaacttctcactactcaaacaagcaggtgacgtggaggagaatcccgggcctactagtatggactggatttggcgcatccttttccttgtcggcgctgctaccggcgcgcattccttcgaacaagttcagcttcaacagcctggcgctgagctggtcaaacctggcgcttctgtgaagatgagctgcaaagccagcggctacgccttcagcagctactggatcaactggatgaagcagaaacccggccagggactcgaatggatcggccaaatctatcccggcgacggcgacaccaactacaacggcaagttcaagggcagagccacactgaccgccgatacctctagcagcacagcctacatgcagctgagcagcctgaccagcgaagatagcgccgtgtacttctgtgcccggtccatcacaacagtcgtgggctgcgctatggactattggggccagggaacaagcgtgaccgtgtctagtgcctctacaaagggaccctccgtgtttcctctggctcccagcagcaagtctacaagcggaggaacagccgctctgggctgcctggtcaaggattactttcccgagcctgtgaccgtgtcctggaatagcggagcactgacaagcggcgtgcacacctttccagccgtgctgcaaagcagcggcctgtactctctgagcagcgtggtcacagtgcctagctctagcctgggcacccagacctacatctgcaatgtgaaccacaagcctagcaacaccaaggtggacaagagagtggaacccaagagctgtggtacccagagttttgggttgttggaccctaaattgtgctatctgttggacggaatcctgttcatttacggagtgatcctgaccgcattgttcctgcgggttaagttttccagatccgcagacgcacccgcttaccaacaagggcagaaccaactctacaatgaacttaatttggggcggagggaagagtacgacgttctggacaaaaggaggggacgagatcccgagatgggcggaaagcctcagcgaaggaagaatccgcaagaggggctttataacgaactccagaaagataaaatggcagaagcctatagtgagattgggatgaagggagaaaggaggaggggtaaaggtcacgatgggttgtaccaaggattgagcacagccactaaagatacctatgatgcgctccacatgcaggccctgccgccaagacgcgccaagagaagcggatctggcgtgaagcagaccctgaatttcgacctgctgaagctggctggcgacgtggaatccaacccaggcccttctagaggccatatgaccgagtacaagcccacggtgcgcctcgccacccgcgacgacgtccccagggccgtacgcaccctcgccgccgcgttcgccgactaccccgccacgcgccacaccgtcgatccggaccgccacatcgagcgggtcaccgagctgcaagaactcttcctcacgcgcgtcgggctcgacatcggcaaggtgtgggtcgcggacgacggcgccgcggtggcggtctggaccacgccggagagcgtcgaagcgggggcggtgttcgccgagatcggcccgcgcatggccgagttgagcggttcccggctggccgcgcagcaacagatggaaggcctcctggcgccgcaccggcccaaggagcccgcgtggttcctggccaccgtcggcgtctcgcccgaccaccagggcaagggtctgggcagcgccgtcgtgctccccggagtggaggcggccgagcgcgccggggtgcccgccttcctggagacctccgcgccccgcaacctccccttctacgagcggctcggcttcaccgtcaccgccgacgtcgaggtgcccgaaggaccgcgcacctggtgcatgacccgcaagcccggtgcctga

SEQ ID NO: 5088 - DNA, 3267 bp, Artificial Sequence
  Synthetic Polynucloetide
atggccttaccagtgaccgccttgctcctgccgctggccttgctgctccacgccgccaggccggaggttcagctgcttgagtctggcggaggactggttcaacctggcggaagcctgagactgtcttgtgccgccagcggcttcacctttagcagctacgccatgagctgggtccgacaggctcctggcaaaggactggaatgggtgtccagcatcagcggcagcggcgactacatctactacgccgatagcgtgaagggcagattcaccatcagccgggacatcagcaagaacaccctgtacctccagatgaacagcctgagagccgaggacaccgccgtgtactactgtgccaaagaaggcaccggcgctaacagcagcctggccgattatagaggccagggcacactggtcaccgtgtctagtggcggaggaagcggcggaggatctcaggtccagctcgtcgagtccggcggcggcctcgtccaggccggcgactccgtcaccctctcctgcaccgcctccggccgcaccttctcctcctacgccctcgcctggttccgccagcgccccggcaaggagcgcgagttcgtcgccggcctccgctggggcggccccaccaactacgccgactccgtcaaggaccgcttcaccatctccggcgactccgccaagcacaccatgtacctccagatgaactccctcaagcccgaggacaccgccgtctactactgcggctacaaccccggcggctgggccgtcccctcccagtacgagtacgactcctggggccagggcacccaggtcaccgtctcctccggtaccggcggaggcggatctggcggcggaggtagcggtggcggaggatctgaattcgacatccagatgacacagagccctagcagcctgtctgccagcgtgggagacagagtgaccatcacatgcaaggccagcgaccacatcaacaactggctggcctggtatcagcagaagcctggacaggcccctaagctgctgatctacggcgctaccacactggaaacaggcgtgcccagcagattttctggcagcggctctggcaccgactacaccctgacaatatccagcctccagcctgaggacttcgccacctactactgtcagcagagctggaacaccccttggacattcggccagggcaccaagctggaaatcaagagactcgaggacctgaagaacgtgttcccacctgaggtggccgtgttcgagcctagcgaggccgagatcagccacacccagaaagccaccctcgtgtgcctggctaccggcttctaccccgaccatgtggaactgtcttggtgggtcaacggcaaagaggtgcacagcggcgtgtctaccgacccccagccactgaaagaacagcccgccctgaacgacagccggtactgcctgagcagcagactgagagtgtccgccaccttctggcagaacccccggaaccacttcagatgccaggtgcagttctacggcctgagcgagaacgacgagtggacccaggacagagccaagcccgtgacccagatcgtgtctgccgaagcctggggcagagccgattgcggatcccagagcttcggcctgctggaccccaagctgtgctacctgctggatggcatcctgttcatctacggcgtgatcctgaccgccctgttcctgagagtgaagttcagcagaagcgccgacgcccctgcctaccagcagggacagaaccaactgtacaacgagctgaacctgggcagacgggaagagtacgacgtgctggacaagcggagaggcagggaccctgagatgggcggaaagccccagcggagaaagaacccccaggaaggactgtataacgaactccagaaagacaagatggccgaagcctacagcgagatcggcatgaagggcgagcggagaagaggcaagggccacgatggcctgtaccagggcctgagcaccgccaccaaggacacctatgacgccctgcacatgcaggccctgcctccaagaagggccaagcgatctggatctggagcaacaaacttctcactactcaaacaagcaggtgacgtggaggagaatcccgggcctactagtatggactggatttggcgcatccttttccttgtcggcgctgctaccggcgcgcattccttcgaacaagttcagcttcaacagcctggcgctgagctggtcaaacctggcgcttctgtgaagatgagctgcaaagccagcggctacgccttcagcagctactggatcaactggatgaagcagaaacccggccagggactcgaatggatcggccaaatctatcccggcgacggcgacaccaactacaacggcaagttcaagggcagagccacactgaccgccgatacctctagcagcacagcctacatgcagctgagcagcctgaccagcgaagatagcgccgtgtacttctgtgcccggtccatcacaacagtcgtgggctgcgctatggactattggggccagggaacaagcgtgaccgtgtctagtacgcgtatccagaaccctgatcctgccgtgtaccagctgcgggatagcaagagcagcgacaagagcgtgtgtctgttcaccgacttcgacagccagaccaacgtgtcccagagcaaggactccgacgtgtacatcaccgataagaccgtgctggacatgcggagcatggacttcaagagcaactccgccgtggcctggtccaacaagtccgatttcgcctgcgccaacgccttcaacaacagcattatccccgaggacacattcttcccaagccccgagagcagctgcggtacccagagttttgggttgttggaccctaaattgtgctatctgttggacggaatcctgttcatttacggagtgatcctgaccgcattgttcctgcgggttaagttttccagatccgcagacgcacccgcttaccaacaagggcagaaccaactctacaatgaacttaatttggggcggagggaagagtacgacgttctggacaaaaggaggggacgagatcccgagatgggcggaaagcctcagcgaaggaagaatccgcaagaggggctttataacgaactccagaaagataaaatggcagaagcctatagtgagattgggatgaagggagaaaggaggaggggtaaaggtcacgatgggttgtaccaaggattgagcacagccactaaagatacctatgatgcgctccacatgcaggccctgccgccaaga

SEQ ID NO: 5089 - DNA, 3267 bp, Artificial Sequence
  Synthetic Polynucloetide
atggccttaccagtgaccgccttgctcctgccgctggccttgctgctccacgccgccaggccggaggttcagctgcttgagtctggcggaggactggttcaacctggcggaagcctgagactgtcttgtgccgccagcggcttcacctttagcagctacgccatgagctgggtccgacaggctcctggcaaaggactggaatgggtgtccagcatcagcggcagcggcgactacatctactacgccgatagcgtgaagggcagattcaccatcagccgggacatcagcaagaacaccctgtacctccagatgaacagcctgagagccgaggacaccgccgtgtactactgtgccaaagaaggcaccggcgctaacagcagcctggccgattatagaggccagggcacactggtcaccgtgtctagtggcggaggaagcggcggaggatctcaggtccagctcgtcgagtccggcggcggcctcgtccaggccggcgactccgtcaccctctcctgcaccgcctccggccgcaccttctcctcctacgccctcgcctggttccgccagcgccccggcaaggagcgcgagttcgtcgccggcctccgctggggcggccccaccaactacgccgactccgtcaaggaccgcttcaccatctccggcgactccgccaagcacaccatgtacctccagatgaactccctcaagcccgaggacaccgccgtctactactgcggctacaaccccggcggctgggccgtcccctcccagtacgagtacgactcctggggccagggcacccaggtcaccgtctcctccggtaccggcggaggcggatctggcggcggaggtagcggtggcggaggatctgaattcgacatccagatgacacagagccctagcagcctgtctgccagcgtgggagacagagtgaccatcacatgcaaggccagcgaccacatcaacaactggctggcctggtatcagcagaagcctggacaggcccctaagctgctgatctacggcgctaccacactggaaacaggcgtgcccagcagattttctggcagcggctctggcaccgactacaccctgacaatatccagcctccagcctgaggacttcgccacctactactgtcagcagagctggaacaccccttggacattcggccagggcaccaagctggaaatcaagagactcgaggacctgaagaacgtgttcccacctgaggtggccgtgttcgagcctagcaaggccgagatcgcccacacccagaaagccaccctcgtgtgcctggctaccggcttctaccccgaccatgtggaactgtcttggtgggtcaacggcaaagaggtgcacagcggcgtgtgtaccgacccccagccactgaaagaacagcccgccctgaacgacagccggtactgcctgagcagcagactgagagtgtccgccaccttctggcagaacccccggaaccacttcagatgccaggtgcagttctacggcctgagcgagaacgacgagtggacccaggacagagccaagcccgtgacccagatcgtgtctgccgaagcctggggcagagccgattgcggatcccagagcttcggcctgctggaccccaagctgtgctacctgctggatggcatcctgttcatctacggcgtgatcctgaccgccctgttcctgagagtgaagttcagcagaagcgccgacgcccctgcctaccagcagggacagaaccaactgtacaacgagctgaacctgggcagacgggaagagtacgacgtgctggacaagcggagaggcagggaccctgagatgggcggaaagccccagcggagaaagaacccccaggaaggactgtataacgaactccagaaagacaagatggccgaagcctacagcgagatcggcatgaagggcgagcggagaagaggcaagggccacgatggcctgtaccagggcctgagcaccgccaccaaggacacctatgacgccctgcacatgcaggccctgcctccaagaagggccaagcgatctggatctggagcaacaaacttctcactactcaaacaagcaggtgacgtggaggagaatcccgggcctactagtatggactggatttggcgcatccttttccttgtcggcgctgctaccggcgcgcattccttcgaacaagttcagcttcaacagcctggcgctgagctggtcaaacctggcgcttctgtgaagatgagctgcaaagccagcggctacgccttcagcagctactggatcaactggatgaagcagaaacccggccagggactcgaatggatcggccaaatctatcccggcgacggcgacaccaactacaacggcaagttcaagggcagagccacactgaccgccgatacctctagcagcacagcctacatgcagctgagcagcctgaccagcgaagatagcgccgtgtacttctgtgcccggtccatcacaacagtcgtgggctgcgctatggactattggggccagggaacaagcgtgaccgtgtctagtacgcgtatccagaaccctgatcctgccgtgtaccagctgcgggatagcaagagcagcgacaagagcgtgtgtctgttcaccgacttcgacagccagaccaacgtgtcccagagcaaggactccgacgtgtacatcaccgataagtgcgtgctggacatgcggagcatggacttcaagagcaactccgccgtggcctggtccaacaagtccgatttcgcctgcgccaacgccttcaacaacagcattatccccgaggacacattcttcccaagcagcgacgtgccctgcggtacccagagttttgggttgttggaccctaaattgtgctatctgttggacggaatcctgttcatttacggagtgatcctgaccgcattgttcctgcgggttaagttttccagatccgcagacgcacccgcttaccaacaagggcagaaccaactctacaatgaacttaatttggggcggagggaagagtacgacgttctggacaaaaggaggggacgagatcccgagatgggcggaaagcctcagcgaaggaagaatccgcaagaggggctttataacgaactccagaaagataaaatggcagaagcctatagtgagattgggatgaagggagaaaggaggaggggtaaaggtcacgatgggttgtaccaaggattgagcacagccactaaagatacctatgatgcgctccacatgcaggccctgccgccaaga

SEQ ID NO: 5090 - DNA, 3480 bp, Artificial Sequence
  Synthetic Polynucloetide
atggccttaccagtgaccgccttgctcctgccgctggccttgctgctccacgccgccaggccggaggttcagctgcttgagtctggcggaggactggttcaacctggcggaagcctgagactgtcttgtgccgccagcggcttcacctttagcagctacgccatgagctgggtccgacaggctcctggcaaaggactggaatgggtgtccagcatcagcggcagcggcgactacatctactacgccgatagcgtgaagggcagattcaccatcagccgggacatcagcaagaacaccctgtacctccagatgaacagcctgagagccgaggacaccgccgtgtactactgtgccaaagaaggcaccggcgctaacagcagcctggccgattatagaggccagggcacactggtcaccgtgtctagtggcggaggaagcggcggaggatctcaggtccagctcgtcgagtccggcggcggcctcgtccaggccggcgactccgtcaccctctcctgcaccgcctccggccgcaccttctcctcctacgccctcgcctggttccgccagcgccccggcaaggagcgcgagttcgtcgccggcctccgctggggcggccccaccaactacgccgactccgtcaaggaccgcttcaccatctccggcgactccgccaagcacaccatgtacctccagatgaactccctcaagcccgaggacaccgccgtctactactgcggctacaaccccggcggctgggccgtcccctcccagtacgagtacgactcctggggccagggcacccaggtcaccgtctcctccggtaccggcggaggcggatctggcggcggaggtagcggtggcggaggatctgaattcgacatccagatgacacagagccctagcagcctgtctgccagcgtgggagacagagtgaccatcacatgcaaggccagcgaccacatcaacaactggctggcctggtatcagcagaagcctggacaggcccctaagctgctgatctacggcgctaccacactggaaacaggcgtgcccagcagattttctggcagcggctctggcaccgactacaccctgacaatatccagcctccagcctgaggacttcgccacctactactgtcagcagagctggaacaccccttggacattcggccagggcaccaagctggaaatcaagagactcgaggggaaaccaattcccaaccctcttctgggactggattcaaccggcagcggcgaggacctgaagaacgtgttcccacctgaggtggccgtgttcgagcctagcgaggccgagatcagccacacccagaaagccaccctcgtgtgcctggctaccggcttctaccccgaccatgtggaactgtcttggtgggtcaacggcaaagaggtgcacagcggcgtgtctaccgacccccagccactgaaagaacagcccgccctgaacgacagccggtactgcctgagcagcagactgagagtgtccgccaccttctggcagaacccccggaaccacttcagatgccaggtgcagttctacggcctgagcgagaacgacgagtggacccaggacagagccaagcccgtgacccagatcgtgtctgccgaagcctggggcagagccgattgcggatcccagagcttcggcctgctggaccccaagctgtgctacctgctggatggcatcctgttcatctacggcgtgatcctgaccgccctgttcctgagagtgaagttcagcagaagcgccgacgcccctgcctaccagcagggacagaaccaactgtacaacgagctgaacctgggcagacgggaagagtacgacgtgctggacaagcggagaggcagggaccctgagatgggcggaaagccccagcggagaaagaacccccaggaaggactgtataacgaactccagaaagacaagatggccgaagcctacagcgagatcggcatgaagggcgagcggagaagaggcaagggccacgatggcctgtaccagggcctgagcaccgccaccaaggacacctatgacgccctgcacatgcaggccctgcctccaagaagggccaagcgatctggatctggagcaacaaacttctcactactcaaacaagcaggtgacgtggaggagaatcccgggcctactagtatggactggatttggcgcatccttttccttgtcggcgctgctaccggcgcgcattccttcgaacaagttcagcttcaacagcctggcgctgagctggtcaaacctggcgcttctgtgaagatgagctgcaaagccagcggctacgccttcagcagctactggatcaactggatgaagcagaaacccggccagggactcgaatggatcggccaaatctatcccggcgacggcgacaccaactacaacggcaagttcaagggcagagccacactgaccgccgatacctctagcagcacagcctacatgcagctgagcagcctgaccagcgaagatagcgccgtgtacttctgtgcccggtccatcacaacagtcgtgggctgcgctatggactattggggccagggaacaagcgtgaccgtgtctagtacgcgtgagcagaaactgatctcggaagaggatgggagcggcatccagaaccctgatcctgccgtgtaccagctgcgggatagcaagagcagcgacaagagcgtgtgtctgttcaccgacttcgacagccagaccaacgtgtcccagagcaaggactccgacgtgtacatcaccgataagaccgtgctggacatgcggagcatggacttcaagagcaactccgccgtggcctggtccaacaagtccgatttcgcctgcgccaacgccttcaacaacagcattatccccgaggacacattcttcccaagccccgagagcagctgcggtacccagagttttgggttgttggaccctaaattgtgctatctgttggacggaatcctgttcatttacggagtgatcctgaccgcattgttcctgaggagcaagcggtcacggctgctccacagcgattacatgaatatgacaccacgaagaccgggtcctactcgcaaacactaccaaccctacgcacctccccgcgactttgcagcgtaccgatctcgggttaagttttccagatccgcagacgcacccgcttaccaacaagggcagaaccaactctacaatgaacttaatttggggcggagggaagagtacgacgttctggacaaaaggaggggacgagatcccgagatgggcggaaagcctcagcgaaggaagaatccgcaagaggggctttataacgaactccagaaagataaaatggcagaagcctatagtgagattgggatgaagggagaaaggaggaggggtaaaggtcacgatgggttgtaccaaggattgagcacagccactaaagatacctatgatgcgctccacatgcaggccctgccgccaaga

SEQ ID NO: 5091 - DNA, 3603 bp, Artificial Sequence
  Synthetic Polynucloetide
atggccttaccagtgaccgccttgctcctgccgctggccttgctgctccacgccgccaggccggaggttcagctgcttgagtctggcggaggactggttcaacctggcggaagcctgagactgtcttgtgccgccagcggcttcacctttagcagctacgccatgagctgggtccgacaggctcctggcaaaggactggaatgggtgtccagcatcagcggcagcggcgactacatctactacgccgatagcgtgaagggcagattcaccatcagccgggacatcagcaagaacaccctgtacctccagatgaacagcctgagagccgaggacaccgccgtgtactactgtgccaaagaaggcaccggcgctaacagcagcctggccgattatagaggccagggcacactggtcaccgtgtctagtggcggaggaagcggcggaggatctcaggtccagctcgtcgagtccggcggcggcctcgtccaggccggcgactccgtcaccctctcctgcaccgcctccggccgcaccttctcctcctacgccctcgcctggttccgccagcgccccggcaaggagcgcgagttcgtcgccggcctccgctggggcggccccaccaactacgccgactccgtcaaggaccgcttcaccatctccggcgactccgccaagcacaccatgtacctccagatgaactccctcaagcccgaggacaccgccgtctactactgcggctacaaccccggcggctgggccgtcccctcccagtacgagtacgactcctggggccagggcacccaggtcaccgtctcctccggtaccggcggaggcggatctggcggcggaggtagcggtggcggaggatctgaattcgacatccagatgacacagagccctagcagcctgtctgccagcgtgggagacagagtgaccatcacatgcaaggccagcgaccacatcaacaactggctggcctggtatcagcagaagcctggacaggcccctaagctgctgatctacggcgctaccacactggaaacaggcgtgcccagcagattttctggcagcggctctggcaccgactacaccctgacaatatccagcctccagcctgaggacttcgccacctactactgtcagcagagctggaacaccccttggacattcggccagggcaccaagctggaaatcaagagactcgaggggaaaccaattcccaaccctcttctgggactggattcaaccggcagcggcgaggacctgaagaacgtgttcccacctgaggtggccgtgttcgagcctagcgaggccgagatcagccacacccagaaagccaccctcgtgtgcctggctaccggcttctaccccgaccatgtggaactgtcttggtgggtcaacggcaaagaggtgcacagcggcgtgtctaccgacccccagccactgaaagaacagcccgccctgaacgacagccggtactgcctgagcagcagactgagagtgtccgccaccttctggcagaacccccggaaccacttcagatgccaggtgcagttctacggcctgagcgagaacgacgagtggacccaggacagagccaagcccgtgacccagatcgtgtctgccgaagcctggggcagagccgattgcggatcccagagcttcggcctgctggaccccaagctgtgctacctgctggatggcatcctgttcatctacggcgtgatcctgaccgccctgttcctgaggagtaagaggagcaggctcctgcacagtgactacatgaacatgactccacgccgccccggacccacccgcaagcattaccagccctatgccccaccacgcgacttcgcagcctatcgctccagagtgaagttcagcagaagcgccgacgcccctgcctaccagcagggacagaaccaactgtacaacgagctgaacctgggcagacgggaagagtacgacgtgctggacaagcggagaggcagggaccctgagatgggcggaaagccccagcggagaaagaacccccaggaaggactgtataacgaactccagaaagacaagatggccgaagcctacagcgagatcggcatgaagggcgagcggagaagaggcaagggccacgatggcctgtaccagggcctgagcaccgccaccaaggacacctatgacgccctgcacatgcaggccctgcctccaagaagggccaagcgatctggatctggagcaacaaacttctcactactcaaacaagcaggtgacgtggaggagaatcccgggcctactagtatggactggatttggcgcatccttttccttgtcggcgctgctaccggcgcgcattccttcgaacaagttcagcttcaacagcctggcgctgagctggtcaaacctggcgcttctgtgaagatgagctgcaaagccagcggctacgccttcagcagctactggatcaactggatgaagcagaaacccggccagggactcgaatggatcggccaaatctatcccggcgacggcgacaccaactacaacggcaagttcaagggcagagccacactgaccgccgatacctctagcagcacagcctacatgcagctgagcagcctgaccagcgaagatagcgccgtgtacttctgtgcccggtccatcacaacagtcgtgggctgcgctatggactattggggccagggaacaagcgtgaccgtgtctagtacgcgtgagcagaaactgatctcggaagaggatgggagcggcatccagaaccctgatcctgccgtgtaccagctgcgggatagcaagagcagcgacaagagcgtgtgtctgttcaccgacttcgacagccagaccaacgtgtcccagagcaaggactccgacgtgtacatcaccgataagaccgtgctggacatgcggagcatggacttcaagagcaactccgccgtggcctggtccaacaagtccgatttcgcctgcgccaacgccttcaacaacagcattatccccgaggacacattcttcccaagccccgagagcagctgcggtacccagagttttgggttgttggaccctaaattgtgctatctgttggacggaatcctgttcatttacggagtgatcctgaccgcattgttcctgaggagcaagcggtcacggctgctccacagcgattacatgaatatgacaccacgaagaccgggtcctactcgcaaacactaccaaccctacgcacctccccgcgactttgcagcgtaccgatctcgggttaagttttccagatccgcagacgcacccgcttaccaacaagggcagaaccaactctacaatgaacttaatttggggcggagggaagagtacgacgttctggacaaaaggaggggacgagatcccgagatgggcggaaagcctcagcgaaggaagaatccgcaagaggggctttataacgaactccagaaagataaaatggcagaagcctatagtgagattgggatgaagggagaaaggaggaggggtaaaggtcacgatgggttgtaccaaggattgagcacagccactaaagatacctatgatgcgctccacatgcaggccctgccgccaaga

SEQ ID NO: 5092 - DNA, 3486 bp, Artificial Sequence
  Synthetic Polynucloetide
atggccttaccagtgaccgccttgctcctgccgctggccttgctgctccacgccgccaggccggaggttcagctgcttgagtctggcggaggactggttcaacctggcggaagcctgagactgtcttgtgccgccagcggcttcacctttagcagctacgccatgagctgggtccgacaggctcctggcaaaggactggaatgggtgtccagcatcagcggcagcggcgactacatctactacgccgatagcgtgaagggcagattcaccatcagccgggacatcagcaagaacaccctgtacctccagatgaacagcctgagagccgaggacaccgccgtgtactactgtgccaaagaaggcaccggcgctaacagcagcctggccgattatagaggccagggcacactggtcaccgtgtctagtggcggaggaagcggcggaggatctcaggtccagctcgtcgagtccggcggcggcctcgtccaggccggcgactccgtcaccctctcctgcaccgcctccggccgcaccttctcctcctacgccctcgcctggttccgccagcgccccggcaaggagcgcgagttcgtcgccggcctccgctggggcggccccaccaactacgccgactccgtcaaggaccgcttcaccatctccggcgactccgccaagcacaccatgtacctccagatgaactccctcaagcccgaggacaccgccgtctactactgcggctacaaccccggcggctgggccgtcccctcccagtacgagtacgactcctggggccagggcacccaggtcaccgtctcctccggtaccggcggaggcggatctggcggcggaggtagcggtggcggaggatctgaattcgacatccagatgacacagagccctagcagcctgtctgccagcgtgggagacagagtgaccatcacatgcaaggccagcgaccacatcaacaactggctggcctggtatcagcagaagcctggacaggcccctaagctgctgatctacggcgctaccacactggaaacaggcgtgcccagcagattttctggcagcggctctggcaccgactacaccctgacaatatccagcctccagcctgaggacttcgccacctactactgtcagcagagctggaacaccccttggacattcggccagggcaccaagctggaaatcaagagactcgaggggaaaccaattcccaaccctcttctgggactggattcaaccggcagcggcgaggacctgaagaacgtgttcccacctgaggtggccgtgttcgagcctagcgaggccgagatcagccacacccagaaagccaccctcgtgtgcctggctaccggcttctaccccgaccatgtggaactgtcttggtgggtcaacggcaaagaggtgcacagcggcgtgtctaccgacccccagccactgaaagaacagcccgccctgaacgacagccggtactgcctgagcagcagactgagagtgtccgccaccttctggcagaacccccggaaccacttcagatgccaggtgcagttctacggcctgagcgagaacgacgagtggacccaggacagagccaagcccgtgacccagatcgtgtctgccgaagcctggggcagagccgattgcggatcccagagcttcggcctgctggaccccaagctgtgctacctgctggatggcatcctgttcatctacggcgtgatcctgaccgccctgttcctgagagtgaagttcagcagaagcgccgacgcccctgcctaccagcagggacagaaccaactgtacaacgagctgaacctgggcagacgggaagagtacgacgtgctggacaagcggagaggcagggaccctgagatgggcggaaagccccagcggagaaagaacccccaggaaggactgtataacgaactccagaaagacaagatggccgaagcctacagcgagatcggcatgaagggcgagcggagaagaggcaagggccacgatggcctgtaccagggcctgagcaccgccaccaaggacacctatgacgccctgcacatgcaggccctgcctccaagaagggccaagcgatctggatctggagcaacaaacttctcactactcaaacaagcaggtgacgtggaggagaatcccgggcctactagtatggactggatttggcgcatccttttccttgtcggcgctgctaccggcgcgcattccttcgaacaagttcagcttcaacagcctggcgctgagctggtcaaacctggcgcttctgtgaagatgagctgcaaagccagcggctacgccttcagcagctactggatcaactggatgaagcagaaacccggccagggactcgaatggatcggccaaatctatcccggcgacggcgacaccaactacaacggcaagttcaagggcagagccacactgaccgccgatacctctagcagcacagcctacatgcagctgagcagcctgaccagcgaagatagcgccgtgtacttctgtgcccggtccatcacaacagtcgtgggctgcgctatggactattggggccagggaacaagcgtgaccgtgtctagtacgcgtgagcagaaactgatctcggaagaggatctggggagcggcatccagaaccctgatcctgccgtgtaccagctgcgggatagcaagagcagcgacaagagcgtgtgtctgttcaccgacttcgacagccagaccaacgtgtcccagagcaaggactccgacgtgtacatcaccgataagaccgtgctggacatgcggagcatggacttcaagagcaactccgccgtggcctggtccaacaagtccgatttcgcctgcgccaacgccttcaacaacagcattatccccgaggacacattcttcccaagccccgagagcagctgcggtacccagagttttgggttgttggaccctaaattgtgctatctgttggacggaatcctgttcatttacggagtgatcctgaccgcattgttcctgaagagaggccggaagaagctgctgtacatcttcaagcagcctttcatgcggcccgtgcagaccacccaggaagaggacggctgctcctgccggttccccgaggaagaagaaggcggctgcgagctgcgggttaagttttccagatccgcagacgcacccgcttaccaacaagggcagaaccaactctacaatgaacttaatttggggcggagggaagagtacgacgttctggacaaaaggaggggacgagatcccgagatgggcggaaagcctcagcgaaggaagaatccgcaagaggggctttataacgaactccagaaagataaaatggcagaagcctatagtgagattgggatgaagggagaaaggaggaggggtaaaggtcacgatgggttgtaccaaggattgagcacagccactaaagatacctatgatgcgctccacatgcaggccctgccgccaaga

SEQ ID NO: 5093 - DNA, 3612 bp, Artificial Sequence
  Synthetic Polynucloetide
atggccttaccagtgaccgccttgctcctgccgctggccttgctgctccacgccgccaggccggaggttcagctgcttgagtctggcggaggactggttcaacctggcggaagcctgagactgtcttgtgccgccagcggcttcacctttagcagctacgccatgagctgggtccgacaggctcctggcaaaggactggaatgggtgtccagcatcagcggcagcggcgactacatctactacgccgatagcgtgaagggcagattcaccatcagccgggacatcagcaagaacaccctgtacctccagatgaacagcctgagagccgaggacaccgccgtgtactactgtgccaaagaaggcaccggcgctaacagcagcctggccgattatagaggccagggcacactggtcaccgtgtctagtggcggaggaagcggcggaggatctcaggtccagctcgtcgagtccggcggcggcctcgtccaggccggcgactccgtcaccctctcctgcaccgcctccggccgcaccttctcctcctacgccctcgcctggttccgccagcgccccggcaaggagcgcgagttcgtcgccggcctccgctggggcggccccaccaactacgccgactccgtcaaggaccgcttcaccatctccggcgactccgccaagcacaccatgtacctccagatgaactccctcaagcccgaggacaccgccgtctactactgcggctacaaccccggcggctgggccgtcccctcccagtacgagtacgactcctggggccagggcacccaggtcaccgtctcctccggtaccggcggaggcggatctggcggcggaggtagcggtggcggaggatctgaattcgacatccagatgacacagagccctagcagcctgtctgccagcgtgggagacagagtgaccatcacatgcaaggccagcgaccacatcaacaactggctggcctggtatcagcagaagcctggacaggcccctaagctgctgatctacggcgctaccacactggaaacaggcgtgcccagcagattttctggcagcggctctggcaccgactacaccctgacaatatccagcctccagcctgaggacttcgccacctactactgtcagcagagctggaacaccccttggacattcggccagggcaccaagctggaaatcaagagactcgaggggaaaccaattcccaaccctcttctgggactggattcaaccggcagcggcgaggacctgaagaacgtgttcccacctgaggtggccgtgttcgagcctagcgaggccgagatcagccacacccagaaagccaccctcgtgtgcctggctaccggcttctaccccgaccatgtggaactgtcttggtgggtcaacggcaaagaggtgcacagcggcgtgtctaccgacccccagccactgaaagaacagcccgccctgaacgacagccggtactgcctgagcagcagactgagagtgtccgccaccttctggcagaacccccggaaccacttcagatgccaggtgcagttctacggcctgagcgagaacgacgagtggacccaggacagagccaagcccgtgacccagatcgtgtctgccgaagcctggggcagagccgattgcggatcccagagcttcggcctgctggaccccaagctgtgctacctgctggatggcatcctgttcatctacggcgtgatcctgaccgccctgttcctgaaacggggcagaaagaaactcctgtatatattcaaacaaccatttatgagaccagtacaaactactcaagaggaagatggctgtagctgccgatttccagaagaagaagaaggaggatgtgaactgagagtgaagttcagcagaagcgccgacgcccctgcctaccagcagggacagaaccaactgtacaacgagctgaacctgggcagacgggaagagtacgacgtgctggacaagcggagaggcagggaccctgagatgggcggaaagccccagcggagaaagaacccccaggaaggactgtataacgaactccagaaagacaagatggccgaagcctacagcgagatcggcatgaagggcgagcggagaagaggcaagggccacgatggcctgtaccagggcctgagcaccgccaccaaggacacctatgacgccctgcacatgcaggccctgcctccaagaagggccaagcgatctggatctggagcaacaaacttctcactactcaaacaagcaggtgacgtggaggagaatcccgggcctactagtatggactggatttggcgcatccttttccttgtcggcgctgctaccggcgcgcattccttcgaacaagttcagcttcaacagcctggcgctgagctggtcaaacctggcgcttctgtgaagatgagctgcaaagccagcggctacgccttcagcagctactggatcaactggatgaagcagaaacccggccagggactcgaatggatcggccaaatctatcccggcgacggcgacaccaactacaacggcaagttcaagggcagagccacactgaccgccgatacctctagcagcacagcctacatgcagctgagcagcctgaccagcgaagatagcgccgtgtacttctgtgcccggtccatcacaacagtcgtgggctgcgctatggactattggggccagggaacaagcgtgaccgtgtctagtacgcgtgagcagaaactgatctcggaagaggatctggggagcggcatccagaaccctgatcctgccgtgtaccagctgcgggatagcaagagcagcgacaagagcgtgtgtctgttcaccgacttcgacagccagaccaacgtgtcccagagcaaggactccgacgtgtacatcaccgataagaccgtgctggacatgcggagcatggacttcaagagcaactccgccgtggcctggtccaacaagtccgatttcgcctgcgccaacgccttcaacaacagcattatccccgaggacacattcttcccaagccccgagagcagctgcggtacccagagttttgggttgttggaccctaaattgtgctatctgttggacggaatcctgttcatttacggagtgatcctgaccgcattgttcctgaagagaggccggaagaagctgctgtacatcttcaagcagcctttcatgcggcccgtgcagaccacccaggaagaggacggctgctcctgccggttccccgaggaagaagaaggcggctgcgagctgcgggttaagttttccagatccgcagacgcacccgcttaccaacaagggcagaaccaactctacaatgaacttaatttggggcggagggaagagtacgacgttctggacaaaaggaggggacgagatcccgagatgggcggaaagcctcagcgaaggaagaatccgcaagaggggctttataacgaactccagaaagataaaatggcagaagcctatagtgagattgggatgaagggagaaaggaggaggggtaaaggtcacgatgggttgtaccaaggattgagcacagccactaaagatacctatgatgcgctccacatgcaggccctgccgccaaga

SEQ ID NO: 5094 - DNA, 3285 bp, Artificial Sequence
  Synthetic Polynucloetide
atggccttaccagtgaccgccttgctcctgccgctggccttgctgctccacgccgccaggccggaggttcagctgcttgagtctggcggaggactggttcaacctggcggaagcctgagactgtcttgtgccgccagcggcttcacctttagcagctacgccatgagctgggtccgacaggctcctggcaaaggactggaatgggtgtccagcatcagcggcagcggcgactacatctactacgccgatagcgtgaagggcagattcaccatcagccgggacatcagcaagaacaccctgtacctccagatgaacagcctgagagccgaggacaccgccgtgtactactgtgccaaagaaggcaccggcgctaacagcagcctggccgattatagaggccagggcacactggtcaccgtgtctagtggcggaggaagcggcggaggatctcaggtccagctcgtcgagtccggcggcggcctcgtccaggccggcgactccgtcaccctctcctgcaccgcctccggccgcaccttctcctcctacgccctcgcctggttccgccagcgccccggcaaggagcgcgagttcgtcgccggcctccgctggggcggccccaccaactacgccgactccgtcaaggaccgcttcaccatctccggcgactccgccaagcacaccatgtacctccagatgaactccctcaagcccgaggacaccgccgtctactactgcggctacaaccccggcggctgggccgtcccctcccagtacgagtacgactcctggggccagggcacccaggtcaccgtctcctccggtaccggcggaggcggatctggcggcggaggtagcggtggcggaggatctgaattcgacatccagatgacacagagccctagcagcctgtctgccagcgtgggagacagagtgaccatcacatgcaaggccagcgaccacatcaacaactggctggcctggtatcagcagaagcctggacaggcccctaagctgctgatctacggcgctaccacactggaaacaggcgtgcccagcagattttctggcagcggctctggcaccgactacaccctgacaatatccagcctccagcctgaggacttcgccacctactactgtcagcagagctggaacaccccttggacattcggccagggcaccaagctggaaatcaagagactcgagcagagcttcggcctgctggaccccaagctgtgctacctgctggatggcatcctgttcatctacggcgtgatcctgaccgccctgttcctgagagtgaagttcagcagaagcgccgacgcccctgcctaccagcagggacagaaccaactgtacaacgagctgaacctgggcagacgggaagagtacgacgtgctggacaagcggagaggcagggaccctgagatgggcggaaagccccagcggagaaagaacccccaggaaggactgtataacgaactccagaaagacaagatggccgaagcctacagcgagatcggcatgaagggcgagcggagaagaggcaagggccacgatggcctgtaccagggcctgagcaccgccaccaaggacacctatgacgccctgcacatgcaggccctgcctccaagaagggccaagcgatctggatctggagcaacaaacttctcactactcaaacaagcaggtgacgtggaggagaatcccgggcctactagtatggactggatttggcgcatccttttccttgtcggcgctgctaccggcgcgcattccttcgaacaagttcagcttcaacagcctggcgctgagctggtcaaacctggcgcttctgtgaagatgagctgcaaagccagcggctacgccttcagcagctactggatcaactggatgaagcagaaacccggccagggactcgaatggatcggccaaatctatcccggcgacggcgacaccaactacaacggcaagttcaagggcagagccacactgaccgccgatacctctagcagcacagcctacatgcagctgagcagcctgaccagcgaagatagcgccgtgtacttctgtgcccggtccatcacaacagtcgtgggctgcgctatggactattggggccagggaacaagcgtgaccgtgtctagtacgcgtcagagttttgggttgttggaccctaaattgtgctatctgttggacggaatcctgttcatttacggagtgatcctgaccgcattgttcctgcgggttaagttttccagatccgcagacgcacccgcttaccaacaagggcagaaccaactctacaatgaacttaatttggggcggagggaagagtacgacgttctggacaaaaggaggggacgagatcccgagatgggcggaaagcctcagcgaaggaagaatccgcaagaggggctttataacgaactccagaaagataaaatggcagaagcctatagtgagattgggatgaagggagaaaggaggaggggtaaaggtcacgatgggttgtaccaaggattgagcacagccactaaagatacctatgatgcgctccacatgcaggccctgccgccaagacgcgccaagagaagcggatctggcgtgaagcagaccctgaatttcgacctgctgaagctggctggcgacgtggaatccaacccaggcccttctagaggccatatgaccgagtacaagcccacggtgcgcctcgccacccgcgacgacgtccccagggccgtacgcaccctcgccgccgcgttcgccgactaccccgccacgcgccacaccgtcgatccggaccgccacatcgagcgggtcaccgagctgcaagaactcttcctcacgcgcgtcgggctcgacatcggcaaggtgtgggtcgcggacgacggcgccgcggtggcggtctggaccacgccggagagcgtcgaagcgggggcggtgttcgccgagatcggcccgcgcatggccgagttgagcggttcccggctggccgcgcagcaacagatggaaggcctcctggcgccgcaccggcccaaggagcccgcgtggttcctggccaccgtcggcgtctcgcccgaccaccagggcaagggtctgggcagcgccgtcgtgctccccggagtggaggcggccgagcgcgccggggtgcccgccttcctggagacctccgcgccccgcaacctccccttctacgagcggctcggcttcaccgtcaccgccgacgtcgaggtgcccgaaggaccgcgcacctggtgcatgacccgcaagcccggtgcctga

SEQ ID NO: 5095 - DNA, 2757 bp, Artificial Sequence
  Synthetic Polynucloetide
atggccttaccagtgaccgccttgctcctgccgctggccttgctgctccacgccgccaggccggaggttcagctgcttgagtctggcggaggactggttcaacctggcggaagcctgagactgtcttgtgccgccagcggcttcacctttagcagctacgccatgagctgggtccgacaggctcctggcaaaggactggaatgggtgtccagcatcagcggcagcggcgactacatctactacgccgatagcgtgaagggcagattcaccatcagccgggacatcagcaagaacaccctgtacctccagatgaacagcctgagagccgaggacaccgccgtgtactactgtgccaaagaaggcaccggcgctaacagcagcctggccgattatagaggccagggcacactggtcaccgtgtctagtggcggaggaagcggcggaggatctcaggtccagctcgtcgagtccggcggcggcctcgtccaggccggcgactccgtcaccctctcctgcaccgcctccggccgcaccttctcctcctacgccctcgcctggttccgccagcgccccggcaaggagcgcgagttcgtcgccggcctccgctggggcggccccaccaactacgccgactccgtcaaggaccgcttcaccatctccggcgactccgccaagcacaccatgtacctccagatgaactccctcaagcccgaggacaccgccgtctactactgcggctacaaccccggcggctgggccgtcccctcccagtacgagtacgactcctggggccagggcacccaggtcaccgtctcctccggtaccggcggaggcggatctggcggcggaggtagcggtggcggaggatctgaattcgacatccagatgacacagagccctagcagcctgtctgccagcgtgggagacagagtgaccatcacatgcaaggccagcgaccacatcaacaactggctggcctggtatcagcagaagcctggacaggcccctaagctgctgatctacggcgctaccacactggaaacaggcgtgcccagcagattttctggcagcggctctggcaccgactacaccctgacaatatccagcctccagcctgaggacttcgccacctactactgtcagcagagctggaacaccccttggacattcggccagggcaccaagctggaaatcaagagactcgagggacagcctaaggccaatcctaccgtgacactgttccctccaagcagcgaagaactccaggccaacaaggccacacttgtgtgcctgatctccgacttctaccctggggctgtgacagtggcttggaaggccgatggatctcctgtgaaagccggcgtggaaaccaccaagccatccaagcagagcaacaacaaatacgccgccagctcctacctgagcctgacacctgagcagtggaagtcccacagatcctacagctgccaagtgacccacgaaggcagcaccgtggaaaagacagtggcccctacagagtgcagccccatcaagaccgatgtgattacaatggaccccaaggacaactgctccaaggacgccaacgataccctgctgctccagctgaccaacaccagcgcctactacatgtacttgttgctgctgctgaagtccgtggtgtacttcgccatcatcacatgctgcctgctgcggagaaccgccttctgctgcaacggcgagaagtctagggccaagcgatctggatctggagcaacaaacttctcactactcaaacaagcaggtgacgtggaggagaatcccgggcctactagtatggactggatttggcgcatccttttccttgtcggcgctgctaccggcgcgcattccttcgaacaagttcagcttcaacagcctggcgctgagctggtcaaacctggcgcttctgtgaagatgagctgcaaagccagcggctacgccttcagcagctactggatcaactggatgaagcagaaacccggccagggactcgaatggatcggccaaatctatcccggcgacggcgacaccaactacaacggcaagttcaagggcagagccacactgaccgccgatacctctagcagcacagcctacatgcagctgagcagcctgaccagcgaagatagcgccgtgtacttctgtgcccggtccatcacaacagtcgtgggctgcgctatggactattggggccagggaacaagcgtgaccgtgtctagtacgcgtgcctctacaaagggaccctccgtgtttcctctggctcccagcagcaagtctacaagcggaggaacagccgctctgggctgcctggtcaaggattactttcccgagcctgtgaccgtgtcctggaatagcggagcactgacaagcggcgtgcacacctttccagccgtgctgcaaagcagcggcctgtactctctgagcagcgtggtcacagtgcctagctctagcctgggcacccagacctacatctgcaatgtgaaccacaagcctagcaacaccaaggtggacaagagagtggaacccaagagctgtgaagtgaaaaccgactccaccgaccacgtgaagcccaaagagacagagaacaccaagcagcccagcaagagctgccacaagcccaaggccatcgtgcacaccgagaaagtgaacatgatgagcctgaccgtgctgggcctgcggatgctgttcgccaaaaccgtggccgtgaacttcctgctgaccgccaagctgttcttcctc

SEQ ID NO: 5096 - DNA, 2691 bp, Artificial Sequence
  Synthetic Polynucloetide
atggccttaccagtgaccgccttgctcctgccgctggccttgctgctccacgccgccaggccggaggttcagctgcttgagtctggcggaggactggttcaacctggcggaagcctgagactgtcttgtgccgccagcggcttcacctttagcagctacgccatgagctgggtccgacaggctcctggcaaaggactggaatgggtgtccagcatcagcggcagcggcgactacatctactacgccgatagcgtgaagggcagattcaccatcagccgggacatcagcaagaacaccctgtacctccagatgaacagcctgagagccgaggacaccgccgtgtactactgtgccaaagaaggcaccggcgctaacagcagcctggccgattatagaggccagggcacactggtcaccgtgtctagtggcggaggaagcggcggaggatctcaggtccagctcgtcgagtccggcggcggcctcgtccaggccggcgactccgtcaccctctcctgcaccgcctccggccgcaccttctcctcctacgccctcgcctggttccgccagcgccccggcaaggagcgcgagttcgtcgccggcctccgctggggcggccccaccaactacgccgactccgtcaaggaccgcttcaccatctccggcgactccgccaagcacaccatgtacctccagatgaactccctcaagcccgaggacaccgccgtctactactgcggctacaaccccggcggctgggccgtcccctcccagtacgagtacgactcctggggccagggcacccaggtcaccgtctcctccggtaccggcggaggcggatctggcggcggaggtagcggtggcggaggatctgaattcgacatccagatgacacagagccctagcagcctgtctgccagcgtgggagacagagtgaccatcacatgcaaggccagcgaccacatcaacaactggctggcctggtatcagcagaagcctggacaggcccctaagctgctgatctacggcgctaccacactggaaacaggcgtgcccagcagattttctggcagcggctctggcaccgactacaccctgacaatatccagcctccagcctgaggacttcgccacctactactgtcagcagagctggaacaccccttggacattcggccagggcaccaagctggaaatcaagagactcgagggacagcctaaggccaatcctaccgtgacactgttccctccaagcagcgaagaactccaggccaacaaggccacacttgtgtgcctgatctccgacttctaccctggggctgtgacagtggcttggaaggccgatggatctcctgtgaaagccggcgtggaaaccaccaagccatccaagcagagcaacaacaaatacgccgccagctcctacctgagcctgacacctgagcagtggaagtcccacagatcctacagctgccaagtgacccacgaaggcagcaccgtggaaaagacagtggcccctacagagtgcagcggcagagccgattgcggcatcaccagcgccagctaccaccagggcgtgctgagcgccaccatcctgtacgagatcctgctgggcaaggccaccctgtacgccgtgctggtgtctgccctggtgctgatggctatggtcaagcggaaggacagccggggaagggccaagcgatctggatctggagcaacaaacttctcactactcaaacaagcaggtgacgtggaggagaatcccgggcctactagtatggactggatttggcgcatccttttccttgtcggcgctgctaccggcgcgcattccttcgaacaagttcagcttcaacagcctggcgctgagctggtcaaacctggcgcttctgtgaagatgagctgcaaagccagcggctacgccttcagcagctactggatcaactggatgaagcagaaacccggccagggactcgaatggatcggccaaatctatcccggcgacggcgacaccaactacaacggcaagttcaagggcagagccacactgaccgccgatacctctagcagcacagcctacatgcagctgagcagcctgaccagcgaagatagcgccgtgtacttctgtgcccggtccatcacaacagtcgtgggctgcgctatggactattggggccagggaacaagcgtgaccgtgtctagtacgcgtgcctctacaaagggaccctccgtgtttcctctggctcccagcagcaagtctacaagcggaggaacagccgctctgggctgcctggtcaaggattactttcccgagcctgtgaccgtgtcctggaatagcggagcactgacaagcggcgtgcacacctttccagccgtgctgcaaagcagcggcctgtactctctgagcagcgtggtcacagtgcctagctctagcctgggcacccagacctacatctgcaatgtgaaccacaagcctagcaacaccaaggtggacaagagagtggaacccaagagctgtatccccgaggacacattcttcccaagcagcgacgtgccctgcgacgtgaagctggtggaaaagagcttcgagacagacaccaacctgaacttccagaacctgagcgtgatcggcttcagaatcctgctgctgaaagtggccggctttaacctgctgatgaccctgcggctgtggtccagc

SEQ ID NO: 5097 - DNA, 2691 bp, Artificial Sequence
  Synthetic Polynucloetide
atggccttaccagtgaccgccttgctcctgccgctggccttgctgctccacgccgccaggccggaggttcagctgcttgagtctggcggaggactggttcaacctggcggaagcctgagactgtcttgtgccgccagcggcttcacctttagcagctacgccatgagctgggtccgacaggctcctggcaaaggactggaatgggtgtccagcatcagcggcagcggcgactacatctactacgccgatagcgtgaagggcagattcaccatcagccgggacatcagcaagaacaccctgtacctccagatgaacagcctgagagccgaggacaccgccgtgtactactgtgccaaagaaggcaccggcgctaacagcagcctggccgattatagaggccagggcacactggtcaccgtgtctagtggcggaggaagcggcggaggatctcaggtccagctcgtcgagtccggcggcggcctcgtccaggccggcgactccgtcaccctctcctgcaccgcctccggccgcaccttctcctcctacgccctcgcctggttccgccagcgccccggcaaggagcgcgagttcgtcgccggcctccgctggggcggccccaccaactacgccgactccgtcaaggaccgcttcaccatctccggcgactccgccaagcacaccatgtacctccagatgaactccctcaagcccgaggacaccgccgtctactactgcggctacaaccccggcggctgggccgtcccctcccagtacgagtacgactcctggggccagggcacccaggtcaccgtctcctccggtaccggcggaggcggatctggcggcggaggtagcggtggcggaggatctgaattcgacatccagatgacacagagccctagcagcctgtctgccagcgtgggagacagagtgaccatcacatgcaaggccagcgaccacatcaacaactggctggcctggtatcagcagaagcctggacaggcccctaagctgctgatctacggcgctaccacactggaaacaggcgtgcccagcagattttctggcagcggctctggcaccgactacaccctgacaatatccagcctccagcctgaggacttcgccacctactactgtcagcagagctggaacaccccttggacattcggccagggcaccaagctggaaatcaagagactcgagggacagcctaaggccaatcctaccgtgacactgttccctccaagcagcgaagaactccaggccaacaaggccacacttgtgtgcctgatctccgacttctaccctggggctgtgacagtggcttggaaggccgatggatctcctgtgaaagccggcgtggaaaccaccaagccatccaagcagagcaacaacaaatacgccgccagctcctacctgagcctgacacctgagcagtggaagtcccacagatcctacagctgccaagtgacccacgaaggcagcaccgtggaaaagacagtggcccctacagagtgcagcggcagagccgattgcggctttaccagcgagagctaccagcagggcgtgctgagcgccaccatcctgtacgagatcctgctgggcaaggccaccctgtacgccgtgctggtgtctgccctggtgctgatggctatggtcaagcggaaggacagccggggaagggccaagcgatctggatctggagcaacaaacttctcactactcaaacaagcaggtgacgtggaggagaatcccgggcctactagtatggactggatttggcgcatccttttccttgtcggcgctgctaccggcgcgcattccttcgaacaagttcagcttcaacagcctggcgctgagctggtcaaacctggcgcttctgtgaagatgagctgcaaagccagcggctacgccttcagcagctactggatcaactggatgaagcagaaacccggccagggactcgaatggatcggccaaatctatcccggcgacggcgacaccaactacaacggcaagttcaagggcagagccacactgaccgccgatacctctagcagcacagcctacatgcagctgagcagcctgaccagcgaagatagcgccgtgtacttctgtgcccggtccatcacaacagtcgtgggctgcgctatggactattggggccagggaacaagcgtgaccgtgtctagtacgcgtgcctctacaaagggaccctccgtgtttcctctggctcccagcagcaagtctacaagcggaggaacagccgctctgggctgcctggtcaaggattactttcccgagcctgtgaccgtgtcctggaatagcggagcactgacaagcggcgtgcacacctttccagccgtgctgcaaagcagcggcctgtactctctgagcagcgtggtcacagtgcctagctctagcctgggcacccagacctacatctgcaatgtgaaccacaagcctagcaacaccaaggtggacaagagagtggaacccaagagctgtatccccgaggacacattcttcccaagccccgagagcagctgcgacgtgaagctggtggaaaagagcttcgagacagacaccaacctgaacttccagaacctgagcgtgatcggcttcagaatcctgctgctgaaagtggccggctttaacctgctgatgaccctgcggctgtggtccagc

SEQ ID NO: 5098 - DNA, 2169 bp, Artificial Sequence
  Synthetic Polynucloetide
atggccttaccagtgaccgccttgctcctgccgctggccttgctgctccacgccgccaggccggaggttcagctgcttgagtctggcggaggactggttcaacctggcggaagcctgagactgtcttgtgccgccagcggcttcacctttagcagctacgccatgagctgggtccgacaggctcctggcaaaggactggaatgggtgtccagcatcagcggcagcggcgactacatctactacgccgatagcgtgaagggcagattcaccatcagccgggacatcagcaagaacaccctgtacctccagatgaacagcctgagagccgaggacaccgccgtgtactactgtgccaaagaaggcaccggcgctaacagcagcctggccgattatagaggccagggcacactggtcaccgtgtctagtggcggaggaagcggcggaggatctcaggtccagctcgtcgagtccggcggcggcctcgtccaggccggcgactccgtcaccctctcctgcaccgcctccggccgcaccttctcctcctacgccctcgcctggttccgccagcgccccggcaaggagcgcgagttcgtcgccggcctccgctggggcggccccaccaactacgccgactccgtcaaggaccgcttcaccatctccggcgactccgccaagcacaccatgtacctccagatgaactccctcaagcccgaggacaccgccgtctactactgcggctacaaccccggcggctgggccgtcccctcccagtacgagtacgactcctggggccagggcacccaggtcaccgtctcctccggtaccggcggaggcggatctggcggcggaggtagcggtggcggaggatctgaattcgacatccagatgacacagagccctagcagcctgtctgccagcgtgggagacagagtgaccatcacatgcaaggccagcgaccacatcaacaactggctggcctggtatcagcagaagcctggacaggcccctaagctgctgatctacggcgctaccacactggaaacaggcgtgcccagcagattttctggcagcggctctggcaccgactacaccctgacaatatccagcctccagcctgaggacttcgccacctactactgtcagcagagctggaacaccccttggacattcggccagggcaccaagctggaaatcaagagaggcggaggcggaagtggaggcggaggatctggcggcggaggctctcaagttcagcttcaacagcctggcgctgagctggtcaaacctggcgcttctgtgaagatgagctgcaaagccagcggctacgccttcagcagctactggatcaactggatgaagcagaaacccggccagggactcgaatggatcggccaaatctatcccggcgacggcgacaccaactacaacggcaagttcaagggcagagccacactgaccgccgatacctctagcagcacagcctacatgcagctgagcagcctgaccagcgaagatagcgccgtgtacttctgtgcccggtccatcacaacagtcgtgggctgcgctatggactattggggccagggaacaagcgtgaccgtgtctagtacgcgtgacggtaacgaggagatgggaggaatcactcaaaccccttacaaagtctcaatttcaggaacaactgttatccttacatgtccccagtatcctggcagcgagatcctttggcagcataacgacaagaatatagggggagatgaagacgataagaatatcggatctgacgaggatcacttgagcctgaaagagttctccgagcttgaacaaagcggatattatgtgtgctatccgcgcgggtcaaagccggaagacgctaacttttacctttatctccgagccagagtgtgcgaaaattgcatggaaatggacgttatgtccgttgctacaatagttatcgtagatatatgcatcacgggtggactgcttctgctggtttattattggtccaagaatagaaaggccaaagctaaacccgtgaccagaggcgctggcgcaggcggaaggcaaaggggacaaaacaaagaacggccaccaccagtgccaaatccagattatgagcctattcggaaaggacagagggacctgtactctggcctgaatcagagaagaatc

SEQ ID NO: 5099 - DNA, 2064 bp, Artificial Sequence
  Synthetic Polynucloetide
atggccttaccagtgaccgccttgctcctgccgctggccttgctgctccacgccgccaggccggaggttcagctgcttgagtctggcggaggactggttcaacctggcggaagcctgagactgtcttgtgccgccagcggcttcacctttagcagctacgccatgagctgggtccgacaggctcctggcaaaggactggaatgggtgtccagcatcagcggcagcggcgactacatctactacgccgatagcgtgaagggcagattcaccatcagccgggacatcagcaagaacaccctgtacctccagatgaacagcctgagagccgaggacaccgccgtgtactactgtgccaaagaaggcaccggcgctaacagcagcctggccgattatagaggccagggcacactggtcaccgtgtctagtggcggaggaagcggcggaggatctcaggtccagctcgtcgagtccggcggcggcctcgtccaggccggcgactccgtcaccctctcctgcaccgcctccggccgcaccttctcctcctacgccctcgcctggttccgccagcgccccggcaaggagcgcgagttcgtcgccggcctccgctggggcggccccaccaactacgccgactccgtcaaggaccgcttcaccatctccggcgactccgccaagcacaccatgtacctccagatgaactccctcaagcccgaggacaccgccgtctactactgcggctacaaccccggcggctgggccgtcccctcccagtacgagtacgactcctggggccagggcacccaggtcaccgtctcctccggtaccggcggaggcggatctggcggcggaggtagcggtggcggaggatctgaattcgacatccagatgacacagagccctagcagcctgtctgccagcgtgggagacagagtgaccatcacatgcaaggccagcgaccacatcaacaactggctggcctggtatcagcagaagcctggacaggcccctaagctgctgatctacggcgctaccacactggaaacaggcgtgcccagcagattttctggcagcggctctggcaccgactacaccctgacaatatccagcctccagcctgaggacttcgccacctactactgtcagcagagctggaacaccccttggacattcggccagggcaccaagctggaaatcaagagaggcggaggcggaagtggaggcggaggatctggcggcggaggctctcaagttcagcttcaacagcctggcgctgagctggtcaaacctggcgcttctgtgaagatgagctgcaaagccagcggctacgccttcagcagctactggatcaactggatgaagcagaaacccggccagggactcgaatggatcggccaaatctatcccggcgacggcgacaccaactacaacggcaagttcaagggcagagccacactgaccgccgatacctctagcagcacagcctacatgcagctgagcagcctgaccagcgaagatagcgccgtgtacttctgtgcccggtccatcacaacagtcgtgggctgcgctatggactattggggccagggaacaagcgtgaccgtgtctagtacgcgtttcaagatccccatcgaggaactggaagatcgggtgttcgtgaactgcaacacctctatcacctgggtggaaggcaccgtgggaacactgctgagcgacatcaccagactggacctcggcaagcggattctggaccctcggggcatctacagatgcaacggcaccgacatctacaaggacaaagaaagcaccgtgcaggtccactacagaatgtgccagtcctgcgtggaactggaccctgctacagtggccggcatcatcgtgaccgatgtgatcgctactctgctgctggctctgggagtgttctgcttcgccggacacgaaacaggcagactgtctggcgctgccgatacacaggccctgctgagaaacgaccaagtgtatcagcccctgcgcgacagagatgatgcccagtattctcacctcggcggcaactgggctagaaacaag

SEQ ID NO: 5100 - DNA, 2094 bp, Artificial Sequence
  Synthetic Polynucloetide
atggccttaccagtgaccgccttgctcctgccgctggccttgctgctccacgccgccaggccggaggttcagctgcttgagtctggcggaggactggttcaacctggcggaagcctgagactgtcttgtgccgccagcggcttcacctttagcagctacgccatgagctgggtccgacaggctcctggcaaaggactggaatgggtgtccagcatcagcggcagcggcgactacatctactacgccgatagcgtgaagggcagattcaccatcagccgggacatcagcaagaacaccctgtacctccagatgaacagcctgagagccgaggacaccgccgtgtactactgtgccaaagaaggcaccggcgctaacagcagcctggccgattatagaggccagggcacactggtcaccgtgtctagtggcggaggaagcggcggaggatctcaggtccagctcgtcgagtccggcggcggcctcgtccaggccggcgactccgtcaccctctcctgcaccgcctccggccgcaccttctcctcctacgccctcgcctggttccgccagcgccccggcaaggagcgcgagttcgtcgccggcctccgctggggcggccccaccaactacgccgactccgtcaaggaccgcttcaccatctccggcgactccgccaagcacaccatgtacctccagatgaactccctcaagcccgaggacaccgccgtctactactgcggctacaaccccggcggctgggccgtcccctcccagtacgagtacgactcctggggccagggcacccaggtcaccgtctcctccggtaccggcggaggcggatctggcggcggaggtagcggtggcggaggatctgaattcgacatccagatgacacagagccctagcagcctgtctgccagcgtgggagacagagtgaccatcacatgcaaggccagcgaccacatcaacaactggctggcctggtatcagcagaagcctggacaggcccctaagctgctgatctacggcgctaccacactggaaacaggcgtgcccagcagattttctggcagcggctctggcaccgactacaccctgacaatatccagcctccagcctgaggacttcgccacctactactgtcagcagagctggaacaccccttggacattcggccagggcaccaagctggaaatcaagagaggcggaggcggaagtggaggcggaggatctggcggcggaggctctcaagttcagcttcaacagcctggcgctgagctggtcaaacctggcgcttctgtgaagatgagctgcaaagccagcggctacgccttcagcagctactggatcaactggatgaagcagaaacccggccagggactcgaatggatcggccaaatctatcccggcgacggcgacaccaactacaacggcaagttcaagggcagagccacactgaccgccgatacctctagcagcacagcctacatgcagctgagcagcctgaccagcgaagatagcgccgtgtacttctgtgcccggtccatcacaacagtcgtgggctgcgctatggactattggggccagggaacaagcgtgaccgtgtctagtacgcgtcagagcatcaagggcaaccacctggtcaaggtgtacgactaccaagaggacggcagcgtgctgctgacatgtgatgccgaggccaagaacatcacctggtttaaggacggcaagatgatcggcttcctgaccgaggacaagaagaagtggaacctgggcagcaacgctaaggaccccagaggcatgtatcagtgcaagggcagccagaacaagagcaagcccctccaggtgtactaccggatgtgccagaactgcatcgagctgaacgccgctaccatcagcggctttctgttcgccgagatcgtgtccatcttcgtgctggccgtgggcgtgtactttatcgctggacaggatggcgtgcggcagagcagagcttccgataagcaaaccctgctgcctaacgaccagctgtaccagcctctgaaggacagagaggacgaccagtacagccacctccagggcaatcagctgagaagaaac

SEQ ID NO: 5101 - DNA, 2043 bp, Artificial Sequence
  Synthetic Polynucloetide
atggccttaccagtgaccgccttgctcctgccgctggccttgctgctccacgccgccaggccggaggttcagctgcttgagtctggcggaggactggttcaacctggcggaagcctgagactgtcttgtgccgccagcggcttcacctttagcagctacgccatgagctgggtccgacaggctcctggcaaaggactggaatgggtgtccagcatcagcggcagcggcgactacatctactacgccgatagcgtgaagggcagattcaccatcagccgggacatcagcaagaacaccctgtacctccagatgaacagcctgagagccgaggacaccgccgtgtactactgtgccaaagaaggcaccggcgctaacagcagcctggccgattatagaggccagggcacactggtcaccgtgtctagtggcggaggaagcggcggaggatctcaggtccagctcgtcgagtccggcggcggcctcgtccaggccggcgactccgtcaccctctcctgcaccgcctccggccgcaccttctcctcctacgccctcgcctggttccgccagcgccccggcaaggagcgcgagttcgtcgccggcctccgctggggcggccccaccaactacgccgactccgtcaaggaccgcttcaccatctccggcgactccgccaagcacaccatgtacctccagatgaactccctcaagcccgaggacaccgccgtctactactgcggctacaaccccggcggctgggccgtcccctcccagtacgagtacgactcctggggccagggcacccaggtcaccgtctcctccggtaccggcggaggcggatctggcggcggaggtagcggtggcggaggatctgaattcgacatccagatgacacagagccctagcagcctgtctgccagcgtgggagacagagtgaccatcacatgcaaggccagcgaccacatcaacaactggctggcctggtatcagcagaagcctggacaggcccctaagctgctgatctacggcgctaccacactggaaacaggcgtgcccagcagattttctggcagcggctctggcaccgactacaccctgacaatatccagcctccagcctgaggacttcgccacctactactgtcagcagagctggaacaccccttggacattcggccagggcaccaagctggaaatcaagagaggcggaggcggaagtggaggcggaggatctggcggcggaggctctcaagttcagcttcaacagcctggcgctgagctggtcaaacctggcgcttctgtgaagatgagctgcaaagccagcggctacgccttcagcagctactggatcaactggatgaagcagaaacccggccagggactcgaatggatcggccaaatctatcccggcgacggcgacaccaactacaacggcaagttcaagggcagagccacactgaccgccgatacctctagcagcacagcctacatgcagctgagcagcctgaccagcgaagatagcgccgtgtacttctgtgcccggtccatcacaacagtcgtgggctgcgctatggactattggggccagggaacaagcgtgaccgtgtctagtacgcgtcagagttttgggttgttggaccctaaattgtgctatctgttggacggaatcctgttcatttacggagtgatcctgaccgcattgttcctgcgggttaagttttccagatccgcagacgcacccgcttaccaacaagggcagaaccaactctacaatgaacttaatttggggcggagggaagagtacgacgttctggacaaaaggaggggacgagatcccgagatgggcggaaagcctcagcgaaggaagaatccgcaagaggggctttataacgaactccagaaagataaaatggcagaagcctatagtgagattgggatgaagggagaaaggaggaggggtaaaggtcacgatgggttgtaccaaggattgagcacagccactaaagatacctatgatgcgctccacatgcaggccctgccgccaaga

SEQ ID NO: 5102 - DNA, 2745 bp, Artificial Sequence
  Synthetic Polynucloetide
atggccttaccagtgaccgccttgctcctgccgctggccttgctgctccacgccgccaggccggaggttcagctgcttgagtctggcggaggactggttcaacctggcggaagcctgagactgtcttgtgccgccagcggcttcacctttagcagctacgccatgagctgggtccgacaggctcctggcaaaggactggaatgggtgtccagcatcagcggcagcggcgactacatctactacgccgatagcgtgaagggcagattcaccatcagccgggacatcagcaagaacaccctgtacctccagatgaacagcctgagagccgaggacaccgccgtgtactactgtgccaaagaaggcaccggcgctaacagcagcctggccgattatagaggccagggcacactggtcaccgtgtctagtggcggaggaagcggcggaggatctcaggtccagctcgtcgagtccggcggcggcctcgtccaggccggcgactccgtcaccctctcctgcaccgcctccggccgcaccttctcctcctacgccctcgcctggttccgccagcgccccggcaaggagcgcgagttcgtcgccggcctccgctggggcggccccaccaactacgccgactccgtcaaggaccgcttcaccatctccggcgactccgccaagcacaccatgtacctccagatgaactccctcaagcccgaggacaccgccgtctactactgcggctacaaccccggcggctgggccgtcccctcccagtacgagtacgactcctggggccagggcacccaggtcaccgtctcctccggtaccggcggaggcggatctggcggcggaggtagcggtggcggaggatctgaattcgacatccagatgacacagagccctagcagcctgtctgccagcgtgggagacagagtgaccatcacatgcaaggccagcgaccacatcaacaactggctggcctggtatcagcagaagcctggacaggcccctaagctgctgatctacggcgctaccacactggaaacaggcgtgcccagcagattttctggcagcggctctggcaccgactacaccctgacaatatccagcctccagcctgaggacttcgccacctactactgtcagcagagctggaacaccccttggacattcggccagggcaccaagctggaaatcaagagaggcggaggcggaagtggaggcggaggatctggcggcggaggctctcaagttcagcttcaacagcctggcgctgagctggtcaaacctggcgcttctgtgaagatgagctgcaaagccagcggctacgccttcagcagctactggatcaactggatgaagcagaaacccggccagggactcgaatggatcggccaaatctatcccggcgacggcgacaccaactacaacggcaagttcaagggcagagccacactgaccgccgatacctctagcagcacagcctacatgcagctgagcagcctgaccagcgaagatagcgccgtgtacttctgtgcccggtccatcacaacagtcgtgggctgcgctatggactattggggccagggaacaagcgtgaccgtgtctagtacgcgtgggagcggcatccagaaccctgatcctgccgtgtaccagctgcgggatagcaagagcagcgacaagagcgtgtgtctgttcaccgacttcgacagccagaccaacgtgtcccagagcaaggactccgacgtgtacatcaccgataagaccgtgctggacatgcggagcatggacttcaagagcaactccgccgtggcctggtccaacaagtccgatttcgcctgcgccaacgccttcaacaacagcattatccccgaggacacattcttcccaagccccgagagcagctgcgacgtgaagctggtggaaaagagcttcgagacagacaccaacctgaacttccagaacctgagcgtgatcggcttcagaatcctgctgctgaaagtggccggctttaacctgctgatgaccctgcggctgtggtccagccgcgccaagagaagcggatctggcgtgaagcagaccctgaatttcgacctgctgaagctggctggcgacgtggaatccaacccaggcccttctagaggccatatgaccgagtacaagcccacggtgcgcctcgccacccgcgacgacgtccccagggccgtacgcaccctcgccgccgcgttcgccgactaccccgccacgcgccacaccgtcgatccggaccgccacatcgagcgggtcaccgagctgcaagaactcttcctcacgcgcgtcgggctcgacatcggcaaggtgtgggtcgcggacgacggcgccgcggtggcggtctggaccacgccggagagcgtcgaagcgggggcggtgttcgccgagatcggcccgcgcatggccgagttgagcggttcccggctggccgcgcagcaacagatggaaggcctcctggcgccgcaccggcccaaggagcccgcgtggttcctggccaccgtcggcgtctcgcccgaccaccagggcaagggtctgggcagcgccgtcgtgctccccggagtggaggcggccgagcgcgccggggtgcccgccttcctggagacctccgcgccccgcaacctccccttctacgagcggctcggcttcaccgtcaccgccgacgtcgaggtgcccgaaggaccgcgcacctggtgcatgacccgcaagcccggtgcctga

SEQ ID NO: 5103 - DNA, 2841 bp, Artificial Sequence
  Synthetic Polynucloetide
atggccttaccagtgaccgccttgctcctgccgctggccttgctgctccacgccgccaggccggaggttcagctgcttgagtctggcggaggactggttcaacctggcggaagcctgagactgtcttgtgccgccagcggcttcacctttagcagctacgccatgagctgggtccgacaggctcctggcaaaggactggaatgggtgtccagcatcagcggcagcggcgactacatctactacgccgatagcgtgaagggcagattcaccatcagccgggacatcagcaagaacaccctgtacctccagatgaacagcctgagagccgaggacaccgccgtgtactactgtgccaaagaaggcaccggcgctaacagcagcctggccgattatagaggccagggcacactggtcaccgtgtctagtggcggaggaagcggcggaggatctcaggtccagctcgtcgagtccggcggcggcctcgtccaggccggcgactccgtcaccctctcctgcaccgcctccggccgcaccttctcctcctacgccctcgcctggttccgccagcgccccggcaaggagcgcgagttcgtcgccggcctccgctggggcggccccaccaactacgccgactccgtcaaggaccgcttcaccatctccggcgactccgccaagcacaccatgtacctccagatgaactccctcaagcccgaggacaccgccgtctactactgcggctacaaccccggcggctgggccgtcccctcccagtacgagtacgactcctggggccagggcacccaggtcaccgtctcctccggtaccggcggaggcggatctggcggcggaggtagcggtggcggaggatctgaattcgacatccagatgacacagagccctagcagcctgtctgccagcgtgggagacagagtgaccatcacatgcaaggccagcgaccacatcaacaactggctggcctggtatcagcagaagcctggacaggcccctaagctgctgatctacggcgctaccacactggaaacaggcgtgcccagcagattttctggcagcggctctggcaccgactacaccctgacaatatccagcctccagcctgaggacttcgccacctactactgtcagcagagctggaacaccccttggacattcggccagggcaccaagctggaaatcaagagaggcggaggcggaagtggaggcggaggatctggcggcggaggctctcaagttcagcttcaacagcctggcgctgagctggtcaaacctggcgcttctgtgaagatgagctgcaaagccagcggctacgccttcagcagctactggatcaactggatgaagcagaaacccggccagggactcgaatggatcggccaaatctatcccggcgacggcgacaccaactacaacggcaagttcaagggcagagccacactgaccgccgatacctctagcagcacagcctacatgcagctgagcagcctgaccagcgaagatagcgccgtgtacttctgtgcccggtccatcacaacagtcgtgggctgcgctatggactattggggccagggaacaagcgtgaccgtgtctagtctcgaggacctgaagaacgtgttcccacctgaggtggccgtgttcgagcctagcgaggccgagatcagccacacccagaaagccaccctcgtgtgcctggctaccggcttctaccccgaccatgtggaactgtcttggtgggtcaacggcaaagaggtgcacagcggcgtgtctaccgacccccagccactgaaagaacagcccgccctgaacgacagccggtactgcctgagcagcagactgagagtgtccgccaccttctggcagaacccccggaaccacttcagatgccaggtgcagttctacggcctgagcgagaacgacgagtggacccaggacagagccaagcccgtgacccagatcgtgtctgccgaagcctggggcagagccgattgcggctttaccagcgagagctaccagcagggcgtgctgagcgccaccatcctgtacgagatcctgctgggcaaggccaccctgtacgccgtgctggtgtctgccctggtgctgatggctatggtcaagcggaaggacagccggggaagggccaagcgatctggatctggagcaacaaacttctcactactcaaacaagcaggtgacgtggaggagaatcccgggcctactagaggccatatgaccgagtacaagcccacggtgcgcctcgccacccgcgacgacgtccccagggccgtacgcaccctcgccgccgcgttcgccgactaccccgccacgcgccacaccgtcgatccggaccgccacatcgagcgggtcaccgagctgcaagaactcttcctcacgcgcgtcgggctcgacatcggcaaggtgtgggtcgcggacgacggcgccgcggtggcggtctggaccacgccggagagcgtcgaagcgggggcggtgttcgccgagatcggcccgcgcatggccgagttgagcggttcccggctggccgcgcagcaacagatggaaggcctcctggcgccgcaccggcccaaggagcccgcgtggttcctggccaccgtcggcgtctcgcccgaccaccagggcaagggtctgggcagcgccgtcgtgctccccggagtggaggcggccgagcgcgccggggtgcccgccttcctggagacctccgcgccccgcaacctccccttctacgagcggctcggcttcaccgtcaccgccgacgtcgaggtgcccgaaggaccgcgcacctggtgcatgacccgcaagcccggtgcctga

SEQ ID NO: 5104 - DNA, 2991 bp, Artificial Sequence
  Synthetic Polynucloetide
atggccttaccagtgaccgccttgctcctgccgctggccttgctgctccacgccgccaggccggaggttcagctgcttgagtctggcggaggactggttcaacctggcggaagcctgagactgtcttgtgccgccagcggcttcacctttagcagctacgccatgagctgggtccgacaggctcctggcaaaggactggaatgggtgtccagcatcagcggcagcggcgactacatctactacgccgatagcgtgaagggcagattcaccatcagccgggacatcagcaagaacaccctgtacctccagatgaacagcctgagagccgaggacaccgccgtgtactactgtgccaaagaaggcaccggcgctaacagcagcctggccgattatagaggccagggcacactggtcaccgtgtctagtggcggaggaagcggcggaggatctcaggtccagctcgtcgagtccggcggcggcctcgtccaggccggcgactccgtcaccctctcctgcaccgcctccggccgcaccttctcctcctacgccctcgcctggttccgccagcgccccggcaaggagcgcgagttcgtcgccggcctccgctggggcggccccaccaactacgccgactccgtcaaggaccgcttcaccatctccggcgactccgccaagcacaccatgtacctccagatgaactccctcaagcccgaggacaccgccgtctactactgcggctacaaccccggcggctgggccgtcccctcccagtacgagtacgactcctggggccagggcacccaggtcaccgtctcctccggtaccggcggaggcggatctggcggcggaggtagcggtggcggaggatctgaattcgacatccagatgacacagagccctagcagcctgtctgccagcgtgggagacagagtgaccatcacatgcaaggccagcgaccacatcaacaactggctggcctggtatcagcagaagcctggacaggcccctaagctgctgatctacggcgctaccacactggaaacaggcgtgcccagcagattttctggcagcggctctggcaccgactacaccctgacaatatccagcctccagcctgaggacttcgccacctactactgtcagcagagctggaacaccccttggacattcggccagggcaccaagctggaaatcaagagaggcggaggcggaagtggaggcggaggatctggcggcggaggctctcaagttcagcttcaacagcctggcgctgagctggtcaaacctggcgcttctgtgaagatgagctgcaaagccagcggctacgccttcagcagctactggatcaactggatgaagcagaaacccggccagggactcgaatggatcggccaaatctatcccggcgacggcgacaccaactacaacggcaagttcaagggcagagccacactgaccgccgatacctctagcagcacagcctacatgcagctgagcagcctgaccagcgaagatagcgccgtgtacttctgtgcccggtccatcacaacagtcgtgggctgcgctatggactattggggccagggaacaagcgtgaccgtgtctagtacgcgtgagcagaaactgatctcggaagaggatctggggagcggcaccccattcccttctctggcccctcccatcatgctgctggtggacggcaagcagcagatggtggtcgtgtgcctggtgctggatgtggccccacctggactggacagccccatctggtttagcgccggcaatggctctgccctggacgcctttacctacggcccaagccctgccaccgatggcacctggacaaatctggcccacctgagcctgcccagcgaggaactggcttcttgggagcctctcgtgtgccacacaggacctggcgctgagggacacagcagatccacccagcctatgcacctgtctggcgaggccagcaccgccagaacctgtcctcaggaacctctgagaggcacccctggcggagcactgtggctgggagtgctgagactgctgctgttcaagctgctgctgtttgacctgctgctgacctgctcctgtctgtgcgatcctgccggccctctgccttctcctgccaccaccacaagactgagagccctgggcagccacagactgcaccctgccacagagacaggcggcagagaggccacaagcagccctagaccccagcccagagacagaagatggggcgataccccccctggcagaaagcctggatctccagtccgcgccaagagaagcggatctggcgtgaagcagaccctgaatttcgacctgctgaagctggctggcgacgtggaatccaacccaggcccttctagatctagaggccatatgaccgagtacaagcccacggtgcgcctcgccacccgcgacgacgtccccagggccgtacgcaccctcgccgccgcgttcgccgactaccccgccacgcgccacaccgtcgatccggaccgccacatcgagcgggtcaccgagctgcaagaactcttcctcacgcgcgtcgggctcgacatcggcaaggtgtgggtcgcggacgacggcgccgcggtggcggtctggaccacgccggagagcgtcgaagcgggggcggtgttcgccgagatcggcccgcgcatggccgagttgagcggttcccggctggccgcgcagcaacagatggaaggcctcctggcgccgcaccggcccaaggagcccgcgtggttcctggccaccgtcggcgtctcgcccgaccaccagggcaagggtctgggcagcgccgtcgtgctccccggagtggaggcggccgagcgcgccggggtgcccgccttcctggagacctccgcgccccgcaacctccccttctacgagcggctcggcttcaccgtcaccgccgacgtcgaggtgcccgaaggaccgcgcacctggtgcatgacccgcaagcccggtgcctga

SEQ ID NO: 5105 - DNA, 2433 bp, Artificial Sequence
  Synthetic Polynucloetide
atggccttaccagtgaccgccttgctcctgccgctggccttgctgctccacgccgccaggccggaggttcagctgcttgagtctggcggaggactggttcaacctggcggaagcctgagactgtcttgtgccgccagcggcttcacctttagcagctacgccatgagctgggtccgacaggctcctggcaaaggactggaatgggtgtccagcatcagcggcagcggcgactacatctactacgccgatagcgtgaagggcagattcaccatcagccgggacatcagcaagaacaccctgtacctccagatgaacagcctgagagccgaggacaccgccgtgtactactgtgccaaagaaggcaccggcgctaacagcagcctggccgattatagaggccagggcacactggtcaccgtgtctagtggcggaggaagcggcggaggatctcaggtccagctcgtcgagtccggcggcggcctcgtccaggccggcgactccgtcaccctctcctgcaccgcctccggccgcaccttctcctcctacgccctcgcctggttccgccagcgccccggcaaggagcgcgagttcgtcgccggcctccgctggggcggccccaccaactacgccgactccgtcaaggaccgcttcaccatctccggcgactccgccaagcacaccatgtacctccagatgaactccctcaagcccgaggacaccgccgtctactactgcggctacaaccccggcggctgggccgtcccctcccagtacgagtacgactcctggggccagggcacccaggtcaccgtctcctccggtaccggcggaggcggatctggcggcggaggtagcggtggcggaggatctgaattcgacatccagatgacacagagccctagcagcctgtctgccagcgtgggagacagagtgaccatcacatgcaaggccagcgaccacatcaacaactggctggcctggtatcagcagaagcctggacaggcccctaagctgctgatctacggcgctaccacactggaaacaggcgtgcccagcagattttctggcagcggctctggcaccgactacaccctgacaatatccagcctccagcctgaggacttcgccacctactactgtcagcagagctggaacaccccttggacattcggccagggcaccaagctggaaatcaagagactcgaggacctgaagaacgtgttcccacctgaggtggccgtgttcgagcctagcgaggccgagatcagccacacccagaaagccaccctcgtgtgcctggctaccggcttctaccccgaccatgtggaactgtcttggtgggtcaacggcaaagaggtgcacagcggcgtgtctaccgacccccagccactgaaagaacagcccgccctgaacgacagccggtactgcctgagcagcagactgagagtgtccgccaccttctggcagaacccccggaaccacttcagatgccaggtgcagttctacggcctgagcgagaacgacgagtggacccaggacagagccaagcccgtgacccagatcgtgtctgccgaagcctggggcagagccgattgcggctttaccagcgagagctaccagcagggcgtgctgagcgccaccatcctgtacgagatcctgctgggcaaggccaccctgtacgccgtgctggtgtctgccctggtgctgatggctatggtcaagcggaaggacagccggggaagggccaagcgatctggatctggagcaacaaacttctcactactcaaacaagcaggtgacgtggaggagaatcccgggcctactagaggccatatgaccgagtacaagcccacggtgcgcctcgccacccgcgacgacgtccccagggccgtacgcaccctcgccgccgcgttcgccgactaccccgccacgcgccacaccgtcgatccggaccgccacatcgagcgggtcaccgagctgcaagaactcttcctcacgcgcgtcgggctcgacatcggcaaggtgtgggtcgcggacgacggcgccgcggtggcggtctggaccacgccggagagcgtcgaagcgggggcggtgttcgccgagatcggcccgcgcatggccgagttgagcggttcccggctggccgcgcagcaacagatggaaggcctcctggcgccgcaccggcccaaggagcccgcgtggttcctggccaccgtcggcgtctcgcccgaccaccagggcaagggtctgggcagcgccgtcgtgctccccggagtggaggcggccgagcgcgccggggtgcccgccttcctggagacctccgcgccccgcaacctccccttctacgagcggctcggcttcaccgtcaccgccgacgtcgaggtgcccgaaggaccgcgcacctggtgcatgacccgcaagcccggtgcctga

SEQ ID NO: 5106 - DNA, 1740 bp, Artificial Sequence
  Synthetic Polynucloetide
atggccttaccagtgaccgccttgctcctgccgctggccttgctgctccacgccgccaggccggaggttcagctgcttgagtctggcggaggactggttcaacctggcggaagcctgagactgtcttgtgccgccagcggcttcacctttagcagctacgccatgagctgggtccgacaggctcctggcaaaggactggaatgggtgtccagcatcagcggcagcggcgactacatctactacgccgatagcgtgaagggcagattcaccatcagccgggacatcagcaagaacaccctgtacctccagatgaacagcctgagagccgaggacaccgccgtgtactactgtgccaaagaaggcaccggcgctaacagcagcctggccgattatagaggccagggcacactggtcaccgtgtctagtggcggaggaagcggcggaggatctcaggtccagctcgtcgagtccggcggcggcctcgtccaggccggcgactccgtcaccctctcctgcaccgcctccggccgcaccttctcctcctacgccctcgcctggttccgccagcgccccggcaaggagcgcgagttcgtcgccggcctccgctggggcggccccaccaactacgccgactccgtcaaggaccgcttcaccatctccggcgactccgccaagcacaccatgtacctccagatgaactccctcaagcccgaggacaccgccgtctactactgcggctacaaccccggcggctgggccgtcccctcccagtacgagtacgactcctggggccagggcacccaggtcaccgtctcctccggtaccggcggaggcggatctggcggcggaggtagcggtggcggaggatctgaattcgacatccagatgacacagagccctagcagcctgtctgccagcgtgggagacagagtgaccatcacatgcaaggccagcgaccacatcaacaactggctggcctggtatcagcagaagcctggacaggcccctaagctgctgatctacggcgctaccacactggaaacaggcgtgcccagcagattttctggcagcggctctggcaccgactacaccctgacaatatccagcctccagcctgaggacttcgccacctactactgtcagcagagctggaacaccccttggacattcggccagggcaccaagctggaaatcaagagactcgaggacctgaagaacgtgttcccacctgaggtggccgtgttcgagcctagcgaggccgagatcagccacacccagaaagccaccctcgtgtgcctggctaccggcttctaccccgaccatgtggaactgtcttggtgggtcaacggcaaagaggtgcacagcggcgtgtctaccgacccccagccactgaaagaacagcccgccctgaacgacagccggtactgcctgagcagcagactgagagtgtccgccaccttctggcagaacccccggaaccacttcagatgccaggtgcagttctacggcctgagcgagaacgacgagtggacccaggacagagccaagcccgtgacccagatcgtgtctgccgaagcctggggcagagccgattgcggctttaccagcgagagctaccagcagggcgtgctgagcgccaccatcctgtacgagatcctgctgggcaaggccaccctgtacgccgtgctggtgtctgccctggtgctgatggctatggtcaagcggaaggacagccgggga

SEQ ID NO: 5107 - DNA, 2487 bp, Artificial Sequence
  Synthetic Polynucloetide
atggccttaccagtgaccgccttgctcctgccgctggccttgctgctccacgccgccaggccggaggttcagctgcttgagtctggcggaggactggttcaacctggcggaagcctgagactgtcttgtgccgccagcggcttcacctttagcagctacgccatgagctgggtccgacaggctcctggcaaaggactggaatgggtgtccagcatcagcggcagcggcgactacatctactacgccgatagcgtgaagggcagattcaccatcagccgggacatcagcaagaacaccctgtacctccagatgaacagcctgagagccgaggacaccgccgtgtactactgtgccaaagaaggcaccggcgctaacagcagcctggccgattatagaggccagggcacactggtcaccgtgtctagtggcggaggaagcggcggaggatctcaggtccagctcgtcgagtccggcggcggcctcgtccaggccggcgactccgtcaccctctcctgcaccgcctccggccgcaccttctcctcctacgccctcgcctggttccgccagcgccccggcaaggagcgcgagttcgtcgccggcctccgctggggcggccccaccaactacgccgactccgtcaaggaccgcttcaccatctccggcgactccgccaagcacaccatgtacctccagatgaactccctcaagcccgaggacaccgccgtctactactgcggctacaaccccggcggctgggccgtcccctcccagtacgagtacgactcctggggccagggcacccaggtcaccgtctcctccggtaccggcggaggcggatctggcggcggaggtagcggtggcggaggatctgaattcgacatccagatgacacagagccctagcagcctgtctgccagcgtgggagacagagtgaccatcacatgcaaggccagcgaccacatcaacaactggctggcctggtatcagcagaagcctggacaggcccctaagctgctgatctacggcgctaccacactggaaacaggcgtgcccagcagattttctggcagcggctctggcaccgactacaccctgacaatatccagcctccagcctgaggacttcgccacctactactgtcagcagagctggaacaccccttggacattcggccagggcaccaagctggaaatcaagagactcgaggggaaaccaattcccaaccctcttctgggactggattcaaccggcagcggcgaggacctgaagaacgtgttcccacctgaggtggccgtgttcgagcctagcgaggccgagatcagccacacccagaaagccaccctcgtgtgcctggctaccggcttctaccccgaccatgtggaactgtcttggtgggtcaacggcaaagaggtgcacagcggcgtgtgtaccgacccccagccactgaaagaacagcccgccctgaacgacagccggtactgcctgagcagcagactgagagtgtccgccaccttctggcagaacccccggaaccacttcagatgccaggtgcagttctacggcctgagcgagaacgacgagtggacccaggacagagccaagcccgtgacccagatcgtgtctgccgaagcctggggcagagccgattgcggctttaccagcgagagctaccagcagggcgtgctgagcgccaccatcctgtacgagatcctgctgggcaaggccaccctgtacgccgtgctggtgtctgccctggtgctgatggctatggtcaagcggaaggacagccggggaagggccaagcgatctggatctggagcaacaaacttctcactactcaaacaagcaggtgacgtggaggagaatcccgggcctactagaggccatatgaccgagtacaagcccacggtgcgcctcgccacccgcgacgacgtccccagggccgtacgcaccctcgccgccgcgttcgccgactaccccgccacgcgccacaccgtcgatccggaccgccacatcgagcgggtcaccgagctgcaagaactcttcctcacgcgcgtcgggctcgacatcggcaaggtgtgggtcgcggacgacggcgccgcggtggcggtctggaccacgccggagagcgtcgaagcgggggcggtgttcgccgagatcggcccgcgcatggccgagttgagcggttcccggctggccgcgcagcaacagatggaaggcctcctggcgccgcaccggcccaaggagcccgcgtggttcctggccaccgtcggcgtctcgcccgaccaccagggcaagggtctgggcagcgccgtcgtgctccccggagtggaggcggccgagcgcgccggggtgcccgccttcctggagacctccgcgccccgcaacctccccttctacgagcggctcggcttcaccgtcaccgccgacgtcgaggtgcccgaaggaccgcgcacctggtgcatgacccgcaagcccggtgcctga

SEQ ID NO: 5108 - DNA, 1797 bp, Artificial Sequence
  Synthetic Polynucloetide
atggccttaccagtgaccgccttgctcctgccgctggccttgctgctccacgccgccaggccggaggttcagctgcttgagtctggcggaggactggttcaacctggcggaagcctgagactgtcttgtgccgccagcggcttcacctttagcagctacgccatgagctgggtccgacaggctcctggcaaaggactggaatgggtgtccagcatcagcggcagcggcgactacatctactacgccgatagcgtgaagggcagattcaccatcagccgggacatcagcaagaacaccctgtacctccagatgaacagcctgagagccgaggacaccgccgtgtactactgtgccaaagaaggcaccggcgctaacagcagcctggccgattatagaggccagggcacactggtcaccgtgtctagtggcggaggaagcggcggaggatctcaggtccagctcgtcgagtccggcggcggcctcgtccaggccggcgactccgtcaccctctcctgcaccgcctccggccgcaccttctcctcctacgccctcgcctggttccgccagcgccccggcaaggagcgcgagttcgtcgccggcctccgctggggcggccccaccaactacgccgactccgtcaaggaccgcttcaccatctccggcgactccgccaagcacaccatgtacctccagatgaactccctcaagcccgaggacaccgccgtctactactgcggctacaaccccggcggctgggccgtcccctcccagtacgagtacgactcctggggccagggcacccaggtcaccgtctcctccggtaccggcggaggcggatctggcggcggaggtagcggtggcggaggatctgaattcgacatccagatgacacagagccctagcagcctgtctgccagcgtgggagacagagtgaccatcacatgcaaggccagcgaccacatcaacaactggctggcctggtatcagcagaagcctggacaggcccctaagctgctgatctacggcgctaccacactggaaacaggcgtgcccagcagattttctggcagcggctctggcaccgactacaccctgacaatatccagcctccagcctgaggacttcgccacctactactgtcagcagagctggaacaccccttggacattcggccagggcaccaagctggaaatcaagagactcgaggggaaaccaattcccaaccctcttctgggactggattcaaccggcagcggcgaggacctgaagaacgtgttcccacctgaggtggccgtgttcgagcctagcgaggccgagatcagccacacccagaaagccaccctcgtgtgcctggctaccggcttctaccccgaccatgtggaactgtcttggtgggtcaacggcaaagaggtgcacagcggcgtgtgtaccgacccccagccactgaaagaacagcccgccctgaacgacagccggtactgcctgagcagcagactgagagtgtccgccaccttctggcagaacccccggaaccacttcagatgccaggtgcagttctacggcctgagcgagaacgacgagtggacccaggacagagccaagcccgtgacccagatcgtgtctgccgaagcctggggcagagccgattgcggctttaccagcgagagctaccagcagggcgtgctgagcgccaccatcctgtacgagatcctgctgggcaaggccaccctgtacgccgtgctggtgtctgccctggtgctgatggctatggtcaagcggaaggacagccggggatga

SEQ ID NO: 5109 - DNA, 2745 bp, Artificial Sequence
  Synthetic Polynucloetide
atggccttaccagtgaccgccttgctcctgccgctggccttgctgctccacgccgccaggccggaggttcagctgcttgagtctggcggaggactggttcaacctggcggaagcctgagactgtcttgtgccgccagcggcttcacctttagcagctacgccatgagctgggtccgacaggctcctggcaaaggactggaatgggtgtccagcatcagcggcagcggcgactacatctactacgccgatagcgtgaagggcagattcaccatcagccgggacatcagcaagaacaccctgtacctccagatgaacagcctgagagccgaggacaccgccgtgtactactgtgccaaagaaggcaccggcgctaacagcagcctggccgattatagaggccagggcacactggtcaccgtgtctagtggcggaggaagcggcggaggatctcaggtccagctcgtcgagtccggcggcggcctcgtccaggccggcgactccgtcaccctctcctgcaccgcctccggccgcaccttctcctcctacgccctcgcctggttccgccagcgccccggcaaggagcgcgagttcgtcgccggcctccgctggggcggccccaccaactacgccgactccgtcaaggaccgcttcaccatctccggcgactccgccaagcacaccatgtacctccagatgaactccctcaagcccgaggacaccgccgtctactactgcggctacaaccccggcggctgggccgtcccctcccagtacgagtacgactcctggggccagggcacccaggtcaccgtctcctccggtaccggcggaggcggatctggcggcggaggtagcggtggcggaggatctgaattcgacatccagatgacacagagccctagcagcctgtctgccagcgtgggagacagagtgaccatcacatgcaaggccagcgaccacatcaacaactggctggcctggtatcagcagaagcctggacaggcccctaagctgctgatctacggcgctaccacactggaaacaggcgtgcccagcagattttctggcagcggctctggcaccgactacaccctgacaatatccagcctccagcctgaggacttcgccacctactactgtcagcagagctggaacaccccttggacattcggccagggcaccaagctggaaatcaagagaggcggaggcggaagtggaggcggaggatctggcggcggaggctctcaagttcagcttcaacagcctggcgctgagctggtcaaacctggcgcttctgtgaagatgagctgcaaagccagcggctacgccttcagcagctactggatcaactggatgaagcagaaacccggccagggactcgaatggatcggccaaatctatcccggcgacggcgacaccaactacaacggcaagttcaagggcagagccacactgaccgccgatacctctagcagcacagcctacatgcagctgagcagcctgaccagcgaagatagcgccgtgtacttctgtgcccggtccatcacaacagtcgtgggctgcgctatggactattggggccagggaacaagcgtgaccgtgtctagtacgcgtgggagcggcatccagaaccctgatcctgccgtgtaccagctgcgggatagcaagagcagcgacaagagcgtgtgtctgttcaccgacttcgacagccagaccaacgtgtcccagagcaaggactccgacgtgtacatcaccgataagaccgtgctggacatgcggagcatggacttcaagagcaactccgccgtggcctggtccaacaagtccgatttcgcctgcgccaacgccttcaacaacagcattatccccgaggacacattcttcccaagcagcgacgtgccctgcgacgtgaagctggtggaaaagagcttcgagacagacaccaacctgaacttccagaacctgagcgtgatcggcttcagaatcctgctgctgaaagtggccggctttaacctgctgatgaccctgcggctgtggtccagccgcgccaagagaagcggatctggcgtgaagcagaccctgaatttcgacctgctgaagctggctggcgacgtggaatccaacccaggcccttctagaggccatatgaccgagtacaagcccacggtgcgcctcgccacccgcgacgacgtccccagggccgtacgcaccctcgccgccgcgttcgccgactaccccgccacgcgccacaccgtcgatccggaccgccacatcgagcgggtcaccgagctgcaagaactcttcctcacgcgcgtcgggctcgacatcggcaaggtgtgggtcgcggacgacggcgccgcggtggcggtctggaccacgccggagagcgtcgaagcgggggcggtgttcgccgagatcggcccgcgcatggccgagttgagcggttcccggctggccgcgcagcaacagatggaaggcctcctggcgccgcaccggcccaaggagcccgcgtggttcctggccaccgtcggcgtctcgcccgaccaccagggcaagggtctgggcagcgccgtcgtgctccccggagtggaggcggccgagcgcgccggggtgcccgccttcctggagacctccgcgccccgcaacctccccttctacgagcggctcggcttcaccgtcaccgccgacgtcgaggtgcccgaaggaccgcgcacctggtgcatgacccgcaagcccggtgcctga

SEQ ID NO: 5110 - DNA, 2841 bp, Artificial Sequence
  Synthetic Polynucloetide
atggccttaccagtgaccgccttgctcctgccgctggccttgctgctccacgccgccaggccggaggttcagctgcttgagtctggcggaggactggttcaacctggcggaagcctgagactgtcttgtgccgccagcggcttcacctttagcagctacgccatgagctgggtccgacaggctcctggcaaaggactggaatgggtgtccagcatcagcggcagcggcgactacatctactacgccgatagcgtgaagggcagattcaccatcagccgggacatcagcaagaacaccctgtacctccagatgaacagcctgagagccgaggacaccgccgtgtactactgtgccaaagaaggcaccggcgctaacagcagcctggccgattatagaggccagggcacactggtcaccgtgtctagtggcggaggaagcggcggaggatctcaggtccagctcgtcgagtccggcggcggcctcgtccaggccggcgactccgtcaccctctcctgcaccgcctccggccgcaccttctcctcctacgccctcgcctggttccgccagcgccccggcaaggagcgcgagttcgtcgccggcctccgctggggcggccccaccaactacgccgactccgtcaaggaccgcttcaccatctccggcgactccgccaagcacaccatgtacctccagatgaactccctcaagcccgaggacaccgccgtctactactgcggctacaaccccggcggctgggccgtcccctcccagtacgagtacgactcctggggccagggcacccaggtcaccgtctcctccggtaccggcggaggcggatctggcggcggaggtagcggtggcggaggatctgaattcgacatccagatgacacagagccctagcagcctgtctgccagcgtgggagacagagtgaccatcacatgcaaggccagcgaccacatcaacaactggctggcctggtatcagcagaagcctggacaggcccctaagctgctgatctacggcgctaccacactggaaacaggcgtgcccagcagattttctggcagcggctctggcaccgactacaccctgacaatatccagcctccagcctgaggacttcgccacctactactgtcagcagagctggaacaccccttggacattcggccagggcaccaagctggaaatcaagagaggcggaggcggaagtggaggcggaggatctggcggcggaggctctcaagttcagcttcaacagcctggcgctgagctggtcaaacctggcgcttctgtgaagatgagctgcaaagccagcggctacgccttcagcagctactggatcaactggatgaagcagaaacccggccagggactcgaatggatcggccaaatctatcccggcgacggcgacaccaactacaacggcaagttcaagggcagagccacactgaccgccgatacctctagcagcacagcctacatgcagctgagcagcctgaccagcgaagatagcgccgtgtacttctgtgcccggtccatcacaacagtcgtgggctgcgctatggactattggggccagggaacaagcgtgaccgtgtctagtctcgaggacctgaagaacgtgttcccacctgaggtggccgtgttcgagcctagcaaggccgagatcgcccacacccagaaagccaccctcgtgtgcctggctaccggcttctaccccgaccatgtggaactgtcttggtgggtcaacggcaaagaggtgcacagcggcgtgtctaccgacccccagccactgaaagaacagcccgccctgaacgacagccggtactgcctgagcagcagactgagagtgtccgccaccttctggcagaacccccggaaccacttcagatgccaggtgcagttctacggcctgagcgagaacgacgagtggacccaggacagagccaagcccgtgacccagatcgtgtctgccgaagcctggggcagagccgattgcggcatcaccagcgccagctaccaccagggcgtgctgagcgccaccatcctgtacgagatcctgctgggcaaggccaccctgtacgccgtgctggtgtctgccctggtgctgatggctatggtcaagcggaaggacagccggggaagggccaagcgatctggatctggagcaacaaacttctcactactcaaacaagcaggtgacgtggaggagaatcccgggcctactagaggccatatgaccgagtacaagcccacggtgcgcctcgccacccgcgacgacgtccccagggccgtacgcaccctcgccgccgcgttcgccgactaccccgccacgcgccacaccgtcgatccggaccgccacatcgagcgggtcaccgagctgcaagaactcttcctcacgcgcgtcgggctcgacatcggcaaggtgtgggtcgcggacgacggcgccgcggtggcggtctggaccacgccggagagcgtcgaagcgggggcggtgttcgccgagatcggcccgcgcatggccgagttgagcggttcccggctggccgcgcagcaacagatggaaggcctcctggcgccgcaccggcccaaggagcccgcgtggttcctggccaccgtcggcgtctcgcccgaccaccagggcaagggtctgggcagcgccgtcgtgctccccggagtggaggcggccgagcgcgccggggtgcccgccttcctggagacctccgcgccccgcaacctccccttctacgagcggctcggcttcaccgtcaccgccgacgtcgaggtgcccgaaggaccgcgcacctggtgcatgacccgcaagcccggtgcctga

SEQ ID NO: 5111 - DNA, 3795 bp, Artificial Sequence
  Synthetic Polynucloetide
atggccttaccagtgaccgccttgctcctgccgctggccttgctgctccacgccgccaggccggaggttcagctgcttgagtctggcggaggactggttcaacctggcggaagcctgagactgtcttgtgccgccagcggcttcacctttagcagctacgccatgagctgggtccgacaggctcctggcaaaggactggaatgggtgtccagcatcagcggcagcggcgactacatctactacgccgatagcgtgaagggcagattcaccatcagccgggacatcagcaagaacaccctgtacctccagatgaacagcctgagagccgaggacaccgccgtgtactactgtgccaaagaaggcaccggcgctaacagcagcctggccgattatagaggccagggcacactggtcaccgtgtctagtggcggaggaagcggcggaggatctcaggtccagctcgtcgagtccggcggcggcctcgtccaggccggcgactccgtcaccctctcctgcaccgcctccggccgcaccttctcctcctacgccctcgcctggttccgccagcgccccggcaaggagcgcgagttcgtcgccggcctccgctggggcggccccaccaactacgccgactccgtcaaggaccgcttcaccatctccggcgactccgccaagcacaccatgtacctccagatgaactccctcaagcccgaggacaccgccgtctactactgcggctacaaccccggcggctgggccgtcccctcccagtacgagtacgactcctggggccagggcacccaggtcaccgtctcctccggtaccggcggaggcggatctggcggcggaggtagcggtggcggaggatctgaattcgacatccagatgacacagagccctagcagcctgtctgccagcgtgggagacagagtgaccatcacatgcaaggccagcgaccacatcaacaactggctggcctggtatcagcagaagcctggacaggcccctaagctgctgatctacggcgctaccacactggaaacaggcgtgcccagcagattttctggcagcggctctggcaccgactacaccctgacaatatccagcctccagcctgaggacttcgccacctactactgtcagcagagctggaacaccccttggacattcggccagggcaccaagctggaaatcaagagactcgagatccagaaccctgatcctgccgtgtaccagctgcgggatagcaagagcagcgacaagagcgtgtgtctgttcaccgacttcgacagccagaccaacgtgtcccagagcaaggactccgacgtgtacatcaccgataagtgcgtgctggacatgcggagcatggacttcaagagcaactccgccgtggcctggtccaacaagtccgatttcgcctgcgccaacgccttcaacaacagcattatccccgaggacacattcttcccaagcagcgacgtgccctgcgacgtgaagctggtggaaaagagcttcgagacagacaccaacctgaacttccagaacctgagcgtgatcggcttcagaatcctgctgctgaaagtggccggctttaacctgctgatgaccctgcggctgtggtccagccgcgccaagagaagcggatctggcgtgaagcagaccctgaatttcgacctgctgaagctggctggcgacgtggaatccaacccaggccctactagtatggactggatttggcgcatccttttccttgtcggcgctgctaccggcgcccattccgggccccaggttcagctgcaagagtctggcggaggacttgctcaagctggcggaagcctgagactgtcttgtgccgcctctggcagaaccttcagcatgggctggtttagacaggcccctggcaaagagagagagttcgtcgccgccatcacatacagcggcggcagcccttactacgcctcttctgtcagaggccggttcaccatcagccgggacaacgccaagaacaccgtgtacctccagatgaacagcctgaagccagaggacaccgccgtgtactactgtgccgccaatccaacctacggcagcgactggaatgccgagaattggggccagggcacccaagtgacagtgtctagtggatccggcggcggaggatctggcggaggcggatctgggggcggaggctctttcgaacaagttcagcttcaacagcctggcgctgagctggtcaaacctggcgcttctgtgaagatgagctgcaaagccagcggctacgccttcagcagctactggatcaactggatgaagcagaaacccggccagggactcgaatggatcggccaaatctatcccggcgacggcgacaccaactacaacggcaagttcaagggcagagccacactgaccgccgatacctctagcagcacagcctacatgcagctgagcagcctgaccagcgaagatagcgccgtgtacttctgtgcccggtccatcacaacagtcgtgggctgcgctatggactattggggccagggaacaagcgtgaccgtgtctagtacgcgtgaggacctgaagaacgtgttcccacctgaggtggccgtgttcgagcctagcaaggccgagatcgcccacacccagaaagccaccctcgtgtgcctggctaccggcttctaccccgaccatgtggaactgtcttggtgggtcaacggcaaagaggtgcacagcggcgtgtgtaccgacccccagccactgaaagaacagcccgccctgaacgacagccggtactgcctgagcagcagactgagagtgtccgccaccttctggcagaacccccggaaccacttcagatgccaggtgcagttctacggcctgagcgagaacgacgagtggacccaggacagagccaagcccgtgacccagatcgtgtctgccgaagcctggggcagagccgattgcggcatcaccagcgccagctaccaccagggcgtgctgagcgccaccatcctgtacgagatcctgctgggcaaggccaccctgtacgccgtgctggtgtctgccctggtgctgatggctatggtcaagcggaaggacagccggggaagggccaagcgatctggatctggagcaacaaacttctcactactcaaacaagcaggtgacgtggaggagaatcccgggccttctagaggccatatgaccgagtacaagcccacggtgcgcctcgccacccgcgacgacgtccccagggccgtacgcaccctcgccgccgcgttcgccgactaccccgccacgcgccacaccgtcgatccggaccgccacatcgagcgggtcaccgagctgcaagaactcttcctcacgcgcgtcgggctcgacatcggcaaggtgtgggtcgcggacgacggcgccgcggtggcggtctggaccacgccggagagcgtcgaagcgggggcggtgttcgccgagatcggcccgcgcatggccgagttgagcggttcccggctggccgcgcagcaacagatggaaggcctcctggcgccgcaccggcccaaggagcccgcgtggttcctggccaccgtcggcgtctcgcccgaccaccagggcaagggtctgggcagcgccgtcgtgctccccggagtggaggcggccgagcgcgccggggtgcccgccttcctggagacctccgcgccccgcaacctccccttctacgagcggctcggcttcaccgtcaccgccgacgtcgaggtgcccgaaggaccgcgcacctggtgcatgacccgcaagcccggtgcctga

SEQ ID NO: 5112 - DNA, 3792 bp, Artificial Sequence
  Synthetic Polynucloetide
atggccttaccagtgaccgccttgctcctgccgctggccttgctgctccacgccgccaggccggaggttcagctgcttgagtctggcggaggactggttcaacctggcggaagcctgagactgtcttgtgccgccagcggcttcacctttagcagctacgccatgagctgggtccgacaggctcctggcaaaggactggaatgggtgtccagcatcagcggcagcggcgactacatctactacgccgatagcgtgaagggcagattcaccatcagccgggacatcagcaagaacaccctgtacctccagatgaacagcctgagagccgaggacaccgccgtgtactactgtgccaaagaaggcaccggcgctaacagcagcctggccgattatagaggccagggcacactggtcaccgtgtctagtggcggaggaagcggcggaggatctcaggtccagctcgtcgagtccggcggcggcctcgtccaggccggcgactccgtcaccctctcctgcaccgcctccggccgcaccttctcctcctacgccctcgcctggttccgccagcgccccggcaaggagcgcgagttcgtcgccggcctccgctggggcggccccaccaactacgccgactccgtcaaggaccgcttcaccatctccggcgactccgccaagcacaccatgtacctccagatgaactccctcaagcccgaggacaccgccgtctactactgcggctacaaccccggcggctgggccgtcccctcccagtacgagtacgactcctggggccagggcacccaggtcaccgtctcctccggtaccggcggaggcggatctggcggcggaggtagcggtggcggaggatctgaattcgacatccagatgacacagagccctagcagcctgtctgccagcgtgggagacagagtgaccatcacatgcaaggccagcgaccacatcaacaactggctggcctggtatcagcagaagcctggacaggcccctaagctgctgatctacggcgctaccacactggaaacaggcgtgcccagcagattttctggcagcggctctggcaccgactacaccctgacaatatccagcctccagcctgaggacttcgccacctactactgtcagcagagctggaacaccccttggacattcggccagggcaccaagctggaaatcaagagactcgaggacctgaagaacgtgttcccacctgaggtggccgtgttcgagcctagcaaggccgagatcgcccacacccagaaagccaccctcgtgtgcctggctaccggcttctaccccgaccatgtggaactgtcttggtgggtcaacggcaaagaggtgcacagcggcgtgtgtaccgacccccagccactgaaagaacagcccgccctgaacgacagccggtactgcctgagcagcagactgagagtgtccgccaccttctggcagaacccccggaaccacttcagatgccaggtgcagttctacggcctgagcgagaacgacgagtggacccaggacagagccaagcccgtgacccagatcgtgtctgccgaagcctggggcagagccgattgcggcatcaccagcgccagctaccaccagggcgtgctgagcgccaccatcctgtacgagatcctgctgggcaaggccaccctgtacgccgtgctggtgtctgccctggtgctgatggctatggtcaagcggaaggacagccggggaagggccaagcgatctggatctggagcaacaaacttctcactactcaaacaagcaggtgacgtggaggagaatcccgggcctactagtatggactggatttggcgcatccttttccttgtcggcgctgctaccggcgcccattccgggccccaggttcagctgcaagagtctggcggaggacttgctcaagctggcggaagcctgagactgtcttgtgccgcctctggcagaaccttcagcatgggctggtttagacaggcccctggcaaagagagagagttcgtcgccgccatcacatacagcggcggcagcccttactacgcctcttctgtcagaggccggttcaccatcagccgggacaacgccaagaacaccgtgtacctccagatgaacagcctgaagccagaggacaccgccgtgtactactgtgccgccaatccaacctacggcagcgactggaatgccgagaattggggccagggcacccaagtgacagtgtctagtggatccggcggcggaggatctggcggaggcggatctgggggcggaggctctttcgaacaagttcagcttcaacagcctggcgctgagctggtcaaacctggcgcttctgtgaagatgagctgcaaagccagcggctacgccttcagcagctactggatcaactggatgaagcagaaacccggccagggactcgaatggatcggccaaatctatcccggcgacggcgacaccaactacaacggcaagttcaagggcagagccacactgaccgccgatacctctagcagcacagcctacatgcagctgagcagcctgaccagcgaagatagcgccgtgtacttctgtgcccggtccatcacaacagtcgtgggctgcgctatggactattggggccagggaacaagcgtgaccgtgtctagtacgcgtatccagaaccctgatcctgccgtgtaccagctgcgggatagcaagagcagcgacaagagcgtgtgtctgttcaccgacttcgacagccagaccaacgtgtcccagagcaaggactccgacgtgtacatcaccgataagtgcgtgctggacatgcggagcatggacttcaagagcaactccgccgtggcctggtccaacaagtccgatttcgcctgcgccaacgccttcaacaacagcattatccccgaggacacattcttcccaagcagcgacgtgccctgcgacgtgaagctggtggaaaagagcttcgagacagacaccaacctgaacttccagaacctgagcgtgatcggcttcagaatcctgctgctgaaagtggccggctttaacctgctgatgaccctgcggctgtggtccagccgcgccaagagaagcggatctggcgtgaagcagaccctgaatttcgacctgctgaagctggctggcgacgtggaatccaacccaggcccttctagaggccatatgaccgagtacaagcccacggtgcgcctcgccacccgcgacgacgtccccagggccgtacgcaccctcgccgccgcgttcgccgactaccccgccacgcgccacaccgtcgatccggaccgccacatcgagcgggtcaccgagctgcaagaactcttcctcacgcgcgtcgggctcgacatcggcaaggtgtgggtcgcggacgacggcgccgcggtggcggtctggaccacgccggagagcgtcgaagcgggggcggtgttcgccgagatcggcccgcgcatggccgagttgagcggttcccggctggccgcgcagcaacagatggaaggcctcctggcgccgcaccggcccaaggagcccgcgtggttcctggccaccgtcggcgtctcgcccgaccaccagggcaagggtctgggcagcgccgtcgtgctccccggagtggaggcggccgagcgcgccggggtgcccgccttcctggagacctccgcgccccgcaacctccccttctacgagcggctcggcttcaccgtcaccgccgacgtcgaggtgcccgaaggaccgcgcacctggtgcatgacccgcaagcccggtgcctga

SEQ ID NO: 5113 - DNA, 3792 bp, Artificial Sequence
  Synthetic Polynucloetide
atggccttaccagtgaccgccttgctcctgccgctggccttgctgctccacgccgccaggccggaggttcagctgcttgagtctggcggaggactggttcaacctggcggaagcctgagactgtcttgtgccgccagcggcttcacctttagcagctacgccatgagctgggtccgacaggctcctggcaaaggactggaatgggtgtccagcatcagcggcagcggcgactacatctactacgccgatagcgtgaagggcagattcaccatcagccgggacatcagcaagaacaccctgtacctccagatgaacagcctgagagccgaggacaccgccgtgtactactgtgccaaagaaggcaccggcgctaacagcagcctggccgattatagaggccagggcacactggtcaccgtgtctagtggcggaggaagcggcggaggatctcaggtccagctcgtcgagtccggcggcggcctcgtccaggccggcgactccgtcaccctctcctgcaccgcctccggccgcaccttctcctcctacgccctcgcctggttccgccagcgccccggcaaggagcgcgagttcgtcgccggcctccgctggggcggccccaccaactacgccgactccgtcaaggaccgcttcaccatctccggcgactccgccaagcacaccatgtacctccagatgaactccctcaagcccgaggacaccgccgtctactactgcggctacaaccccggcggctgggccgtcccctcccagtacgagtacgactcctggggccagggcacccaggtcaccgtctcctccggtaccggcggaggcggatctggcggcggaggtagcggtggcggaggatctgaattcgacatccagatgacacagagccctagcagcctgtctgccagcgtgggagacagagtgaccatcacatgcaaggccagcgaccacatcaacaactggctggcctggtatcagcagaagcctggacaggcccctaagctgctgatctacggcgctaccacactggaaacaggcgtgcccagcagattttctggcagcggctctggcaccgactacaccctgacaatatccagcctccagcctgaggacttcgccacctactactgtcagcagagctggaacaccccttggacattcggccagggcaccaagctggaaatcaagagactcgaggacctgaagaacgtgttcccacctgaggtggccgtgttcgagcctagcgaggccgagatcagccacacccagaaagccaccctcgtgtgcctggctaccggcttctaccccgaccatgtggaactgtcttggtgggtcaacggcaaagaggtgcacagcggcgtgtgtaccgacccccagccactgaaagaacagcccgccctgaacgacagccggtactgcctgagcagcagactgagagtgtccgccaccttctggcagaacccccggaaccacttcagatgccaggtgcagttctacggcctgagcgagaacgacgagtggacccaggacagagccaagcccgtgacccagatcgtgtctgccgaagcctggggcagagccgattgcggctttaccagcgagagctaccagcagggcgtgctgagcgccaccatcctgtacgagatcctgctgggcaaggccaccctgtacgccgtgctggtgtctgccctggtgctgatggctatggtcaagcggaaggacagccggggaagggccaagcgatctggatctggagcaacaaacttctcactactcaaacaagcaggtgacgtggaggagaatcccgggcctactagtatggactggatttggcgcatccttttccttgtcggcgctgctaccggcgcccattccgggccccaggttcagctgcaagagtctggcggaggacttgctcaagctggcggaagcctgagactgtcttgtgccgcctctggcagaaccttcagcatgggctggtttagacaggcccctggcaaagagagagagttcgtcgccgccatcacatacagcggcggcagcccttactacgcctcttctgtcagaggccggttcaccatcagccgggacaacgccaagaacaccgtgtacctccagatgaacagcctgaagccagaggacaccgccgtgtactactgtgccgccaatccaacctacggcagcgactggaatgccgagaattggggccagggcacccaagtgacagtgtctagtggatccggcggcggaggatctggcggaggcggatctgggggcggaggctctttcgaacaagttcagcttcaacagcctggcgctgagctggtcaaacctggcgcttctgtgaagatgagctgcaaagccagcggctacgccttcagcagctactggatcaactggatgaagcagaaacccggccagggactcgaatggatcggccaaatctatcccggcgacggcgacaccaactacaacggcaagttcaagggcagagccacactgaccgccgatacctctagcagcacagcctacatgcagctgagcagcctgaccagcgaagatagcgccgtgtacttctgtgcccggtccatcacaacagtcgtgggctgcgctatggactattggggccagggaacaagcgtgaccgtgtctagtacgcgtatccagaaccctgatcctgccgtgtaccagctgcgggatagcaagagcagcgacaagagcgtgtgtctgttcaccgacttcgacagccagaccaacgtgtcccagagcaaggactccgacgtgtacatcaccgataagtgcgtgctggacatgcggagcatggacttcaagagcaactccgccgtggcctggtccaacaagtccgatttcgcctgcgccaacgccttcaacaacagcattatccccgaggacacattcttcccaagccccgagagcagctgcgacgtgaagctggtggaaaagagcttcgagacagacaccaacctgaacttccagaacctgagcgtgatcggcttcagaatcctgctgctgaaagtggccggctttaacctgctgatgaccctgcggctgtggtccagccgcgccaagagaagcggatctggcgtgaagcagaccctgaatttcgacctgctgaagctggctggcgacgtggaatccaacccaggcccttctagaggccatatgaccgagtacaagcccacggtgcgcctcgccacccgcgacgacgtccccagggccgtacgcaccctcgccgccgcgttcgccgactaccccgccacgcgccacaccgtcgatccggaccgccacatcgagcgggtcaccgagctgcaagaactcttcctcacgcgcgtcgggctcgacatcggcaaggtgtgggtcgcggacgacggcgccgcggtggcggtctggaccacgccggagagcgtcgaagcgggggcggtgttcgccgagatcggcccgcgcatggccgagttgagcggttcccggctggccgcgcagcaacagatggaaggcctcctggcgccgcaccggcccaaggagcccgcgtggttcctggccaccgtcggcgtctcgcccgaccaccagggcaagggtctgggcagcgccgtcgtgctccccggagtggaggcggccgagcgcgccggggtgcccgccttcctggagacctccgcgccccgcaacctccccttctacgagcggctcggcttcaccgtcaccgccgacgtcgaggtgcccgaaggaccgcgcacctggtgcatgacccgcaagcccggtgcctga

SEQ ID NO: 5114 - DNA, 3090 bp, Artificial Sequence
  Synthetic Polynucloetide
atggccttaccagtgaccgccttgctcctgccgctggccttgctgctccacgccgccaggccggaggttcagctgcttgagtctggcggaggactggttcaacctggcggaagcctgagactgtcttgtgccgccagcggcttcacctttagcagctacgccatgagctgggtccgacaggctcctggcaaaggactggaatgggtgtccagcatcagcggcagcggcgactacatctactacgccgatagcgtgaagggcagattcaccatcagccgggacatcagcaagaacaccctgtacctccagatgaacagcctgagagccgaggacaccgccgtgtactactgtgccaaagaaggcaccggcgctaacagcagcctggccgattatagaggccagggcacactggtcaccgtgtctagtggcggaggaagcggcggaggatctcaggtccagctcgtcgagtccggcggcggcctcgtccaggccggcgactccgtcaccctctcctgcaccgcctccggccgcaccttctcctcctacgccctcgcctggttccgccagcgccccggcaaggagcgcgagttcgtcgccggcctccgctggggcggccccaccaactacgccgactccgtcaaggaccgcttcaccatctccggcgactccgccaagcacaccatgtacctccagatgaactccctcaagcccgaggacaccgccgtctactactgcggctacaaccccggcggctgggccgtcccctcccagtacgagtacgactcctggggccagggcacccaggtcaccgtctcctccggtaccggcggaggcggatctggcggcggaggtagcggtggcggaggatctgaattcgacatccagatgacacagagccctagcagcctgtctgccagcgtgggagacagagtgaccatcacatgcaaggccagcgaccacatcaacaactggctggcctggtatcagcagaagcctggacaggcccctaagctgctgatctacggcgctaccacactggaaacaggcgtgcccagcagattttctggcagcggctctggcaccgactacaccctgacaatatccagcctccagcctgaggacttcgccacctactactgtcagcagagctggaacaccccttggacattcggccagggcaccaagctggaaatcaagagactcgaggacctgaagaacgtgttcccacctgaggtggccgtgttcgagcctagcgaggccgagatcagccacacccagaaagccaccctcgtgtgcctggctaccggcttctaccccgaccatgtggaactgtcttggtgggtcaacggcaaagaggtgcacagcggcgtgtgtaccgacccccagccactgaaagaacagcccgccctgaacgacagccggtactgcctgagcagcagactgagagtgtccgccaccttctggcagaacccccggaaccacttcagatgccaggtgcagttctacggcctgagcgagaacgacgagtggacccaggacagagccaagcccgtgacccagatcgtgtctgccgaagcctggggcagagccgattgcggctttaccagcgagagctaccagcagggcgtgctgagcgccaccatcctgtacgagatcctgctgggcaaggccaccctgtacgccgtgctggtgtctgccctggtgctgatggctatggtcaagcggaaggacagccggggaagggccaagcgatctggatctggagcaacaaacttctcactactcaaacaagcaggtgacgtggaggagaatcccgggcctactagtatggactggatttggcgcatccttttccttgtcggcgctgctaccggcgcccattccgggccccaggttcagctgcaagagtctggcggaggacttgctcaagctggcggaagcctgagactgtcttgtgccgcctctggcagaaccttcagcatgggctggtttagacaggcccctggcaaagagagagagttcgtcgccgccatcacatacagcggcggcagcccttactacgcctcttctgtcagaggccggttcaccatcagccgggacaacgccaagaacaccgtgtacctccagatgaacagcctgaagccagaggacaccgccgtgtactactgtgccgccaatccaacctacggcagcgactggaatgccgagaattggggccagggcacccaagtgacagtgtctagtggatccggcggcggaggatctggcggaggcggatctgggggcggaggctctttcgaacaagttcagcttcaacagcctggcgctgagctggtcaaacctggcgcttctgtgaagatgagctgcaaagccagcggctacgccttcagcagctactggatcaactggatgaagcagaaacccggccagggactcgaatggatcggccaaatctatcccggcgacggcgacaccaactacaacggcaagttcaagggcagagccacactgaccgccgatacctctagcagcacagcctacatgcagctgagcagcctgaccagcgaagatagcgccgtgtacttctgtgcccggtccatcacaacagtcgtgggctgcgctatggactattggggccagggaacaagcgtgaccgtgtctagtacgcgtatccagaaccctgatcctgccgtgtaccagctgcgggatagcaagagcagcgacaagagcgtgtgtctgttcaccgacttcgacagccagaccaacgtgtcccagagcaaggactccgacgtgtacatcaccgataagtgcgtgctggacatgcggagcatggacttcaagagcaactccgccgtggcctggtccaacaagtccgatttcgcctgcgccaacgccttcaacaacagcattatccccgaggacacattcttcccaagccccgagagcagctgcgacgtgaagctggtggaaaagagcttcgagacagacaccaacctgaacttccagaacctgagcgtgatcggcttcagaatcctgctgctgaaagtggccggctttaacctgctgatgaccctgcggctgtggtccagc

SEQ ID NO: 5115 - DNA, 3765 bp, Artificial Sequence
  Synthetic Polynucloetide
atggccttaccagtgaccgccttgctcctgccgctggccttgctgctccacgccgccaggccggaggttcagctgcttgagtctggcggaggactggttcaacctggcggaagcctgagactgtcttgtgccgccagcggcttcacctttagcagctacgccatgagctgggtccgacaggctcctggcaaaggactggaatgggtgtccagcatcagcggcagcggcgactacatctactacgccgatagcgtgaagggcagattcaccatcagccgggacatcagcaagaacaccctgtacctccagatgaacagcctgagagccgaggacaccgccgtgtactactgtgccaaagaaggcaccggcgctaacagcagcctggccgattatagaggccagggcacactggtcaccgtgtctagtggcggaggaagcggcggaggatctcaggtccagctcgtcgagtccggcggcggcctcgtccaggccggcgactccgtcaccctctcctgcaccgcctccggccgcaccttctcctcctacgccctcgcctggttccgccagcgccccggcaaggagcgcgagttcgtcgccggcctccgctggggcggccccaccaactacgccgactccgtcaaggaccgcttcaccatctccggcgactccgccaagcacaccatgtacctccagatgaactccctcaagcccgaggacaccgccgtctactactgcggctacaaccccggcggctgggccgtcccctcccagtacgagtacgactcctggggccagggcacccaggtcaccgtctcctccggtaccggcggaggcggatctggcggcggaggtagcggtggcggaggatctgaattcgacatccagatgacacagagccctagcagcctgtctgccagcgtgggagacagagtgaccatcacatgcaaggccagcgaccacatcaacaactggctggcctggtatcagcagaagcctggacaggcccctaagctgctgatctacggcgctaccacactggaaacaggcgtgcccagcagattttctggcagcggctctggcaccgactacaccctgacaatatccagcctccagcctgaggacttcgccacctactactgtcagcagagctggaacaccccttggacattcggccagggcaccaagctggaaatcaagagactcgaggacctgaagaacgtgttcccacctgaggtggccgtgttcgagcctagcgaggccgagatcagccacacccagaaagccaccctcgtgtgcctggctaccggcttctaccccgaccatgtggaactgtcttggtgggtcaacggcaaagaggtgcacagcggcgtgtgtaccgacccccagccactgaaagaacagcccgccctgaacgacagccggtactgcctgagcagcagactgagagtgtccgccaccttctggcagaacccccggaaccacttcagatgccaggtgcagttctacggcctgagcgagaacgacgagtggacccaggacagagccaagcccgtgacccagatcgtgtctgccgaagcctggggcagagccgattgcggctttaccagcgagagctaccagcagggcgtgctgagcgccaccatcctgtacgagatcctgctgggcaaggccaccctgtacgccgtgctggtgtctgccctggtgctgatggctatggtcaagcggaaggacagccggggaagggccaagcgatctggatctggagcaacaaacttctcactactcaaacaagcaggtgacgtggaggagaatcccgggcctactagtatggactggatttggcgcatccttttccttgtcggcgctgctaccggcgcccattccgggccccaggttcagctgcaagagtctggcggaggacttgctcaagctggcggaagcctgagactgtcttgtgccgcctctggcagaaccttcagcatgggctggtttagacaggcccctggcaaagagagagagttcgtcgccgccatcacatacagcggcggcagcccttactacgcctcttctgtcagaggccggttcaccatcagccgggacaacgccaagaacaccgtgtacctccagatgaacagcctgaagccagaggacaccgccgtgtactactgtgccgccaatccaacctacggcagcgactggaatgccgagaattggggccagggcacccaagtgacagtgtctagtggatccggcggcggaggatctggcggaggcggatctgggggcggaggctctttcgaacaagttcagcttcaacagcctggcgctgagctggtcaaacctggcgcttctgtgaagatgagctgcaaagccagcggctacgccttcagcagctactggatcaactggatgaagcagaaacccggccagggactcgaatggatcggccaaatctatcccggcgacggcgacaccaactacaacggcaagttcaagggcagagccacactgaccgccgatacctctagcagcacagcctacatgcagctgagcagcctgaccagcgaagatagcgccgtgtacttctgtgcccggtccatcacaacagtcgtgggctgcgctatggactattggggccagggaacaagcgtgaccgtgtctagtacgcgtatccagaaccctgatcctgccgtgtaccagctgcgggatagcaagagcagcgacaagagcgtgtgtctgttcaccgacttcgacagccagaccaacgtgtcccagagcaaggactccgacgtgtacatcaccgataagtgcgtgctggacatgcggagcatggacttcaagagcaactccgccgtggcctggtccaacaagtccgatttcgcctgcgccaacgccttcaacaacagcattatccccgaggacacattcttcccaagccccgagagcagctgcgacgtgaagctggtggaaaagagcttcgagacagacaccaacctgaacttccagaacctgagcgtgatcggcttcagaatcctgctgctgaaagtggccggctttaacctgctgatgaccctgcggctgtggtccagccgcgccaagagaagcggatctggcgtgaagcagaccctgaatttcgacctgctgaagctggctggcgacgtggaatccaacccaggcccttctagaggcgggatccacaccatggctacctacgaggtgctgtgcgaggtggcaagaaagctgggcaccgacgacagagaagtggtgctgttcctgctgaacgtgttcatccctcagcctacactggcccagctgatcggtgcactgagagccctgaaagaggaaggccggctgacctttcctctgctggccgaatgcctgttcagagccggaagaagggatctgctgcgggacctgctgcatctggaccccagatttctggaaagacacctggccggcaccatgagctacttcagcccttaccagctgaccgtgctgcacgttgacggcgaactgtgcgccagagatattcggagcctgatcttcctgagcaaggacaccatcggcagccggtctacccctcagacatttctgcactgggtgtactgcatggaaaacctggacctgctcggccccacagatgtggatgccctgatgtccatgctgagaagcctgagcagagtggacctccagagacaggtgcagacactgatgggactgcacctgagcggacctagccacagccagcactacagacacacccct

SEQ ID NO: 5116 - DNA, 3102 bp, Artificial Sequence
  Synthetic Polynucloetide
atggccttaccagtgaccgccttgctcctgccgctggccttgctgctccacgccgccaggccggaggttcagctgcttgagtctggcggaggactggttcaacctggcggaagcctgagactgtcttgtgccgccagcggcttcacctttagcagctacgccatgagctgggtccgacaggctcctggcaaaggactggaatgggtgtccagcatcagcggcagcggcgactacatctactacgccgatagcgtgaagggcagattcaccatcagccgggacatcagcaagaacaccctgtacctccagatgaacagcctgagagccgaggacaccgccgtgtactactgtgccaaagaaggcaccggcgctaacagcagcctggccgattatagaggccagggcacactggtcaccgtgtctagtggcggaggaagcggcggaggatctcaggtccagctcgtcgagtccggcggcggcctcgtccaggccggcgactccgtcaccctctcctgcaccgcctccggccgcaccttctcctcctacgccctcgcctggttccgccagcgccccggcaaggagcgcgagttcgtcgccggcctccgctggggcggccccaccaactacgccgactccgtcaaggaccgcttcaccatctccggcgactccgccaagcacaccatgtacctccagatgaactccctcaagcccgaggacaccgccgtctactactgcggctacaaccccggcggctgggccgtcccctcccagtacgagtacgactcctggggccagggcacccaggtcaccgtctcctccggtaccggcggaggcggatctggcggcggaggtagcggtggcggaggatctgaattcgacatccagatgacacagagccctagcagcctgtctgccagcgtgggagacagagtgaccatcacatgcaaggccagcgaccacatcaacaactggctggcctggtatcagcagaagcctggacaggcccctaagctgctgatctacggcgctaccacactggaaacaggcgtgcccagcagattttctggcagcggctctggcaccgactacaccctgacaatatccagcctccagcctgaggacttcgccacctactactgtcagcagagctggaacaccccttggacattcggccagggcaccaagctggaaatcaagagactcgagatccagaaccctgatcctgccgtgtaccagctgcgggatagcaagagcagcgacaagagcgtgtgtctgttcaccgacttcgacagccagaccaacgtgtcccagagcaaggactccgacgtgtacatcaccgataagtgcgtgctggacatgcggagcatggacttcaagagcaactccgccgtggcctggtccaacaagtccgatttcgcctgcgccaacgccttcaacaacagcattatccccgaggacacattcttcccaagccccgagagcagctgcgacgtgaagctggtggaaaagagcttcgagacagacaccaacctgaacttccagaacctgagcgtgatcggcttcagaatcctgctgctgaaagtggccggctttaacctgctgatgaccctgcggctgtggtccagccgcgccaagagaagcggatctggcgtgaagcagaccctgaatttcgacctgctgaagctggctggcgacgtggaatccaacccaggccctactagtatggactggatttggcgcatccttttccttgtcggcgctgctaccggcgcccattccgggccccaggttcagctgcaagagtctggcggaggacttgctcaagctggcggaagcctgagactgtcttgtgccgcctctggcagaaccttcagcatgggctggtttagacaggcccctggcaaagagagagagttcgtcgccgccatcacatacagcggcggcagcccttactacgcctcttctgtcagaggccggttcaccatcagccgggacaacgccaagaacaccgtgtacctccagatgaacagcctgaagccagaggacaccgccgtgtactactgtgccgccaatccaacctacggcagcgactggaatgccgagaattggggccagggcacccaagtgacagtgtctagtggatccggcggcggaggatctggcggaggcggatctgggggcggaggctctttcgaacaagttcagcttcaacagcctggcgctgagctggtcaaacctggcgcttctgtgaagatgagctgcaaagccagcggctacgccttcagcagctactggatcaactggatgaagcagaaacccggccagggactcgaatggatcggccaaatctatcccggcgacggcgacaccaactacaacggcaagttcaagggcagagccacactgaccgccgatacctctagcagcacagcctacatgcagctgagcagcctgaccagcgaagatagcgccgtgtacttctgtgcccggtccatcacaacagtcgtgggctgcgctatggactattggggccagggaacaagcgtgaccgtgtctagtacgcgtgaggacctgaagaacgtgttcccacctgaggtggccgtgttcgagcctagcgaggccgagatcagccacacccagaaagccaccctcgtgtgcctggctaccggcttctaccccgaccatgtggaactgtcttggtgggtcaacggcaaagaggtgcacagcggcgtgtgtaccgacccccagccactgaaagaacagcccgccctgaacgacagccggtactgcctgagcagcagactgagagtgtccgccaccttctggcagaacccccggaaccacttcagatgccaggtgcagttctacggcctgagcgagaacgacgagtggacccaggacagagccaagcccgtgacccagatcgtgtctgccgaagcctggggcagagccgattgcggctttaccagcgagagctaccagcagggcgtgctgagcgccaccatcctgtacgagatcctgctgggcaaggccaccctgtacgccgtgctggtgtctgccctggtgctgatggctatggtcaagcggaaggacagccgggga

SEQ ID NO: 5117 - DNA, 3768 bp, Artificial Sequence
  Synthetic Polynucloetide
atggccttaccagtgaccgccttgctcctgccgctggccttgctgctccacgccgccaggccggaggttcagctgcttgagtctggcggaggactggttcaacctggcggaagcctgagactgtcttgtgccgccagcggcttcacctttagcagctacgccatgagctgggtccgacaggctcctggcaaaggactggaatgggtgtccagcatcagcggcagcggcgactacatctactacgccgatagcgtgaagggcagattcaccatcagccgggacatcagcaagaacaccctgtacctccagatgaacagcctgagagccgaggacaccgccgtgtactactgtgccaaagaaggcaccggcgctaacagcagcctggccgattatagaggccagggcacactggtcaccgtgtctagtggcggaggaagcggcggaggatctcaggtccagctcgtcgagtccggcggcggcctcgtccaggccggcgactccgtcaccctctcctgcaccgcctccggccgcaccttctcctcctacgccctcgcctggttccgccagcgccccggcaaggagcgcgagttcgtcgccggcctccgctggggcggccccaccaactacgccgactccgtcaaggaccgcttcaccatctccggcgactccgccaagcacaccatgtacctccagatgaactccctcaagcccgaggacaccgccgtctactactgcggctacaaccccggcggctgggccgtcccctcccagtacgagtacgactcctggggccagggcacccaggtcaccgtctcctccggtaccggcggaggcggatctggcggcggaggtagcggtggcggaggatctgaattcgacatccagatgacacagagccctagcagcctgtctgccagcgtgggagacagagtgaccatcacatgcaaggccagcgaccacatcaacaactggctggcctggtatcagcagaagcctggacaggcccctaagctgctgatctacggcgctaccacactggaaacaggcgtgcccagcagattttctggcagcggctctggcaccgactacaccctgacaatatccagcctccagcctgaggacttcgccacctactactgtcagcagagctggaacaccccttggacattcggccagggcaccaagctggaaatcaagagactcgagatccagaaccctgatcctgccgtgtaccagctgcgggatagcaagagcagcgacaagagcgtgtgtctgttcaccgacttcgacagccagaccaacgtgtcccagagcaaggactccgacgtgtacatcaccgataagtgcgtgctggacatgcggagcatggacttcaagagcaactccgccgtggcctggtccaacaagtccgatttcgcctgcgccaacgccttcaacaacagcattatccccgaggacacattcttcccaagccccgagagcagctgcgacgtgaagctggtggaaaagagcttcgagacagacaccaacctgaacttccagaacctgagcgtgatcggcttcagaatcctgctgctgaaagtggccggctttaacctgctgatgaccctgcggctgtggtccagccgcgccaagagaagcggatctggcgtgaagcagaccctgaatttcgacctgctgaagctggctggcgacgtggaatccaacccaggccctactagtatggactggatttggcgcatccttttccttgtcggcgctgctaccggcgcccattccgggccccaggttcagctgcaagagtctggcggaggacttgctcaagctggcggaagcctgagactgtcttgtgccgcctctggcagaaccttcagcatgggctggtttagacaggcccctggcaaagagagagagttcgtcgccgccatcacatacagcggcggcagcccttactacgcctcttctgtcagaggccggttcaccatcagccgggacaacgccaagaacaccgtgtacctccagatgaacagcctgaagccagaggacaccgccgtgtactactgtgccgccaatccaacctacggcagcgactggaatgccgagaattggggccagggcacccaagtgacagtgtctagtggatccggcggcggaggatctggcggaggcggatctgggggcggaggctctttcgaacaagttcagcttcaacagcctggcgctgagctggtcaaacctggcgcttctgtgaagatgagctgcaaagccagcggctacgccttcagcagctactggatcaactggatgaagcagaaacccggccagggactcgaatggatcggccaaatctatcccggcgacggcgacaccaactacaacggcaagttcaagggcagagccacactgaccgccgatacctctagcagcacagcctacatgcagctgagcagcctgaccagcgaagatagcgccgtgtacttctgtgcccggtccatcacaacagtcgtgggctgcgctatggactattggggccagggaacaagcgtgaccgtgtctagtacgcgtgaggacctgaagaacgtgttcccacctgaggtggccgtgttcgagcctagcgaggccgagatcagccacacccagaaagccaccctcgtgtgcctggctaccggcttctaccccgaccatgtggaactgtcttggtgggtcaacggcaaagaggtgcacagcggcgtgtgtaccgacccccagccactgaaagaacagcccgccctgaacgacagccggtactgcctgagcagcagactgagagtgtccgccaccttctggcagaacccccggaaccacttcagatgccaggtgcagttctacggcctgagcgagaacgacgagtggacccaggacagagccaagcccgtgacccagatcgtgtctgccgaagcctggggcagagccgattgcggctttaccagcgagagctaccagcagggcgtgctgagcgccaccatcctgtacgagatcctgctgggcaaggccaccctgtacgccgtgctggtgtctgccctggtgctgatggctatggtcaagcggaaggacagccggggaagggccaagcgatctggatctggagcaacaaacttctcactactcaaacaagcaggtgacgtggaggagaatcccgggccttctagaggcgggatccacaccatggctacctacgaggtgctgtgcgaggtggcaagaaagctgggcaccgacgacagagaagtggtgctgttcctgctgaacgtgttcatccctcagcctacactggcccagctgatcggtgcactgagagccctgaaagaggaaggccggctgacctttcctctgctggccgaatgcctgttcagagccggaagaagggatctgctgcgggacctgctgcatctggaccccagatttctggaaagacacctggccggcaccatgagctacttcagcccttaccagctgaccgtgctgcacgttgacggcgaactgtgcgccagagatattcggagcctgatcttcctgagcaaggacaccatcggcagccggtctacccctcagacatttctgcactgggtgtactgcatggaaaacctggacctgctcggccccacagatgtggatgccctgatgtccatgctgagaagcctgagcagagtggacctccagagacaggtgcagacactgatgggactgcacctgagcggacctagccacagccagcactacagacacacccct

SEQ ID NO: 5118 - DNA, 3792 bp, Artificial Sequence
  Synthetic Polynucloetide
atggccttaccagtgaccgccttgctcctgccgctggccttgctgctccacgccgccaggccggaggttcagctgcttgagtctggcggaggactggttcaacctggcggaagcctgagactgtcttgtgccgccagcggcttcacctttagcagctacgccatgagctgggtccgacaggctcctggcaaaggactggaatgggtgtccagcatcagcggcagcggcgactacatctactacgccgatagcgtgaagggcagattcaccatcagccgggacatcagcaagaacaccctgtacctccagatgaacagcctgagagccgaggacaccgccgtgtactactgtgccaaagaaggcaccggcgctaacagcagcctggccgattatagaggccagggcacactggtcaccgtgtctagtggcggaggaagcggcggaggatctcaggtccagctcgtcgagtccggcggcggcctcgtccaggccggcgactccgtcaccctctcctgcaccgcctccggccgcaccttctcctcctacgccctcgcctggttccgccagcgccccggcaaggagcgcgagttcgtcgccggcctccgctggggcggccccaccaactacgccgactccgtcaaggaccgcttcaccatctccggcgactccgccaagcacaccatgtacctccagatgaactccctcaagcccgaggacaccgccgtctactactgcggctacaaccccggcggctgggccgtcccctcccagtacgagtacgactcctggggccagggcacccaggtcaccgtctcctccggtaccggcggaggcggatctggcggcggaggtagcggtggcggaggatctgaattcgacatccagatgacacagagccctagcagcctgtctgccagcgtgggagacagagtgaccatcacatgcaaggccagcgaccacatcaacaactggctggcctggtatcagcagaagcctggacaggcccctaagctgctgatctacggcgctaccacactggaaacaggcgtgcccagcagattttctggcagcggctctggcaccgactacaccctgacaatatccagcctccagcctgaggacttcgccacctactactgtcagcagagctggaacaccccttggacattcggccagggcaccaagctggaaatcaagagactcgaggacctgaagaacgtgttcccacctgaggtggccgtgttcgagcctagcgaggccgagatcagccacacccagaaagccaccctcgtgtgcctggctaccggcttctaccccgaccatgtggaactgtcttggtgggtcaacggcaaagaggtgcacagcggcgtgtctaccgacccccagccactgaaagaacagcccgccctgaacgacagccggtactgcctgagcagcagactgagagtgtccgccaccttctggcagaacccccggaaccacttcagatgccaggtgcagttctacggcctgagcgagaacgacgagtggacccaggacagagccaagcccgtgacccagatcgtgtctgccgaagcctggggcagagccgattgcggctttaccagcgagagctaccagcagggcgtgctgagcgccaccatcctgtacgagatcctgctgggcaaggccaccctgtacgccgtgctggtgtctgccctggtgctgatggctatggtcaagcggaaggacagccggggaagggccaagcgatctggatctggagcaacaaacttctcactactcaaacaagcaggtgacgtggaggagaatcccgggcctactagtatggactggatttggcgcatccttttccttgtcggcgctgctaccggcgcccattccgggccccaggttcagctgcaagagtctggcggaggacttgctcaagctggcggaagcctgagactgtcttgtgccgcctctggcagaaccttcagcatgggctggtttagacaggcccctggcaaagagagagagttcgtcgccgccatcacatacagcggcggcagcccttactacgcctcttctgtcagaggccggttcaccatcagccgggacaacgccaagaacaccgtgtacctccagatgaacagcctgaagccagaggacaccgccgtgtactactgtgccgccaatccaacctacggcagcgactggaatgccgagaattggggccagggcacccaagtgacagtgtctagtggatccggcggcggaggatctggcggaggcggatctgggggcggaggctctttcgaacaagttcagcttcaacagcctggcgctgagctggtcaaacctggcgcttctgtgaagatgagctgcaaagccagcggctacgccttcagcagctactggatcaactggatgaagcagaaacccggccagggactcgaatggatcggccaaatctatcccggcgacggcgacaccaactacaacggcaagttcaagggcagagccacactgaccgccgatacctctagcagcacagcctacatgcagctgagcagcctgaccagcgaagatagcgccgtgtacttctgtgcccggtccatcacaacagtcgtgggctgcgctatggactattggggccagggaacaagcgtgaccgtgtctagtacgcgtatccagaaccctgatcctgccgtgtaccagctgcgggatagcaagagcagcgacaagagcgtgtgtctgttcaccgacttcgacagccagaccaacgtgtcccagagcaaggactccgacgtgtacatcaccgataagaccgtgctggacatgcggagcatggacttcaagagcaactccgccgtggcctggtccaacaagtccgatttcgcctgcgccaacgccttcaacaacagcattatccccgaggacacattcttcccaagccccgagagcagctgcgacgtgaagctggtggaaaagagcttcgagacagacaccaacctgaacttccagaacctgagcgtgatcggcttcagaatcctgctgctgaaagtggccggctttaacctgctgatgaccctgcggctgtggtccagccgcgccaagagaagcggatctggcgtgaagcagaccctgaatttcgacctgctgaagctggctggcgacgtggaatccaacccaggcccttctagaggccatatgaccgagtacaagcccacggtgcgcctcgccacccgcgacgacgtccccagggccgtacgcaccctcgccgccgcgttcgccgactaccccgccacgcgccacaccgtcgatccggaccgccacatcgagcgggtcaccgagctgcaagaactcttcctcacgcgcgtcgggctcgacatcggcaaggtgtgggtcgcggacgacggcgccgcggtggcggtctggaccacgccggagagcgtcgaagcgggggcggtgttcgccgagatcggcccgcgcatggccgagttgagcggttcccggctggccgcgcagcaacagatggaaggcctcctggcgccgcaccggcccaaggagcccgcgtggttcctggccaccgtcggcgtctcgcccgaccaccagggcaagggtctgggcagcgccgtcgtgctccccggagtggaggcggccgagcgcgccggggtgcccgccttcctggagacctccgcgccccgcaacctccccttctacgagcggctcggcttcaccgtcaccgccgacgtcgaggtgcccgaaggaccgcgcacctggtgcatgacccgcaagcccggtgcctga

SEQ ID NO: 5119 - DNA, 4038 bp, Artificial Sequence
  Synthetic Polynucloetide
atggccttaccagtgaccgccttgctcctgccgctggccttgctgctccacgccgccaggccggaggttcagctgcttgagtctggcggaggactggttcaacctggcggaagcctgagactgtcttgtgccgccagcggcttcacctttagcagctacgccatgagctgggtccgacaggctcctggcaaaggactggaatgggtgtccagcatcagcggcagcggcgactacatctactacgccgatagcgtgaagggcagattcaccatcagccgggacatcagcaagaacaccctgtacctccagatgaacagcctgagagccgaggacaccgccgtgtactactgtgccaaagaaggcaccggcgctaacagcagcctggccgattatagaggccagggcacactggtcaccgtgtctagtggcggaggaagcggcggaggatctcaggtccagctcgtcgagtccggcggcggcctcgtccaggccggcgactccgtcaccctctcctgcaccgcctccggccgcaccttctcctcctacgccctcgcctggttccgccagcgccccggcaaggagcgcgagttcgtcgccggcctccgctggggcggccccaccaactacgccgactccgtcaaggaccgcttcaccatctccggcgactccgccaagcacaccatgtacctccagatgaactccctcaagcccgaggacaccgccgtctactactgcggctacaaccccggcggctgggccgtcccctcccagtacgagtacgactcctggggccagggcacccaggtcaccgtctcctccggtaccggcggaggcggatctggcggcggaggtagcggtggcggaggatctgaattcgacatccagatgacacagagccctagcagcctgtctgccagcgtgggagacagagtgaccatcacatgcaaggccagcgaccacatcaacaactggctggcctggtatcagcagaagcctggacaggcccctaagctgctgatctacggcgctaccacactggaaacaggcgtgcccagcagattttctggcagcggctctggcaccgactacaccctgacaatatccagcctccagcctgaggacttcgccacctactactgtcagcagagctggaacaccccttggacattcggccagggcaccaagctggaaatcaagagactcgaggacctgaagaacgtgttcccacctgaggtggccgtgttcgagcctagcgaggccgagatcagccacacccagaaagccaccctcgtgtgcctggctaccggcttctaccccgaccatgtggaactgtcttggtgggtcaacggcaaagaggtgcacagcggcgtgtctaccgacccccagccactgaaagaacagcccgccctgaacgacagccggtactgcctgagcagcagactgagagtgtccgccaccttctggcagaacccccggaaccacttcagatgccaggtgcagttctacggcctgagcgagaacgacgagtggacccaggacagagccaagcccgtgacccagatcgtgtctgccgaagcctggggcagagccgattgcggctttaccagcgagagctaccagcagggcgtgctgagcgccaccatcctgtacgagatcctgctgggcaaggccaccctgtacgccgtgctggtgtctgccctggtgctgatggctatggtcaagcggaaggacagccggggaagggccaagcgatctggatctggagcaacaaacttctcactactcaaacaagcaggtgacgtggaggagaatcccgggcctactagtatggactggatttggcgcatccttttccttgtcggcgctgctaccggcgcccattccgggccccaggttcagctgcaagagtctggcggaggacttgctcaagctggcggaagcctgagactgtcttgtgccgcctctggcagaaccttcagcatgggctggtttagacaggcccctggcaaagagagagagttcgtcgccgccatcacatacagcggcggcagcccttactacgcctcttctgtcagaggccggttcaccatcagccgggacaacgccaagaacaccgtgtacctccagatgaacagcctgaagccagaggacaccgccgtgtactactgtgccgccaatccaacctacggcagcgactggaatgccgagaattggggccagggcacccaagtgacagtgtctagtggatccggcggcggaggatctggcggaggcggatctgggggcggaggctctttcgaacaagttcagcttcaacagcctggcgctgagctggtcaaacctggcgcttctgtgaagatgagctgcaaagccagcggctacgccttcagcagctactggatcaactggatgaagcagaaacccggccagggactcgaatggatcggccaaatctatcccggcgacggcgacaccaactacaacggcaagttcaagggcagagccacactgaccgccgatacctctagcagcacagcctacatgcagctgagcagcctgaccagcgaagatagcgccgtgtacttctgtgcccggtccatcacaacagtcgtgggctgcgctatggactattggggccagggaacaagcgtgaccgtgtctagtacgcgtgagcagaaactgatctcggaagaggatgggagcggcaccccattcccttctctggcccctcccatcatgctgctggtggacggcaagcagcagatggtggtcgtgtgcctggtgctggatgtggccccacctggactggacagccccatctggtttagcgccggcaatggctctgccctggacgcctttacctacggcccaagccctgccaccgatggcacctggacaaatctggcccacctgagcctgcccagcgaggaactggcttcttgggagcctctcgtgtgccacacaggacctggcgctgagggacacagcagatccacccagcctatgcacctgtctggcgaggccagcaccgccagaacctgtcctcaggaacctctgagaggcacccctggcggagcactgtggctgggagtgctgagactgctgctgttcaagctgctgctgtttgacctgctgctgacctgctcctgtctgtgcgatcctgccggccctctgccttctcctgccaccaccacaagactgagagccctgggcagccacagactgcaccctgccacagagacaggcggcagagaggccacaagcagccctagaccccagcccagagacagaagatggggcgataccccccctggcagaaagcctggatctccagtccgcgccaagagaagcggatctggcgtgaagcagaccctgaatttcgacctgctgaagctggctggcgacgtggaatccaacccaggcccttctagaggccatatgaccgagtacaagcccacggtgcgcctcgccacccgcgacgacgtccccagggccgtacgcaccctcgccgccgcgttcgccgactaccccgccacgcgccacaccgtcgatccggaccgccacatcgagcgggtcaccgagctgcaagaactcttcctcacgcgcgtcgggctcgacatcggcaaggtgtgggtcgcggacgacggcgccgcggtggcggtctggaccacgccggagagcgtcgaagcgggggcggtgttcgccgagatcggcccgcgcatggccgagttgagcggttcccggctggccgcgcagcaacagatggaaggcctcctggcgccgcaccggcccaaggagcccgcgtggttcctggccaccgtcggcgtctcgcccgaccaccagggcaagggtctgggcagcgccgtcgtgctccccggagtggaggcggccgagcgcgccggggtgcccgccttcctggagacctccgcgccccgcaacctccccttctacgagcggctcggcttcaccgtcaccgccgacgtcgaggtgcccgaaggaccgcgcacctggtgcatgacccgcaagcccggtgcctga

SEQ ID NO: 5120 - DNA, 3903 bp, Artificial Sequence
  Synthetic Polynucloetide
atggccttaccagtgaccgccttgctcctgccgctggccttgctgctccacgccgccaggccggaggttcagctgcttgagtctggcggaggactggttcaacctggcggaagcctgagactgtcttgtgccgccagcggcttcacctttagcagctacgccatgagctgggtccgacaggctcctggcaaaggactggaatgggtgtccagcatcagcggcagcggcgactacatctactacgccgatagcgtgaagggcagattcaccatcagccgggacatcagcaagaacaccctgtacctccagatgaacagcctgagagccgaggacaccgccgtgtactactgtgccaaagaaggcaccggcgctaacagcagcctggccgattatagaggccagggcacactggtcaccgtgtctagtggcggaggaagcggcggaggatctcaggtccagctcgtcgagtccggcggcggcctcgtccaggccggcgactccgtcaccctctcctgcaccgcctccggccgcaccttctcctcctacgccctcgcctggttccgccagcgccccggcaaggagcgcgagttcgtcgccggcctccgctggggcggccccaccaactacgccgactccgtcaaggaccgcttcaccatctccggcgactccgccaagcacaccatgtacctccagatgaactccctcaagcccgaggacaccgccgtctactactgcggctacaaccccggcggctgggccgtcccctcccagtacgagtacgactcctggggccagggcacccaggtcaccgtctcctccggtaccggcggaggcggatctggcggcggaggtagcggtggcggaggatctgaattcgacatccagatgacacagagccctagcagcctgtctgccagcgtgggagacagagtgaccatcacatgcaaggccagcgaccacatcaacaactggctggcctggtatcagcagaagcctggacaggcccctaagctgctgatctacggcgctaccacactggaaacaggcgtgcccagcagattttctggcagcggctctggcaccgactacaccctgacaatatccagcctccagcctgaggacttcgccacctactactgtcagcagagctggaacaccccttggacattcggccagggcaccaagctggaaatcaagagactcgaggggaaaccaattcccaaccctcttctgggactggattcaaccggcagcggcgacaagcagctggacgccgacgtgtcccccaagcctaccatcttcctgccctctatcgccgagacaaagctccagaaggccggcacctacctgtgcctgctggaaaagttcttcccagatgtgattaagatccactggcaggaaaagaagtccaacaccatcctgggcagccaggaaggcaacaccatgaagaccaacgacacctacatgaagttcagctggctgaccgtgcccgagaagtccctggacaaagaacacagatgcatcgtgcggcacgaaaacaacaagaacggcgtggaccaggaaatcatcttcccacccatcaagaccgatgtgattacaatggaccccaaggacaactgctccaaggacgccaacgataccctgctgctccagctgaccaacaccagcgcctactacatgtacttgttgctgctgctgaagtccgtggtgtacttcgccatcatcacatgctgcctgctgcggagaaccgccttctgctgcaacggcgagaagtctagggccaagcgatctggatctggagcaacaaacttctcactactcaaacaagcaggtgacgtggaggagaatcccgggcctactagtatggactggatttggcgcatccttttccttgtcggcgctgctaccggcgcccattccgggccccaggttcagctgcaagagtctggcggaggacttgctcaagctggcggaagcctgagactgtcttgtgccgcctctggcagaaccttcagcatgggctggtttagacaggcccctggcaaagagagagagttcgtcgccgccatcacatacagcggcggcagcccttactacgcctcttctgtcagaggccggttcaccatcagccgggacaacgccaagaacaccgtgtacctccagatgaacagcctgaagccagaggacaccgccgtgtactactgtgccgccaatccaacctacggcagcgactggaatgccgagaattggggccagggcacccaagtgacagtgtctagtggatccggcggcggaggatctggcggaggcggatctgggggcggaggctctttcgaacaagttcagcttcaacagcctggcgctgagctggtcaaacctggcgcttctgtgaagatgagctgcaaagccagcggctacgccttcagcagctactggatcaactggatgaagcagaaacccggccagggactcgaatggatcggccaaatctatcccggcgacggcgacaccaactacaacggcaagttcaagggcagagccacactgaccgccgatacctctagcagcacagcctacatgcagctgagcagcctgaccagcgaagatagcgccgtgtacttctgtgcccggtccatcacaacagtcgtgggctgcgctatggactattggggccagggaacaagcgtgaccgtgtctagtacgcgtgagcagaaactgatctcggaagaggatgggagcggcagccagcctcacaccaagcccagcgtgttcgtgatgaagaacggcaccaacgtggcctgcctcgtgaaagagttctaccccaaggacatcaggatcaacctggtgtccagcaagaagatcaccgagttcgaccccgccatcgtgatctcccccagcggcaagtacaacgccgtgaagctggggaagtacgaggacagcaacagcgtgacctgctccgtgcagcacgacaacaagaccgtgcacagcaccgactttgaagtgaaaaccgactccaccgaccacgtgaagcccaaagagacagagaacaccaagcagcccagcaagagctgccacaagcccaaggccatcgtgcacaccgagaaagtgaacatgatgagcctgaccgtgctgggcctgcggatgctgttcgccaaaaccgtggccgtgaacttcctgctgaccgccaagctgttcttcctccgcgccaagagaagcggatctggcgtgaagcagaccctgaatttcgacctgctgaagctggctggcgacgtggaatccaacccaggcccttctagaggccatatgaccgagtacaagcccacggtgcgcctcgccacccgcgacgacgtccccagggccgtacgcaccctcgccgccgcgttcgccgactaccccgccacgcgccacaccgtcgatccggaccgccacatcgagcgggtcaccgagctgcaagaactcttcctcacgcgcgtcgggctcgacatcggcaaggtgtgggtcgcggacgacggcgccgcggtggcggtctggaccacgccggagagcgtcgaagcgggggcggtgttcgccgagatcggcccgcgcatggccgagttgagcggttcccggctggccgcgcagcaacagatggaaggcctcctggcgccgcaccggcccaaggagcccgcgtggttcctggccaccgtcggcgtctcgcccgaccaccagggcaagggtctgggcagcgccgtcgtgctccccggagtggaggcggccgagcgcgccggggtgcccgccttcctggagacctccgcgccccgcaacctccccttctacgagcggctcggcttcaccgtcaccgccgacgtcgaggtgcccgaaggaccgcgcacctggtgcatgacccgcaagcccggtgcctga

SEQ ID NO: 5121 - DNA, 3114 bp, Artificial Sequence
  Synthetic Polynucloetide
atggccttaccagtgaccgccttgctcctgccgctggccttgctgctccacgccgccaggccggaggttcagctgcttgagtctggcggaggactggttcaacctggcggaagcctgagactgtcttgtgccgccagcggcttcacctttagcagctacgccatgagctgggtccgacaggctcctggcaaaggactggaatgggtgtccagcatcagcggcagcggcgactacatctactacgccgatagcgtgaagggcagattcaccatcagccgggacatcagcaagaacaccctgtacctccagatgaacagcctgagagccgaggacaccgccgtgtactactgtgccaaagaaggcaccggcgctaacagcagcctggccgattatagaggccagggcacactggtcaccgtgtctagtggcggaggaagcggcggaggatctcaggtccagctcgtcgagtccggcggcggcctcgtccaggccggcgactccgtcaccctctcctgcaccgcctccggccgcaccttctcctcctacgccctcgcctggttccgccagcgccccggcaaggagcgcgagttcgtcgccggcctccgctggggcggccccaccaactacgccgactccgtcaaggaccgcttcaccatctccggcgactccgccaagcacaccatgtacctccagatgaactccctcaagcccgaggacaccgccgtctactactgcggctacaaccccggcggctgggccgtcccctcccagtacgagtacgactcctggggccagggcacccaggtcaccgtctcctccggtaccggcggaggcggatctggcggcggaggtagcggtggcggaggatctgaattcgacatccagatgacacagagccctagcagcctgtctgccagcgtgggagacagagtgaccatcacatgcaaggccagcgaccacatcaacaactggctggcctggtatcagcagaagcctggacaggcccctaagctgctgatctacggcgctaccacactggaaacaggcgtgcccagcagattttctggcagcggctctggcaccgactacaccctgacaatatccagcctccagcctgaggacttcgccacctactactgtcagcagagctggaacaccccttggacattcggccagggcaccaagctggaaatcaagagactcgagagccagcctcacaccaagcccagcgtgttcgtgatgaagaacggcaccaacgtggcctgcctcgtgaaagagttctaccccaaggacatcaggatcaacctggtgtccagcaagaagatcaccgagttcgaccccgccatcgtgatctcccccagcggcaagtacaacgccgtgaagctggggaagtacgaggacagcaacagcgtgacctgctccgtgcagcacgacaacaagaccgtgcacagcaccgactttgaagtgaaaaccgactccaccgaccacgtgaagcccaaagagacagagaacaccaagcagcccagcaagagctgccacaagcccaaggccatcgtgcacaccgagaaagtgaacatgatgagcctgaccgtgctgggcctgcggatgctgttcgccaaaaccgtggccgtgaacttcctgctgaccgccaagctgttcttcctcagggccaagcgatctggatctggagcaacaaacttctcactactcaaacaagcaggtgacgtggaggagaatcccgggcctactagtatggactggatttggcgcatccttttccttgtcggcgctgctaccggcgcccattccgggccccaggttcagctgcaagagtctggcggaggacttgctcaagctggcggaagcctgagactgtcttgtgccgcctctggcagaaccttcagcatgggctggtttagacaggcccctggcaaagagagagagttcgtcgccgccatcacatacagcggcggcagcccttactacgcctcttctgtcagaggccggttcaccatcagccgggacaacgccaagaacaccgtgtacctccagatgaacagcctgaagccagaggacaccgccgtgtactactgtgccgccaatccaacctacggcagcgactggaatgccgagaattggggccagggcacccaagtgacagtgtctagtggatccggcggcggaggatctggcggaggcggatctgggggcggaggctctttcgaacaagttcagcttcaacagcctggcgctgagctggtcaaacctggcgcttctgtgaagatgagctgcaaagccagcggctacgccttcagcagctactggatcaactggatgaagcagaaacccggccagggactcgaatggatcggccaaatctatcccggcgacggcgacaccaactacaacggcaagttcaagggcagagccacactgaccgccgatacctctagcagcacagcctacatgcagctgagcagcctgaccagcgaagatagcgccgtgtacttctgtgcccggtccatcacaacagtcgtgggctgcgctatggactattggggccagggaacaagcgtgaccgtgtctagtacgcgtgacaagcagctggacgccgacgtgtcccccaagcctaccatcttcctgccctctatcgccgagacaaagctccagaaggccggcacctacctgtgcctgctggaaaagttcttcccagatgtgattaagatccactggcaggaaaagaagtccaacaccatcctgggcagccaggaaggcaacaccatgaagaccaacgacacctacatgaagttcagctggctgaccgtgcccgagaagtccctggacaaagaacacagatgcatcgtgcggcacgaaaacaacaagaacggcgtggaccaggaaatcatcttcccacccatcaagaccgatgtgattacaatggaccccaaggacaactgctccaaggacgccaacgataccctgctgctccagctgaccaacaccagcgcctactacatgtacttgttgctgctgctgaagtccgtggtgtacttcgccatcatcacatgctgcctgctgcggagaaccgccttctgctgcaacggcgagaagtct

SEQ ID NO: 5122 - DNA, 4323 bp, Artificial Sequence
  Synthetic Polynucloetide
atggccttaccagtgaccgccttgctcctgccgctggccttgctgctccacgccgccaggccggaggttcagctgcttgagtctggcggaggactggttcaacctggcggaagcctgagactgtcttgtgccgccagcggcttcacctttagcagctacgccatgagctgggtccgacaggctcctggcaaaggactggaatgggtgtccagcatcagcggcagcggcgactacatctactacgccgatagcgtgaagggcagattcaccatcagccgggacatcagcaagaacaccctgtacctccagatgaacagcctgagagccgaggacaccgccgtgtactactgtgccaaagaaggcaccggcgctaacagcagcctggccgattatagaggccagggcacactggtcaccgtgtctagtggcggaggaagcggcggaggatctcaggtccagctcgtcgagtccggcggcggcctcgtccaggccggcgactccgtcaccctctcctgcaccgcctccggccgcaccttctcctcctacgccctcgcctggttccgccagcgccccggcaaggagcgcgagttcgtcgccggcctccgctggggcggccccaccaactacgccgactccgtcaaggaccgcttcaccatctccggcgactccgccaagcacaccatgtacctccagatgaactccctcaagcccgaggacaccgccgtctactactgcggctacaaccccggcggctgggccgtcccctcccagtacgagtacgactcctggggccagggcacccaggtcaccgtctcctccggtaccggcggaggcggatctggcggcggaggtagcggtggcggaggatctgaattcgacatccagatgacacagagccctagcagcctgtctgccagcgtgggagacagagtgaccatcacatgcaaggccagcgaccacatcaacaactggctggcctggtatcagcagaagcctggacaggcccctaagctgctgatctacggcgctaccacactggaaacaggcgtgcccagcagattttctggcagcggctctggcaccgactacaccctgacaatatccagcctccagcctgaggacttcgccacctactactgtcagcagagctggaacaccccttggacattcggccagggcaccaagctggaaatcaagagaggacagcctaaggccaatcctaccgtgacactgttccctccaagcagcgaagaactccaggccaacaaggccacacttgtgtgcctgatctccgacttctaccctggggctgtgacagtggcttggaaggccgatggatctcctgtgaaagccggcgtggaaaccaccaagccatccaagcagagcaacaacaaatacgccgccagctcctacctgagcctgacacctgagcagtggaagtcccacagatcctacagctgccaagtgacccacgaaggcagcaccgtggaaaagacagtggcccctacagagtgcagcggatcccagagcttcggcctgctggaccccaagctgtgctacctgctggatggcatcctgttcatctacggcgtgatcctgaccgccctgttcctgagagtgaagttcagcagaagcgccgacgcccctgcctaccagcagggacagaaccaactgtacaacgagctgaacctgggcagacgggaagagtacgacgtgctggacaagcggagaggcagggaccctgagatgggcggaaagccccagcggagaaagaacccccaggaaggactgtataacgaactccagaaagacaagatggccgaagcctacagcgagatcggcatgaagggcgagcggagaagaggcaagggccacgatggcctgtaccagggcctgagcaccgccaccaaggacacctatgacgccctgcacatgcaggccctgcctccaagaagggccaagcgatctggatctggagcaacaaacttctcactactcaaacaagcaggtgacgtggaggagaatcccgggcctactagtatggactggatttggcgcatccttttccttgtcggcgctgctaccggcgcccattccgggccccaggttcagctgcaagagtctggcggaggacttgctcaagctggcggaagcctgagactgtcttgtgccgcctctggcagaaccttcagcatgggctggtttagacaggcccctggcaaagagagagagttcgtcgccgccatcacatacagcggcggcagcccttactacgcctcttctgtcagaggccggttcaccatcagccgggacaacgccaagaacaccgtgtacctccagatgaacagcctgaagccagaggacaccgccgtgtactactgtgccgccaatccaacctacggcagcgactggaatgccgagaattggggccagggcacccaagtgacagtgtctagtggatccggcggcggaggatctggcggaggcggatctgggggcggaggctctttcgaacaagttcagcttcaacagcctggcgctgagctggtcaaacctggcgcttctgtgaagatgagctgcaaagccagcggctacgccttcagcagctactggatcaactggatgaagcagaaacccggccagggactcgaatggatcggccaaatctatcccggcgacggcgacaccaactacaacggcaagttcaagggcagagccacactgaccgccgatacctctagcagcacagcctacatgcagctgagcagcctgaccagcgaagatagcgccgtgtacttctgtgcccggtccatcacaacagtcgtgggctgcgctatggactattggggccagggaacaagcgtgaccgtgtctagtgcctctacaaagggaccctccgtgtttcctctggctcccagcagcaagtctacaagcggaggaacagccgctctgggctgcctggtcaaggattactttcccgagcctgtgaccgtgtcctggaatagcggagcactgacaagcggcgtgcacacctttccagccgtgctgcaaagcagcggcctgtactctctgagcagcgtggtcacagtgcctagctctagcctgggcacccagacctacatctgcaatgtgaaccacaagcctagcaacaccaaggtggacaagagagtggaacccaagagctgtggtacccagagttttgggttgttggaccctaaattgtgctatctgttggacggaatcctgttcatttacggagtgatcctgaccgcattgttcctgcgggttaagttttccagatccgcagacgcacccgcttaccaacaagggcagaaccaactctacaatgaacttaatttggggcggagggaagagtacgacgttctggacaaaaggaggggacgagatcccgagatgggcggaaagcctcagcgaaggaagaatccgcaagaggggctttataacgaactccagaaagataaaatggcagaagcctatagtgagattgggatgaagggagaaaggaggaggggtaaaggtcacgatgggttgtaccaaggattgagcacagccactaaagatacctatgatgcgctccacatgcaggccctgccgccaagacgcgccaagagaagcggatctggcgtgaagcagaccctgaatttcgacctgctgaagctggctggcgacgtggaatccaacccaggcccttctagaggccatatgaccgagtacaagcccacggtgcgcctcgccacccgcgacgacgtccccagggccgtacgcaccctcgccgccgcgttcgccgactaccccgccacgcgccacaccgtcgatccggaccgccacatcgagcgggtcaccgagctgcaagaactcttcctcacgcgcgtcgggctcgacatcggcaaggtgtgggtcgcggacgacggcgccgcggtggcggtctggaccacgccggagagcgtcgaagcgggggcggtgttcgccgagatcggcccgcgcatggccgagttgagcggttcccggctggccgcgcagcaacagatggaaggcctcctggcgccgcaccggcccaaggagcccgcgtggttcctggccaccgtcggcgtctcgcccgaccaccagggcaagggtctgggcagcgccgtcgtgctccccggagtggaggcggccgagcgcgccggggtgcccgccttcctggagacctccgcgccccgcaacctccccttctacgagcggctcggcttcaccgtcaccgccgacgtcgaggtgcccgaaggaccgcgcacctggtgcatgacccgcaagcccggtgcctga

SEQ ID NO: 5123 - DNA, 3678 bp, Artificial Sequence
  Synthetic Polynucloetide
atggccttaccagtgaccgccttgctcctgccgctggccttgctgctccacgccgccaggccggaggttcagctgcttgagtctggcggaggactggttcaacctggcggaagcctgagactgtcttgtgccgccagcggcttcacctttagcagctacgccatgagctgggtccgacaggctcctggcaaaggactggaatgggtgtccagcatcagcggcagcggcgactacatctactacgccgatagcgtgaagggcagattcaccatcagccgggacatcagcaagaacaccctgtacctccagatgaacagcctgagagccgaggacaccgccgtgtactactgtgccaaagaaggcaccggcgctaacagcagcctggccgattatagaggccagggcacactggtcaccgtgtctagtggcggaggaagcggcggaggatctcaggtccagctcgtcgagtccggcggcggcctcgtccaggccggcgactccgtcaccctctcctgcaccgcctccggccgcaccttctcctcctacgccctcgcctggttccgccagcgccccggcaaggagcgcgagttcgtcgccggcctccgctggggcggccccaccaactacgccgactccgtcaaggaccgcttcaccatctccggcgactccgccaagcacaccatgtacctccagatgaactccctcaagcccgaggacaccgccgtctactactgcggctacaaccccggcggctgggccgtcccctcccagtacgagtacgactcctggggccagggcacccaggtcaccgtctcctccggtaccggcggaggcggatctggcggcggaggtagcggtggcggaggatctgaattcgacatccagatgacacagagccctagcagcctgtctgccagcgtgggagacagagtgaccatcacatgcaaggccagcgaccacatcaacaactggctggcctggtatcagcagaagcctggacaggcccctaagctgctgatctacggcgctaccacactggaaacaggcgtgcccagcagattttctggcagcggctctggcaccgactacaccctgacaatatccagcctccagcctgaggacttcgccacctactactgtcagcagagctggaacaccccttggacattcggccagggcaccaagctggaaatcaagagactcgaggacctgaagaacgtgttcccacctgaggtggccgtgttcgagcctagcgaggccgagatcagccacacccagaaagccaccctcgtgtgcctggctaccggcttctaccccgaccatgtggaactgtcttggtgggtcaacggcaaagaggtgcacagcggcgtgtctaccgacccccagccactgaaagaacagcccgccctgaacgacagccggtactgcctgagcagcagactgagagtgtccgccaccttctggcagaacccccggaaccacttcagatgccaggtgcagttctacggcctgagcgagaacgacgagtggacccaggacagagccaagcccgtgacccagatcgtgtctgccgaagcctggggcagagccgattgcggatcccagagcttcggcctgctggaccccaagctgtgctacctgctggatggcatcctgttcatctacggcgtgatcctgaccgccctgttcctgagagtgaagttcagcagaagcgccgacgcccctgcctaccagcagggacagaaccaactgtacaacgagctgaacctgggcagacgggaagagtacgacgtgctggacaagcggagaggcagggaccctgagatgggcggaaagccccagcggagaaagaacccccaggaaggactgtataacgaactccagaaagacaagatggccgaagcctacagcgagatcggcatgaagggcgagcggagaagaggcaagggccacgatggcctgtaccagggcctgagcaccgccaccaaggacacctatgacgccctgcacatgcaggccctgcctccaagaagggccaagcgatctggatctggagcaacaaacttctcactactcaaacaagcaggtgacgtggaggagaatcccgggcctactagtatggactggatttggcgcatccttttccttgtcggcgctgctaccggcgcccattccgggccccaggttcagctgcaagagtctggcggaggacttgctcaagctggcggaagcctgagactgtcttgtgccgcctctggcagaaccttcagcatgggctggtttagacaggcccctggcaaagagagagagttcgtcgccgccatcacatacagcggcggcagcccttactacgcctcttctgtcagaggccggttcaccatcagccgggacaacgccaagaacaccgtgtacctccagatgaacagcctgaagccagaggacaccgccgtgtactactgtgccgccaatccaacctacggcagcgactggaatgccgagaattggggccagggcacccaagtgacagtgtctagtggatccggcggcggaggatctggcggaggcggatctgggggcggaggctctttcgaacaagttcagcttcaacagcctggcgctgagctggtcaaacctggcgcttctgtgaagatgagctgcaaagccagcggctacgccttcagcagctactggatcaactggatgaagcagaaacccggccagggactcgaatggatcggccaaatctatcccggcgacggcgacaccaactacaacggcaagttcaagggcagagccacactgaccgccgatacctctagcagcacagcctacatgcagctgagcagcctgaccagcgaagatagcgccgtgtacttctgtgcccggtccatcacaacagtcgtgggctgcgctatggactattggggccagggaacaagcgtgaccgtgtctagtacgcgtatccagaaccctgatcctgccgtgtaccagctgcgggatagcaagagcagcgacaagagcgtgtgtctgttcaccgacttcgacagccagaccaacgtgtcccagagcaaggactccgacgtgtacatcaccgataagaccgtgctggacatgcggagcatggacttcaagagcaactccgccgtggcctggtccaacaagtccgatttcgcctgcgccaacgccttcaacaacagcattatccccgaggacacattcttcccaagccccgagagcagctgcggtacccagagttttgggttgttggaccctaaattgtgctatctgttggacggaatcctgttcatttacggagtgatcctgaccgcattgttcctgcgggttaagttttccagatccgcagacgcacccgcttaccaacaagggcagaaccaactctacaatgaacttaatttggggcggagggaagagtacgacgttctggacaaaaggaggggacgagatcccgagatgggcggaaagcctcagcgaaggaagaatccgcaagaggggctttataacgaactccagaaagataaaatggcagaagcctatagtgagattgggatgaagggagaaaggaggaggggtaaaggtcacgatgggttgtaccaaggattgagcacagccactaaagatacctatgatgcgctccacatgcaggccctgccgccaaga

SEQ ID NO: 5124 - DNA, 3678 bp, Artificial Sequence
  Synthetic Polynucloetide
atggccttaccagtgaccgccttgctcctgccgctggccttgctgctccacgccgccaggccggaggttcagctgcttgagtctggcggaggactggttcaacctggcggaagcctgagactgtcttgtgccgccagcggcttcacctttagcagctacgccatgagctgggtccgacaggctcctggcaaaggactggaatgggtgtccagcatcagcggcagcggcgactacatctactacgccgatagcgtgaagggcagattcaccatcagccgggacatcagcaagaacaccctgtacctccagatgaacagcctgagagccgaggacaccgccgtgtactactgtgccaaagaaggcaccggcgctaacagcagcctggccgattatagaggccagggcacactggtcaccgtgtctagtggcggaggaagcggcggaggatctcaggtccagctcgtcgagtccggcggcggcctcgtccaggccggcgactccgtcaccctctcctgcaccgcctccggccgcaccttctcctcctacgccctcgcctggttccgccagcgccccggcaaggagcgcgagttcgtcgccggcctccgctggggcggccccaccaactacgccgactccgtcaaggaccgcttcaccatctccggcgactccgccaagcacaccatgtacctccagatgaactccctcaagcccgaggacaccgccgtctactactgcggctacaaccccggcggctgggccgtcccctcccagtacgagtacgactcctggggccagggcacccaggtcaccgtctcctccggtaccggcggaggcggatctggcggcggaggtagcggtggcggaggatctgaattcgacatccagatgacacagagccctagcagcctgtctgccagcgtgggagacagagtgaccatcacatgcaaggccagcgaccacatcaacaactggctggcctggtatcagcagaagcctggacaggcccctaagctgctgatctacggcgctaccacactggaaacaggcgtgcccagcagattttctggcagcggctctggcaccgactacaccctgacaatatccagcctccagcctgaggacttcgccacctactactgtcagcagagctggaacaccccttggacattcggccagggcaccaagctggaaatcaagagactcgaggacctgaagaacgtgttcccacctgaggtggccgtgttcgagcctagcaaggccgagatcgcccacacccagaaagccaccctcgtgtgcctggctaccggcttctaccccgaccatgtggaactgtcttggtgggtcaacggcaaagaggtgcacagcggcgtgtgtaccgacccccagccactgaaagaacagcccgccctgaacgacagccggtactgcctgagcagcagactgagagtgtccgccaccttctggcagaacccccggaaccacttcagatgccaggtgcagttctacggcctgagcgagaacgacgagtggacccaggacagagccaagcccgtgacccagatcgtgtctgccgaagcctggggcagagccgattgcggatcccagagcttcggcctgctggaccccaagctgtgctacctgctggatggcatcctgttcatctacggcgtgatcctgaccgccctgttcctgagagtgaagttcagcagaagcgccgacgcccctgcctaccagcagggacagaaccaactgtacaacgagctgaacctgggcagacgggaagagtacgacgtgctggacaagcggagaggcagggaccctgagatgggcggaaagccccagcggagaaagaacccccaggaaggactgtataacgaactccagaaagacaagatggccgaagcctacagcgagatcggcatgaagggcgagcggagaagaggcaagggccacgatggcctgtaccagggcctgagcaccgccaccaaggacacctatgacgccctgcacatgcaggccctgcctccaagaagggccaagcgatctggatctggagcaacaaacttctcactactcaaacaagcaggtgacgtggaggagaatcccgggcctactagtatggactggatttggcgcatccttttccttgtcggcgctgctaccggcgcccattccgggccccaggttcagctgcaagagtctggcggaggacttgctcaagctggcggaagcctgagactgtcttgtgccgcctctggcagaaccttcagcatgggctggtttagacaggcccctggcaaagagagagagttcgtcgccgccatcacatacagcggcggcagcccttactacgcctcttctgtcagaggccggttcaccatcagccgggacaacgccaagaacaccgtgtacctccagatgaacagcctgaagccagaggacaccgccgtgtactactgtgccgccaatccaacctacggcagcgactggaatgccgagaattggggccagggcacccaagtgacagtgtctagtggatccggcggcggaggatctggcggaggcggatctgggggcggaggctctttcgaacaagttcagcttcaacagcctggcgctgagctggtcaaacctggcgcttctgtgaagatgagctgcaaagccagcggctacgccttcagcagctactggatcaactggatgaagcagaaacccggccagggactcgaatggatcggccaaatctatcccggcgacggcgacaccaactacaacggcaagttcaagggcagagccacactgaccgccgatacctctagcagcacagcctacatgcagctgagcagcctgaccagcgaagatagcgccgtgtacttctgtgcccggtccatcacaacagtcgtgggctgcgctatggactattggggccagggaacaagcgtgaccgtgtctagtacgcgtatccagaaccctgatcctgccgtgtaccagctgcgggatagcaagagcagcgacaagagcgtgtgtctgttcaccgacttcgacagccagaccaacgtgtcccagagcaaggactccgacgtgtacatcaccgataagtgcgtgctggacatgcggagcatggacttcaagagcaactccgccgtggcctggtccaacaagtccgatttcgcctgcgccaacgccttcaacaacagcattatccccgaggacacattcttcccaagcagcgacgtgccctgcggtacccagagttttgggttgttggaccctaaattgtgctatctgttggacggaatcctgttcatttacggagtgatcctgaccgcattgttcctgcgggttaagttttccagatccgcagacgcacccgcttaccaacaagggcagaaccaactctacaatgaacttaatttggggcggagggaagagtacgacgttctggacaaaaggaggggacgagatcccgagatgggcggaaagcctcagcgaaggaagaatccgcaagaggggctttataacgaactccagaaagataaaatggcagaagcctatagtgagattgggatgaagggagaaaggaggaggggtaaaggtcacgatgggttgtaccaaggattgagcacagccactaaagatacctatgatgcgctccacatgcaggccctgccgccaaga

SEQ ID NO: 5125 - DNA, 3891 bp, Artificial Sequence
  Synthetic Polynucloetide
atggccttaccagtgaccgccttgctcctgccgctggccttgctgctccacgccgccaggccggaggttcagctgcttgagtctggcggaggactggttcaacctggcggaagcctgagactgtcttgtgccgccagcggcttcacctttagcagctacgccatgagctgggtccgacaggctcctggcaaaggactggaatgggtgtccagcatcagcggcagcggcgactacatctactacgccgatagcgtgaagggcagattcaccatcagccgggacatcagcaagaacaccctgtacctccagatgaacagcctgagagccgaggacaccgccgtgtactactgtgccaaagaaggcaccggcgctaacagcagcctggccgattatagaggccagggcacactggtcaccgtgtctagtggcggaggaagcggcggaggatctcaggtccagctcgtcgagtccggcggcggcctcgtccaggccggcgactccgtcaccctctcctgcaccgcctccggccgcaccttctcctcctacgccctcgcctggttccgccagcgccccggcaaggagcgcgagttcgtcgccggcctccgctggggcggccccaccaactacgccgactccgtcaaggaccgcttcaccatctccggcgactccgccaagcacaccatgtacctccagatgaactccctcaagcccgaggacaccgccgtctactactgcggctacaaccccggcggctgggccgtcccctcccagtacgagtacgactcctggggccagggcacccaggtcaccgtctcctccggtaccggcggaggcggatctggcggcggaggtagcggtggcggaggatctgaattcgacatccagatgacacagagccctagcagcctgtctgccagcgtgggagacagagtgaccatcacatgcaaggccagcgaccacatcaacaactggctggcctggtatcagcagaagcctggacaggcccctaagctgctgatctacggcgctaccacactggaaacaggcgtgcccagcagattttctggcagcggctctggcaccgactacaccctgacaatatccagcctccagcctgaggacttcgccacctactactgtcagcagagctggaacaccccttggacattcggccagggcaccaagctggaaatcaagagactcgaggggaaaccaattcccaaccctcttctgggactggattcaaccggcagcggcgaggacctgaagaacgtgttcccacctgaggtggccgtgttcgagcctagcgaggccgagatcagccacacccagaaagccaccctcgtgtgcctggctaccggcttctaccccgaccatgtggaactgtcttggtgggtcaacggcaaagaggtgcacagcggcgtgtctaccgacccccagccactgaaagaacagcccgccctgaacgacagccggtactgcctgagcagcagactgagagtgtccgccaccttctggcagaacccccggaaccacttcagatgccaggtgcagttctacggcctgagcgagaacgacgagtggacccaggacagagccaagcccgtgacccagatcgtgtctgccgaagcctggggcagagccgattgcggatcccagagcttcggcctgctggaccccaagctgtgctacctgctggatggcatcctgttcatctacggcgtgatcctgaccgccctgttcctgagagtgaagttcagcagaagcgccgacgcccctgcctaccagcagggacagaaccaactgtacaacgagctgaacctgggcagacgggaagagtacgacgtgctggacaagcggagaggcagggaccctgagatgggcggaaagccccagcggagaaagaacccccaggaaggactgtataacgaactccagaaagacaagatggccgaagcctacagcgagatcggcatgaagggcgagcggagaagaggcaagggccacgatggcctgtaccagggcctgagcaccgccaccaaggacacctatgacgccctgcacatgcaggccctgcctccaagaagggccaagcgatctggatctggagcaacaaacttctcactactcaaacaagcaggtgacgtggaggagaatcccgggcctactagtatggactggatttggcgcatccttttccttgtcggcgctgctaccggcgcccattccgggccccaggttcagctgcaagagtctggcggaggacttgctcaagctggcggaagcctgagactgtcttgtgccgcctctggcagaaccttcagcatgggctggtttagacaggcccctggcaaagagagagagttcgtcgccgccatcacatacagcggcggcagcccttactacgcctcttctgtcagaggccggttcaccatcagccgggacaacgccaagaacaccgtgtacctccagatgaacagcctgaagccagaggacaccgccgtgtactactgtgccgccaatccaacctacggcagcgactggaatgccgagaattggggccagggcacccaagtgacagtgtctagtggatccggcggcggaggatctggcggaggcggatctgggggcggaggctctttcgaacaagttcagcttcaacagcctggcgctgagctggtcaaacctggcgcttctgtgaagatgagctgcaaagccagcggctacgccttcagcagctactggatcaactggatgaagcagaaacccggccagggactcgaatggatcggccaaatctatcccggcgacggcgacaccaactacaacggcaagttcaagggcagagccacactgaccgccgatacctctagcagcacagcctacatgcagctgagcagcctgaccagcgaagatagcgccgtgtacttctgtgcccggtccatcacaacagtcgtgggctgcgctatggactattggggccagggaacaagcgtgaccgtgtctagtacgcgtgagcagaaactgatctcggaagaggatgggagcggcatccagaaccctgatcctgccgtgtaccagctgcgggatagcaagagcagcgacaagagcgtgtgtctgttcaccgacttcgacagccagaccaacgtgtcccagagcaaggactccgacgtgtacatcaccgataagaccgtgctggacatgcggagcatggacttcaagagcaactccgccgtggcctggtccaacaagtccgatttcgcctgcgccaacgccttcaacaacagcattatccccgaggacacattcttcccaagccccgagagcagctgcggtacccagagttttgggttgttggaccctaaattgtgctatctgttggacggaatcctgttcatttacggagtgatcctgaccgcattgttcctgaggagcaagcggtcacggctgctccacagcgattacatgaatatgacaccacgaagaccgggtcctactcgcaaacactaccaaccctacgcacctccccgcgactttgcagcgtaccgatctcgggttaagttttccagatccgcagacgcacccgcttaccaacaagggcagaaccaactctacaatgaacttaatttggggcggagggaagagtacgacgttctggacaaaaggaggggacgagatcccgagatgggcggaaagcctcagcgaaggaagaatccgcaagaggggctttataacgaactccagaaagataaaatggcagaagcctatagtgagattgggatgaagggagaaaggaggaggggtaaaggtcacgatgggttgtaccaaggattgagcacagccactaaagatacctatgatgcgctccacatgcaggccctgccgccaaga

SEQ ID NO: 5126 - DNA, 4014 bp, Artificial Sequence
  Synthetic Polynucloetide
atggccttaccagtgaccgccttgctcctgccgctggccttgctgctccacgccgccaggccggaggttcagctgcttgagtctggcggaggactggttcaacctggcggaagcctgagactgtcttgtgccgccagcggcttcacctttagcagctacgccatgagctgggtccgacaggctcctggcaaaggactggaatgggtgtccagcatcagcggcagcggcgactacatctactacgccgatagcgtgaagggcagattcaccatcagccgggacatcagcaagaacaccctgtacctccagatgaacagcctgagagccgaggacaccgccgtgtactactgtgccaaagaaggcaccggcgctaacagcagcctggccgattatagaggccagggcacactggtcaccgtgtctagtggcggaggaagcggcggaggatctcaggtccagctcgtcgagtccggcggcggcctcgtccaggccggcgactccgtcaccctctcctgcaccgcctccggccgcaccttctcctcctacgccctcgcctggttccgccagcgccccggcaaggagcgcgagttcgtcgccggcctccgctggggcggccccaccaactacgccgactccgtcaaggaccgcttcaccatctccggcgactccgccaagcacaccatgtacctccagatgaactccctcaagcccgaggacaccgccgtctactactgcggctacaaccccggcggctgggccgtcccctcccagtacgagtacgactcctggggccagggcacccaggtcaccgtctcctccggtaccggcggaggcggatctggcggcggaggtagcggtggcggaggatctgaattcgacatccagatgacacagagccctagcagcctgtctgccagcgtgggagacagagtgaccatcacatgcaaggccagcgaccacatcaacaactggctggcctggtatcagcagaagcctggacaggcccctaagctgctgatctacggcgctaccacactggaaacaggcgtgcccagcagattttctggcagcggctctggcaccgactacaccctgacaatatccagcctccagcctgaggacttcgccacctactactgtcagcagagctggaacaccccttggacattcggccagggcaccaagctggaaatcaagagactcgaggggaaaccaattcccaaccctcttctgggactggattcaaccggcagcggcgaggacctgaagaacgtgttcccacctgaggtggccgtgttcgagcctagcgaggccgagatcagccacacccagaaagccaccctcgtgtgcctggctaccggcttctaccccgaccatgtggaactgtcttggtgggtcaacggcaaagaggtgcacagcggcgtgtctaccgacccccagccactgaaagaacagcccgccctgaacgacagccggtactgcctgagcagcagactgagagtgtccgccaccttctggcagaacccccggaaccacttcagatgccaggtgcagttctacggcctgagcgagaacgacgagtggacccaggacagagccaagcccgtgacccagatcgtgtctgccgaagcctggggcagagccgattgcggatcccagagcttcggcctgctggaccccaagctgtgctacctgctggatggcatcctgttcatctacggcgtgatcctgaccgccctgttcctgaggagtaagaggagcaggctcctgcacagtgactacatgaacatgactccacgccgccccggacccacccgcaagcattaccagccctatgccccaccacgcgacttcgcagcctatcgctccagagtgaagttcagcagaagcgccgacgcccctgcctaccagcagggacagaaccaactgtacaacgagctgaacctgggcagacgggaagagtacgacgtgctggacaagcggagaggcagggaccctgagatgggcggaaagccccagcggagaaagaacccccaggaaggactgtataacgaactccagaaagacaagatggccgaagcctacagcgagatcggcatgaagggcgagcggagaagaggcaagggccacgatggcctgtaccagggcctgagcaccgccaccaaggacacctatgacgccctgcacatgcaggccctgcctccaagaagggccaagcgatctggatctggagcaacaaacttctcactactcaaacaagcaggtgacgtggaggagaatcccgggcctactagtatggactggatttggcgcatccttttccttgtcggcgctgctaccggcgcccattccgggccccaggttcagctgcaagagtctggcggaggacttgctcaagctggcggaagcctgagactgtcttgtgccgcctctggcagaaccttcagcatgggctggtttagacaggcccctggcaaagagagagagttcgtcgccgccatcacatacagcggcggcagcccttactacgcctcttctgtcagaggccggttcaccatcagccgggacaacgccaagaacaccgtgtacctccagatgaacagcctgaagccagaggacaccgccgtgtactactgtgccgccaatccaacctacggcagcgactggaatgccgagaattggggccagggcacccaagtgacagtgtctagtggatccggcggcggaggatctggcggaggcggatctgggggcggaggctctttcgaacaagttcagcttcaacagcctggcgctgagctggtcaaacctggcgcttctgtgaagatgagctgcaaagccagcggctacgccttcagcagctactggatcaactggatgaagcagaaacccggccagggactcgaatggatcggccaaatctatcccggcgacggcgacaccaactacaacggcaagttcaagggcagagccacactgaccgccgatacctctagcagcacagcctacatgcagctgagcagcctgaccagcgaagatagcgccgtgtacttctgtgcccggtccatcacaacagtcgtgggctgcgctatggactattggggccagggaacaagcgtgaccgtgtctagtacgcgtgagcagaaactgatctcggaagaggatgggagcggcatccagaaccctgatcctgccgtgtaccagctgcgggatagcaagagcagcgacaagagcgtgtgtctgttcaccgacttcgacagccagaccaacgtgtcccagagcaaggactccgacgtgtacatcaccgataagaccgtgctggacatgcggagcatggacttcaagagcaactccgccgtggcctggtccaacaagtccgatttcgcctgcgccaacgccttcaacaacagcattatccccgaggacacattcttcccaagccccgagagcagctgcggtacccagagttttgggttgttggaccctaaattgtgctatctgttggacggaatcctgttcatttacggagtgatcctgaccgcattgttcctgaggagcaagcggtcacggctgctccacagcgattacatgaatatgacaccacgaagaccgggtcctactcgcaaacactaccaaccctacgcacctccccgcgactttgcagcgtaccgatctcgggttaagttttccagatccgcagacgcacccgcttaccaacaagggcagaaccaactctacaatgaacttaatttggggcggagggaagagtacgacgttctggacaaaaggaggggacgagatcccgagatgggcggaaagcctcagcgaaggaagaatccgcaagaggggctttataacgaactccagaaagataaaatggcagaagcctatagtgagattgggatgaagggagaaaggaggaggggtaaaggtcacgatgggttgtaccaaggattgagcacagccactaaagatacctatgatgcgctccacatgcaggccctgccgccaaga

SEQ ID NO: 5127 - DNA, 3897 bp, Artificial Sequence
  Synthetic Polynucloetide
atggccttaccagtgaccgccttgctcctgccgctggccttgctgctccacgccgccaggccggaggttcagctgcttgagtctggcggaggactggttcaacctggcggaagcctgagactgtcttgtgccgccagcggcttcacctttagcagctacgccatgagctgggtccgacaggctcctggcaaaggactggaatgggtgtccagcatcagcggcagcggcgactacatctactacgccgatagcgtgaagggcagattcaccatcagccgggacatcagcaagaacaccctgtacctccagatgaacagcctgagagccgaggacaccgccgtgtactactgtgccaaagaaggcaccggcgctaacagcagcctggccgattatagaggccagggcacactggtcaccgtgtctagtggcggaggaagcggcggaggatctcaggtccagctcgtcgagtccggcggcggcctcgtccaggccggcgactccgtcaccctctcctgcaccgcctccggccgcaccttctcctcctacgccctcgcctggttccgccagcgccccggcaaggagcgcgagttcgtcgccggcctccgctggggcggccccaccaactacgccgactccgtcaaggaccgcttcaccatctccggcgactccgccaagcacaccatgtacctccagatgaactccctcaagcccgaggacaccgccgtctactactgcggctacaaccccggcggctgggccgtcccctcccagtacgagtacgactcctggggccagggcacccaggtcaccgtctcctccggtaccggcggaggcggatctggcggcggaggtagcggtggcggaggatctgaattcgacatccagatgacacagagccctagcagcctgtctgccagcgtgggagacagagtgaccatcacatgcaaggccagcgaccacatcaacaactggctggcctggtatcagcagaagcctggacaggcccctaagctgctgatctacggcgctaccacactggaaacaggcgtgcccagcagattttctggcagcggctctggcaccgactacaccctgacaatatccagcctccagcctgaggacttcgccacctactactgtcagcagagctggaacaccccttggacattcggccagggcaccaagctggaaatcaagagactcgaggggaaaccaattcccaaccctcttctgggactggattcaaccggcagcggcgaggacctgaagaacgtgttcccacctgaggtggccgtgttcgagcctagcgaggccgagatcagccacacccagaaagccaccctcgtgtgcctggctaccggcttctaccccgaccatgtggaactgtcttggtgggtcaacggcaaagaggtgcacagcggcgtgtctaccgacccccagccactgaaagaacagcccgccctgaacgacagccggtactgcctgagcagcagactgagagtgtccgccaccttctggcagaacccccggaaccacttcagatgccaggtgcagttctacggcctgagcgagaacgacgagtggacccaggacagagccaagcccgtgacccagatcgtgtctgccgaagcctggggcagagccgattgcggatcccagagcttcggcctgctggaccccaagctgtgctacctgctggatggcatcctgttcatctacggcgtgatcctgaccgccctgttcctgagagtgaagttcagcagaagcgccgacgcccctgcctaccagcagggacagaaccaactgtacaacgagctgaacctgggcagacgggaagagtacgacgtgctggacaagcggagaggcagggaccctgagatgggcggaaagccccagcggagaaagaacccccaggaaggactgtataacgaactccagaaagacaagatggccgaagcctacagcgagatcggcatgaagggcgagcggagaagaggcaagggccacgatggcctgtaccagggcctgagcaccgccaccaaggacacctatgacgccctgcacatgcaggccctgcctccaagaagggccaagcgatctggatctggagcaacaaacttctcactactcaaacaagcaggtgacgtggaggagaatcccgggcctactagtatggactggatttggcgcatccttttccttgtcggcgctgctaccggcgcccattccgggccccaggttcagctgcaagagtctggcggaggacttgctcaagctggcggaagcctgagactgtcttgtgccgcctctggcagaaccttcagcatgggctggtttagacaggcccctggcaaagagagagagttcgtcgccgccatcacatacagcggcggcagcccttactacgcctcttctgtcagaggccggttcaccatcagccgggacaacgccaagaacaccgtgtacctccagatgaacagcctgaagccagaggacaccgccgtgtactactgtgccgccaatccaacctacggcagcgactggaatgccgagaattggggccagggcacccaagtgacagtgtctagtggatccggcggcggaggatctggcggaggcggatctgggggcggaggctctttcgaacaagttcagcttcaacagcctggcgctgagctggtcaaacctggcgcttctgtgaagatgagctgcaaagccagcggctacgccttcagcagctactggatcaactggatgaagcagaaacccggccagggactcgaatggatcggccaaatctatcccggcgacggcgacaccaactacaacggcaagttcaagggcagagccacactgaccgccgatacctctagcagcacagcctacatgcagctgagcagcctgaccagcgaagatagcgccgtgtacttctgtgcccggtccatcacaacagtcgtgggctgcgctatggactattggggccagggaacaagcgtgaccgtgtctagtacgcgtgagcagaaactgatctcggaagaggatctggggagcggcatccagaaccctgatcctgccgtgtaccagctgcgggatagcaagagcagcgacaagagcgtgtgtctgttcaccgacttcgacagccagaccaacgtgtcccagagcaaggactccgacgtgtacatcaccgataagaccgtgctggacatgcggagcatggacttcaagagcaactccgccgtggcctggtccaacaagtccgatttcgcctgcgccaacgccttcaacaacagcattatccccgaggacacattcttcccaagccccgagagcagctgcggtacccagagttttgggttgttggaccctaaattgtgctatctgttggacggaatcctgttcatttacggagtgatcctgaccgcattgttcctgaagagaggccggaagaagctgctgtacatcttcaagcagcctttcatgcggcccgtgcagaccacccaggaagaggacggctgctcctgccggttccccgaggaagaagaaggcggctgcgagctgcgggttaagttttccagatccgcagacgcacccgcttaccaacaagggcagaaccaactctacaatgaacttaatttggggcggagggaagagtacgacgttctggacaaaaggaggggacgagatcccgagatgggcggaaagcctcagcgaaggaagaatccgcaagaggggctttataacgaactccagaaagataaaatggcagaagcctatagtgagattgggatgaagggagaaaggaggaggggtaaaggtcacgatgggttgtaccaaggattgagcacagccactaaagatacctatgatgcgctccacatgcaggccctgccgccaaga

SEQ ID NO: 5128 - DNA, 4023 bp, Artificial Sequence
  Synthetic Polynucloetide
atggccttaccagtgaccgccttgctcctgccgctggccttgctgctccacgccgccaggccggaggttcagctgcttgagtctggcggaggactggttcaacctggcggaagcctgagactgtcttgtgccgccagcggcttcacctttagcagctacgccatgagctgggtccgacaggctcctggcaaaggactggaatgggtgtccagcatcagcggcagcggcgactacatctactacgccgatagcgtgaagggcagattcaccatcagccgggacatcagcaagaacaccctgtacctccagatgaacagcctgagagccgaggacaccgccgtgtactactgtgccaaagaaggcaccggcgctaacagcagcctggccgattatagaggccagggcacactggtcaccgtgtctagtggcggaggaagcggcggaggatctcaggtccagctcgtcgagtccggcggcggcctcgtccaggccggcgactccgtcaccctctcctgcaccgcctccggccgcaccttctcctcctacgccctcgcctggttccgccagcgccccggcaaggagcgcgagttcgtcgccggcctccgctggggcggccccaccaactacgccgactccgtcaaggaccgcttcaccatctccggcgactccgccaagcacaccatgtacctccagatgaactccctcaagcccgaggacaccgccgtctactactgcggctacaaccccggcggctgggccgtcccctcccagtacgagtacgactcctggggccagggcacccaggtcaccgtctcctccggtaccggcggaggcggatctggcggcggaggtagcggtggcggaggatctgaattcgacatccagatgacacagagccctagcagcctgtctgccagcgtgggagacagagtgaccatcacatgcaaggccagcgaccacatcaacaactggctggcctggtatcagcagaagcctggacaggcccctaagctgctgatctacggcgctaccacactggaaacaggcgtgcccagcagattttctggcagcggctctggcaccgactacaccctgacaatatccagcctccagcctgaggacttcgccacctactactgtcagcagagctggaacaccccttggacattcggccagggcaccaagctggaaatcaagagactcgaggggaaaccaattcccaaccctcttctgggactggattcaaccggcagcggcgaggacctgaagaacgtgttcccacctgaggtggccgtgttcgagcctagcgaggccgagatcagccacacccagaaagccaccctcgtgtgcctggctaccggcttctaccccgaccatgtggaactgtcttggtgggtcaacggcaaagaggtgcacagcggcgtgtctaccgacccccagccactgaaagaacagcccgccctgaacgacagccggtactgcctgagcagcagactgagagtgtccgccaccttctggcagaacccccggaaccacttcagatgccaggtgcagttctacggcctgagcgagaacgacgagtggacccaggacagagccaagcccgtgacccagatcgtgtctgccgaagcctggggcagagccgattgcggatcccagagcttcggcctgctggaccccaagctgtgctacctgctggatggcatcctgttcatctacggcgtgatcctgaccgccctgttcctgaaacggggcagaaagaaactcctgtatatattcaaacaaccatttatgagaccagtacaaactactcaagaggaagatggctgtagctgccgatttccagaagaagaagaaggaggatgtgaactgagagtgaagttcagcagaagcgccgacgcccctgcctaccagcagggacagaaccaactgtacaacgagctgaacctgggcagacgggaagagtacgacgtgctggacaagcggagaggcagggaccctgagatgggcggaaagccccagcggagaaagaacccccaggaaggactgtataacgaactccagaaagacaagatggccgaagcctacagcgagatcggcatgaagggcgagcggagaagaggcaagggccacgatggcctgtaccagggcctgagcaccgccaccaaggacacctatgacgccctgcacatgcaggccctgcctccaagaagggccaagcgatctggatctggagcaacaaacttctcactactcaaacaagcaggtgacgtggaggagaatcccgggcctactagtatggactggatttggcgcatccttttccttgtcggcgctgctaccggcgcccattccgggccccaggttcagctgcaagagtctggcggaggacttgctcaagctggcggaagcctgagactgtcttgtgccgcctctggcagaaccttcagcatgggctggtttagacaggcccctggcaaagagagagagttcgtcgccgccatcacatacagcggcggcagcccttactacgcctcttctgtcagaggccggttcaccatcagccgggacaacgccaagaacaccgtgtacctccagatgaacagcctgaagccagaggacaccgccgtgtactactgtgccgccaatccaacctacggcagcgactggaatgccgagaattggggccagggcacccaagtgacagtgtctagtggatccggcggcggaggatctggcggaggcggatctgggggcggaggctctttcgaacaagttcagcttcaacagcctggcgctgagctggtcaaacctggcgcttctgtgaagatgagctgcaaagccagcggctacgccttcagcagctactggatcaactggatgaagcagaaacccggccagggactcgaatggatcggccaaatctatcccggcgacggcgacaccaactacaacggcaagttcaagggcagagccacactgaccgccgatacctctagcagcacagcctacatgcagctgagcagcctgaccagcgaagatagcgccgtgtacttctgtgcccggtccatcacaacagtcgtgggctgcgctatggactattggggccagggaacaagcgtgaccgtgtctagtacgcgtgagcagaaactgatctcggaagaggatctggggagcggcatccagaaccctgatcctgccgtgtaccagctgcgggatagcaagagcagcgacaagagcgtgtgtctgttcaccgacttcgacagccagaccaacgtgtcccagagcaaggactccgacgtgtacatcaccgataagaccgtgctggacatgcggagcatggacttcaagagcaactccgccgtggcctggtccaacaagtccgatttcgcctgcgccaacgccttcaacaacagcattatccccgaggacacattcttcccaagccccgagagcagctgcggtacccagagttttgggttgttggaccctaaattgtgctatctgttggacggaatcctgttcatttacggagtgatcctgaccgcattgttcctgaagagaggccggaagaagctgctgtacatcttcaagcagcctttcatgcggcccgtgcagaccacccaggaagaggacggctgctcctgccggttccccgaggaagaagaaggcggctgcgagctgcgggttaagttttccagatccgcagacgcacccgcttaccaacaagggcagaaccaactctacaatgaacttaatttggggcggagggaagagtacgacgttctggacaaaaggaggggacgagatcccgagatgggcggaaagcctcagcgaaggaagaatccgcaagaggggctttataacgaactccagaaagataaaatggcagaagcctatagtgagattgggatgaagggagaaaggaggaggggtaaaggtcacgatgggttgtaccaaggattgagcacagccactaaagatacctatgatgcgctccacatgcaggccctgccgccaaga

SEQ ID NO: 5129 - DNA, 3696 bp, Artificial Sequence
  Synthetic Polynucloetide
atggccttaccagtgaccgccttgctcctgccgctggccttgctgctccacgccgccaggccggaggttcagctgcttgagtctggcggaggactggttcaacctggcggaagcctgagactgtcttgtgccgccagcggcttcacctttagcagctacgccatgagctgggtccgacaggctcctggcaaaggactggaatgggtgtccagcatcagcggcagcggcgactacatctactacgccgatagcgtgaagggcagattcaccatcagccgggacatcagcaagaacaccctgtacctccagatgaacagcctgagagccgaggacaccgccgtgtactactgtgccaaagaaggcaccggcgctaacagcagcctggccgattatagaggccagggcacactggtcaccgtgtctagtggcggaggaagcggcggaggatctcaggtccagctcgtcgagtccggcggcggcctcgtccaggccggcgactccgtcaccctctcctgcaccgcctccggccgcaccttctcctcctacgccctcgcctggttccgccagcgccccggcaaggagcgcgagttcgtcgccggcctccgctggggcggccccaccaactacgccgactccgtcaaggaccgcttcaccatctccggcgactccgccaagcacaccatgtacctccagatgaactccctcaagcccgaggacaccgccgtctactactgcggctacaaccccggcggctgggccgtcccctcccagtacgagtacgactcctggggccagggcacccaggtcaccgtctcctccggtaccggcggaggcggatctggcggcggaggtagcggtggcggaggatctgaattcgacatccagatgacacagagccctagcagcctgtctgccagcgtgggagacagagtgaccatcacatgcaaggccagcgaccacatcaacaactggctggcctggtatcagcagaagcctggacaggcccctaagctgctgatctacggcgctaccacactggaaacaggcgtgcccagcagattttctggcagcggctctggcaccgactacaccctgacaatatccagcctccagcctgaggacttcgccacctactactgtcagcagagctggaacaccccttggacattcggccagggcaccaagctggaaatcaagagactcgagcagagcttcggcctgctggaccccaagctgtgctacctgctggatggcatcctgttcatctacggcgtgatcctgaccgccctgttcctgagagtgaagttcagcagaagcgccgacgcccctgcctaccagcagggacagaaccaactgtacaacgagctgaacctgggcagacgggaagagtacgacgtgctggacaagcggagaggcagggaccctgagatgggcggaaagccccagcggagaaagaacccccaggaaggactgtataacgaactccagaaagacaagatggccgaagcctacagcgagatcggcatgaagggcgagcggagaagaggcaagggccacgatggcctgtaccagggcctgagcaccgccaccaaggacacctatgacgccctgcacatgcaggccctgcctccaagaagggccaagcgatctggatctggagcaacaaacttctcactactcaaacaagcaggtgacgtggaggagaatcccgggcctactagtatggactggatttggcgcatccttttccttgtcggcgctgctaccggcgcccattccgggccccaggttcagctgcaagagtctggcggaggacttgctcaagctggcggaagcctgagactgtcttgtgccgcctctggcagaaccttcagcatgggctggtttagacaggcccctggcaaagagagagagttcgtcgccgccatcacatacagcggcggcagcccttactacgcctcttctgtcagaggccggttcaccatcagccgggacaacgccaagaacaccgtgtacctccagatgaacagcctgaagccagaggacaccgccgtgtactactgtgccgccaatccaacctacggcagcgactggaatgccgagaattggggccagggcacccaagtgacagtgtctagtggatccggcggcggaggatctggcggaggcggatctgggggcggaggctctttcgaacaagttcagcttcaacagcctggcgctgagctggtcaaacctggcgcttctgtgaagatgagctgcaaagccagcggctacgccttcagcagctactggatcaactggatgaagcagaaacccggccagggactcgaatggatcggccaaatctatcccggcgacggcgacaccaactacaacggcaagttcaagggcagagccacactgaccgccgatacctctagcagcacagcctacatgcagctgagcagcctgaccagcgaagatagcgccgtgtacttctgtgcccggtccatcacaacagtcgtgggctgcgctatggactattggggccagggaacaagcgtgaccgtgtctagtacgcgtcagagttttgggttgttggaccctaaattgtgctatctgttggacggaatcctgttcatttacggagtgatcctgaccgcattgttcctgcgggttaagttttccagatccgcagacgcacccgcttaccaacaagggcagaaccaactctacaatgaacttaatttggggcggagggaagagtacgacgttctggacaaaaggaggggacgagatcccgagatgggcggaaagcctcagcgaaggaagaatccgcaagaggggctttataacgaactccagaaagataaaatggcagaagcctatagtgagattgggatgaagggagaaaggaggaggggtaaaggtcacgatgggttgtaccaaggattgagcacagccactaaagatacctatgatgcgctccacatgcaggccctgccgccaagacgcgccaagagaagcggatctggcgtgaagcagaccctgaatttcgacctgctgaagctggctggcgacgtggaatccaacccaggcccttctagaggccatatgaccgagtacaagcccacggtgcgcctcgccacccgcgacgacgtccccagggccgtacgcaccctcgccgccgcgttcgccgactaccccgccacgcgccacaccgtcgatccggaccgccacatcgagcgggtcaccgagctgcaagaactcttcctcacgcgcgtcgggctcgacatcggcaaggtgtgggtcgcggacgacggcgccgcggtggcggtctggaccacgccggagagcgtcgaagcgggggcggtgttcgccgagatcggcccgcgcatggccgagttgagcggttcccggctggccgcgcagcaacagatggaaggcctcctggcgccgcaccggcccaaggagcccgcgtggttcctggccaccgtcggcgtctcgcccgaccaccagggcaagggtctgggcagcgccgtcgtgctccccggagtggaggcggccgagcgcgccggggtgcccgccttcctggagacctccgcgccccgcaacctccccttctacgagcggctcggcttcaccgtcaccgccgacgtcgaggtgcccgaaggaccgcgcacctggtgcatgacccgcaagcccggtgcctga

SEQ ID NO: 5130 - DNA, 3168 bp, Artificial Sequence
  Synthetic Polynucloetide
atggccttaccagtgaccgccttgctcctgccgctggccttgctgctccacgccgccaggccggaggttcagctgcttgagtctggcggaggactggttcaacctggcggaagcctgagactgtcttgtgccgccagcggcttcacctttagcagctacgccatgagctgggtccgacaggctcctggcaaaggactggaatgggtgtccagcatcagcggcagcggcgactacatctactacgccgatagcgtgaagggcagattcaccatcagccgggacatcagcaagaacaccctgtacctccagatgaacagcctgagagccgaggacaccgccgtgtactactgtgccaaagaaggcaccggcgctaacagcagcctggccgattatagaggccagggcacactggtcaccgtgtctagtggcggaggaagcggcggaggatctcaggtccagctcgtcgagtccggcggcggcctcgtccaggccggcgactccgtcaccctctcctgcaccgcctccggccgcaccttctcctcctacgccctcgcctggttccgccagcgccccggcaaggagcgcgagttcgtcgccggcctccgctggggcggccccaccaactacgccgactccgtcaaggaccgcttcaccatctccggcgactccgccaagcacaccatgtacctccagatgaactccctcaagcccgaggacaccgccgtctactactgcggctacaaccccggcggctgggccgtcccctcccagtacgagtacgactcctggggccagggcacccaggtcaccgtctcctccggtaccggcggaggcggatctggcggcggaggtagcggtggcggaggatctgaattcgacatccagatgacacagagccctagcagcctgtctgccagcgtgggagacagagtgaccatcacatgcaaggccagcgaccacatcaacaactggctggcctggtatcagcagaagcctggacaggcccctaagctgctgatctacggcgctaccacactggaaacaggcgtgcccagcagattttctggcagcggctctggcaccgactacaccctgacaatatccagcctccagcctgaggacttcgccacctactactgtcagcagagctggaacaccccttggacattcggccagggcaccaagctggaaatcaagagactcgagggacagcctaaggccaatcctaccgtgacactgttccctccaagcagcgaagaactccaggccaacaaggccacacttgtgtgcctgatctccgacttctaccctggggctgtgacagtggcttggaaggccgatggatctcctgtgaaagccggcgtggaaaccaccaagccatccaagcagagcaacaacaaatacgccgccagctcctacctgagcctgacacctgagcagtggaagtcccacagatcctacagctgccaagtgacccacgaaggcagcaccgtggaaaagacagtggcccctacagagtgcagccccatcaagaccgatgtgattacaatggaccccaaggacaactgctccaaggacgccaacgataccctgctgctccagctgaccaacaccagcgcctactacatgtacttgttgctgctgctgaagtccgtggtgtacttcgccatcatcacatgctgcctgctgcggagaaccgccttctgctgcaacggcgagaagtctagggccaagcgatctggatctggagcaacaaacttctcactactcaaacaagcaggtgacgtggaggagaatcccgggcctactagtatggactggatttggcgcatccttttccttgtcggcgctgctaccggcgcccattccgggccccaggttcagctgcaagagtctggcggaggacttgctcaagctggcggaagcctgagactgtcttgtgccgcctctggcagaaccttcagcatgggctggtttagacaggcccctggcaaagagagagagttcgtcgccgccatcacatacagcggcggcagcccttactacgcctcttctgtcagaggccggttcaccatcagccgggacaacgccaagaacaccgtgtacctccagatgaacagcctgaagccagaggacaccgccgtgtactactgtgccgccaatccaacctacggcagcgactggaatgccgagaattggggccagggcacccaagtgacagtgtctagtggatccggcggcggaggatctggcggaggcggatctgggggcggaggctctttcgaacaagttcagcttcaacagcctggcgctgagctggtcaaacctggcgcttctgtgaagatgagctgcaaagccagcggctacgccttcagcagctactggatcaactggatgaagcagaaacccggccagggactcgaatggatcggccaaatctatcccggcgacggcgacaccaactacaacggcaagttcaagggcagagccacactgaccgccgatacctctagcagcacagcctacatgcagctgagcagcctgaccagcgaagatagcgccgtgtacttctgtgcccggtccatcacaacagtcgtgggctgcgctatggactattggggccagggaacaagcgtgaccgtgtctagtacgcgtgcctctacaaagggaccctccgtgtttcctctggctcccagcagcaagtctacaagcggaggaacagccgctctgggctgcctggtcaaggattactttcccgagcctgtgaccgtgtcctggaatagcggagcactgacaagcggcgtgcacacctttccagccgtgctgcaaagcagcggcctgtactctctgagcagcgtggtcacagtgcctagctctagcctgggcacccagacctacatctgcaatgtgaaccacaagcctagcaacaccaaggtggacaagagagtggaacccaagagctgtgaagtgaaaaccgactccaccgaccacgtgaagcccaaagagacagagaacaccaagcagcccagcaagagctgccacaagcccaaggccatcgtgcacaccgagaaagtgaacatgatgagcctgaccgtgctgggcctgcggatgctgttcgccaaaaccgtggccgtgaacttcctgctgaccgccaagctgttcttcctc

SEQ ID NO: 5131 - DNA, 3102 bp, Artificial Sequence
  Synthetic Polynucloetide
atggccttaccagtgaccgccttgctcctgccgctggccttgctgctccacgccgccaggccggaggttcagctgcttgagtctggcggaggactggttcaacctggcggaagcctgagactgtcttgtgccgccagcggcttcacctttagcagctacgccatgagctgggtccgacaggctcctggcaaaggactggaatgggtgtccagcatcagcggcagcggcgactacatctactacgccgatagcgtgaagggcagattcaccatcagccgggacatcagcaagaacaccctgtacctccagatgaacagcctgagagccgaggacaccgccgtgtactactgtgccaaagaaggcaccggcgctaacagcagcctggccgattatagaggccagggcacactggtcaccgtgtctagtggcggaggaagcggcggaggatctcaggtccagctcgtcgagtccggcggcggcctcgtccaggccggcgactccgtcaccctctcctgcaccgcctccggccgcaccttctcctcctacgccctcgcctggttccgccagcgccccggcaaggagcgcgagttcgtcgccggcctccgctggggcggccccaccaactacgccgactccgtcaaggaccgcttcaccatctccggcgactccgccaagcacaccatgtacctccagatgaactccctcaagcccgaggacaccgccgtctactactgcggctacaaccccggcggctgggccgtcccctcccagtacgagtacgactcctggggccagggcacccaggtcaccgtctcctccggtaccggcggaggcggatctggcggcggaggtagcggtggcggaggatctgaattcgacatccagatgacacagagccctagcagcctgtctgccagcgtgggagacagagtgaccatcacatgcaaggccagcgaccacatcaacaactggctggcctggtatcagcagaagcctggacaggcccctaagctgctgatctacggcgctaccacactggaaacaggcgtgcccagcagattttctggcagcggctctggcaccgactacaccctgacaatatccagcctccagcctgaggacttcgccacctactactgtcagcagagctggaacaccccttggacattcggccagggcaccaagctggaaatcaagagactcgagggacagcctaaggccaatcctaccgtgacactgttccctccaagcagcgaagaactccaggccaacaaggccacacttgtgtgcctgatctccgacttctaccctggggctgtgacagtggcttggaaggccgatggatctcctgtgaaagccggcgtggaaaccaccaagccatccaagcagagcaacaacaaatacgccgccagctcctacctgagcctgacacctgagcagtggaagtcccacagatcctacagctgccaagtgacccacgaaggcagcaccgtggaaaagacagtggcccctacagagtgcagcggcagagccgattgcggcatcaccagcgccagctaccaccagggcgtgctgagcgccaccatcctgtacgagatcctgctgggcaaggccaccctgtacgccgtgctggtgtctgccctggtgctgatggctatggtcaagcggaaggacagccggggaagggccaagcgatctggatctggagcaacaaacttctcactactcaaacaagcaggtgacgtggaggagaatcccgggcctactagtatggactggatttggcgcatccttttccttgtcggcgctgctaccggcgcccattccgggccccaggttcagctgcaagagtctggcggaggacttgctcaagctggcggaagcctgagactgtcttgtgccgcctctggcagaaccttcagcatgggctggtttagacaggcccctggcaaagagagagagttcgtcgccgccatcacatacagcggcggcagcccttactacgcctcttctgtcagaggccggttcaccatcagccgggacaacgccaagaacaccgtgtacctccagatgaacagcctgaagccagaggacaccgccgtgtactactgtgccgccaatccaacctacggcagcgactggaatgccgagaattggggccagggcacccaagtgacagtgtctagtggatccggcggcggaggatctggcggaggcggatctgggggcggaggctctttcgaacaagttcagcttcaacagcctggcgctgagctggtcaaacctggcgcttctgtgaagatgagctgcaaagccagcggctacgccttcagcagctactggatcaactggatgaagcagaaacccggccagggactcgaatggatcggccaaatctatcccggcgacggcgacaccaactacaacggcaagttcaagggcagagccacactgaccgccgatacctctagcagcacagcctacatgcagctgagcagcctgaccagcgaagatagcgccgtgtacttctgtgcccggtccatcacaacagtcgtgggctgcgctatggactattggggccagggaacaagcgtgaccgtgtctagtacgcgtgcctctacaaagggaccctccgtgtttcctctggctcccagcagcaagtctacaagcggaggaacagccgctctgggctgcctggtcaaggattactttcccgagcctgtgaccgtgtcctggaatagcggagcactgacaagcggcgtgcacacctttccagccgtgctgcaaagcagcggcctgtactctctgagcagcgtggtcacagtgcctagctctagcctgggcacccagacctacatctgcaatgtgaaccacaagcctagcaacaccaaggtggacaagagagtggaacccaagagctgtatccccgaggacacattcttcccaagcagcgacgtgccctgcgacgtgaagctggtggaaaagagcttcgagacagacaccaacctgaacttccagaacctgagcgtgatcggcttcagaatcctgctgctgaaagtggccggctttaacctgctgatgaccctgcggctgtggtccagc

SEQ ID NO: 5132 - DNA, 3102 bp, Artificial Sequence
  Synthetic Polynucloetide
atggccttaccagtgaccgccttgctcctgccgctggccttgctgctccacgccgccaggccggaggttcagctgcttgagtctggcggaggactggttcaacctggcggaagcctgagactgtcttgtgccgccagcggcttcacctttagcagctacgccatgagctgggtccgacaggctcctggcaaaggactggaatgggtgtccagcatcagcggcagcggcgactacatctactacgccgatagcgtgaagggcagattcaccatcagccgggacatcagcaagaacaccctgtacctccagatgaacagcctgagagccgaggacaccgccgtgtactactgtgccaaagaaggcaccggcgctaacagcagcctggccgattatagaggccagggcacactggtcaccgtgtctagtggcggaggaagcggcggaggatctcaggtccagctcgtcgagtccggcggcggcctcgtccaggccggcgactccgtcaccctctcctgcaccgcctccggccgcaccttctcctcctacgccctcgcctggttccgccagcgccccggcaaggagcgcgagttcgtcgccggcctccgctggggcggccccaccaactacgccgactccgtcaaggaccgcttcaccatctccggcgactccgccaagcacaccatgtacctccagatgaactccctcaagcccgaggacaccgccgtctactactgcggctacaaccccggcggctgggccgtcccctcccagtacgagtacgactcctggggccagggcacccaggtcaccgtctcctccggtaccggcggaggcggatctggcggcggaggtagcggtggcggaggatctgaattcgacatccagatgacacagagccctagcagcctgtctgccagcgtgggagacagagtgaccatcacatgcaaggccagcgaccacatcaacaactggctggcctggtatcagcagaagcctggacaggcccctaagctgctgatctacggcgctaccacactggaaacaggcgtgcccagcagattttctggcagcggctctggcaccgactacaccctgacaatatccagcctccagcctgaggacttcgccacctactactgtcagcagagctggaacaccccttggacattcggccagggcaccaagctggaaatcaagagactcgagggacagcctaaggccaatcctaccgtgacactgttccctccaagcagcgaagaactccaggccaacaaggccacacttgtgtgcctgatctccgacttctaccctggggctgtgacagtggcttggaaggccgatggatctcctgtgaaagccggcgtggaaaccaccaagccatccaagcagagcaacaacaaatacgccgccagctcctacctgagcctgacacctgagcagtggaagtcccacagatcctacagctgccaagtgacccacgaaggcagcaccgtggaaaagacagtggcccctacagagtgcagcggcagagccgattgcggctttaccagcgagagctaccagcagggcgtgctgagcgccaccatcctgtacgagatcctgctgggcaaggccaccctgtacgccgtgctggtgtctgccctggtgctgatggctatggtcaagcggaaggacagccggggaagggccaagcgatctggatctggagcaacaaacttctcactactcaaacaagcaggtgacgtggaggagaatcccgggcctactagtatggactggatttggcgcatccttttccttgtcggcgctgctaccggcgcccattccgggccccaggttcagctgcaagagtctggcggaggacttgctcaagctggcggaagcctgagactgtcttgtgccgcctctggcagaaccttcagcatgggctggtttagacaggcccctggcaaagagagagagttcgtcgccgccatcacatacagcggcggcagcccttactacgcctcttctgtcagaggccggttcaccatcagccgggacaacgccaagaacaccgtgtacctccagatgaacagcctgaagccagaggacaccgccgtgtactactgtgccgccaatccaacctacggcagcgactggaatgccgagaattggggccagggcacccaagtgacagtgtctagtggatccggcggcggaggatctggcggaggcggatctgggggcggaggctctttcgaacaagttcagcttcaacagcctggcgctgagctggtcaaacctggcgcttctgtgaagatgagctgcaaagccagcggctacgccttcagcagctactggatcaactggatgaagcagaaacccggccagggactcgaatggatcggccaaatctatcccggcgacggcgacaccaactacaacggcaagttcaagggcagagccacactgaccgccgatacctctagcagcacagcctacatgcagctgagcagcctgaccagcgaagatagcgccgtgtacttctgtgcccggtccatcacaacagtcgtgggctgcgctatggactattggggccagggaacaagcgtgaccgtgtctagtacgcgtgcctctacaaagggaccctccgtgtttcctctggctcccagcagcaagtctacaagcggaggaacagccgctctgggctgcctggtcaaggattactttcccgagcctgtgaccgtgtcctggaatagcggagcactgacaagcggcgtgcacacctttccagccgtgctgcaaagcagcggcctgtactctctgagcagcgtggtcacagtgcctagctctagcctgggcacccagacctacatctgcaatgtgaaccacaagcctagcaacaccaaggtggacaagagagtggaacccaagagctgtatccccgaggacacattcttcccaagccccgagagcagctgcgacgtgaagctggtggaaaagagcttcgagacagacaccaacctgaacttccagaacctgagcgtgatcggcttcagaatcctgctgctgaaagtggccggctttaacctgctgatgaccctgcggctgtggtccagc

SEQ ID NO: 5133 - DNA, 3003 bp, Artificial Sequence
  Synthetic Polynucloetide
atggccttaccagtgaccgccttgctcctgccgctggccttgctgctccacgccgccaggccggaggttcagctgcttgagtctggcggaggactggttcaacctggcggaagcctgagactgtcttgtgccgccagcggcttcacctttagcagctacgccatgagctgggtccgacaggctcctggcaaaggactggaatgggtgtccagcatcagcggcagcggcgactacatctactacgccgatagcgtgaagggcagattcaccatcagccgggacatcagcaagaacaccctgtacctccagatgaacagcctgagagccgaggacaccgccgtgtactactgtgccaaagaaggcaccggcgctaacagcagcctggccgattatagaggccagggcacactggtcaccgtgtctagtggcggaggaagcggcggaggatctcaggtccagctcgtcgagtccggcggcggcctcgtccaggccggcgactccgtcaccctctcctgcaccgcctccggccgcaccttctcctcctacgccctcgcctggttccgccagcgccccggcaaggagcgcgagttcgtcgccggcctccgctggggcggccccaccaactacgccgactccgtcaaggaccgcttcaccatctccggcgactccgccaagcacaccatgtacctccagatgaactccctcaagcccgaggacaccgccgtctactactgcggctacaaccccggcggctgggccgtcccctcccagtacgagtacgactcctggggccagggcacccaggtcaccgtctcctccctcgagggacagcctaaggccaatcctaccgtgacactgttccctccaagcagcgaagaactccaggccaacaaggccacacttgtgtgcctgatctccgacttctaccctggggctgtgacagtggcttggaaggccgatggatctcctgtgaaagccggcgtggaaaccaccaagccatccaagcagagcaacaacaaatacgccgccagctcctacctgagcctgacacctgagcagtggaagtcccacagatcctacagctgccaagtgacccacgaaggcagcaccgtggaaaagacagtggcccctacagagtgcagcggcagagccgattgcggctttaccagcgagagctaccagcagggcgtgctgagcgccaccatcctgtacgagatcctgctgggcaaggccaccctgtacgccgtgctggtgtctgccctggtgctgatggctatggtcaagcggaaggacagccggggaagggccaagcgatctggatctggagcaacaaacttctcactactcaaacaagcaggtgacgtggaggagaatcccgggcctactagtatggactggatttggcgcatccttttccttgtcggcgctgctaccggcgcgcattccgggccccaggttcagctgcaagagtctggcggaggacttgctcaagctggcggaagcctgagactgtcttgtgccgcctctggcagaaccttcagcatgggctggtttagacaggcccctggcaaagagagagagttcgtcgccgccatcacatacagcggcggcagcccttactacgcctcttctgtcagaggccggttcaccatcagccgggacaacgccaagaacaccgtgtacctccagatgaacagcctgaagccagaggacaccgccgtgtactactgtgccgccaatccaacctacggcagcgactggaatgccgagaattggggccagggcacccaagtgacagtgtctagtacgcgtgcctctacaaagggaccctccgtgtttcctctggctcccagcagcaagtctacaagcggaggaacagccgctctgggctgcctggtcaaggattactttcccgagcctgtgaccgtgtcctggaatagcggagcactgacaagcggcgtgcacacctttccagccgtgctgcaaagcagcggcctgtactctctgagcagcgtggtcacagtgcctagctctagcctgggcacccagacctacatctgcaatgtgaaccacaagcctagcaacaccaaggtggacaagagagtggaacccaagagctgtatccccgaggacacattcttcccaagccccgagagcagctgcgacgtgaagctggtggaaaagagcttcgagacagacaccaacctgaacttccagaacctgagcgtgatcggcttcagaatcctgctgctgaaagtggccggctttaacctgctgatgaccctgcggctgtggtccagccgcgccaagagaagcggatctggcgtgaagcagaccctgaatttcgacctgctgaagctggctggcgacgtggaatccaacccaggcccttctagaggccatatgaccgagtacaagcccacggtgcgcctcgccacccgcgacgacgtccccagggccgtacgcaccctcgccgccgcgttcgccgactaccccgccacgcgccacaccgtcgatccggaccgccacatcgagcgggtcaccgagctgcaagaactcttcctcacgcgcgtcgggctcgacatcggcaaggtgtgggtcgcggacgacggcgccgcggtggcggtctggaccacgccggagagcgtcgaagcgggggcggtgttcgccgagatcggcccgcgcatggccgagttgagcggttcccggctggccgcgcagcaacagatggaaggcctcctggcgccgcaccggcccaaggagcccgcgtggttcctggccaccgtcggcgtctcgcccgaccaccagggcaagggtctgggcagcgccgtcgtgctccccggagtggaggcggccgagcgcgccggggtgcccgccttcctggagacctccgcgccccgcaacctccccttctacgagcggctcggcttcaccgtcaccgccgacgtcgaggtgcccgaaggaccgcgcacctggtgcatgacccgcaagcccggtgcctga

SEQ ID NO: 5134 - DNA, 2301 bp, Artificial Sequence
  Synthetic Polynucloetide
atggccttaccagtgaccgccttgctcctgccgctggccttgctgctccacgccgccaggccggaggttcagctgcttgagtctggcggaggactggttcaacctggcggaagcctgagactgtcttgtgccgccagcggcttcacctttagcagctacgccatgagctgggtccgacaggctcctggcaaaggactggaatgggtgtccagcatcagcggcagcggcgactacatctactacgccgatagcgtgaagggcagattcaccatcagccgggacatcagcaagaacaccctgtacctccagatgaacagcctgagagccgaggacaccgccgtgtactactgtgccaaagaaggcaccggcgctaacagcagcctggccgattatagaggccagggcacactggtcaccgtgtctagtggcggaggaagcggcggaggatctcaggtccagctcgtcgagtccggcggcggcctcgtccaggccggcgactccgtcaccctctcctgcaccgcctccggccgcaccttctcctcctacgccctcgcctggttccgccagcgccccggcaaggagcgcgagttcgtcgccggcctccgctggggcggccccaccaactacgccgactccgtcaaggaccgcttcaccatctccggcgactccgccaagcacaccatgtacctccagatgaactccctcaagcccgaggacaccgccgtctactactgcggctacaaccccggcggctgggccgtcccctcccagtacgagtacgactcctggggccagggcacccaggtcaccgtctcctccctcgagggacagcctaaggccaatcctaccgtgacactgttccctccaagcagcgaagaactccaggccaacaaggccacacttgtgtgcctgatctccgacttctaccctggggctgtgacagtggcttggaaggccgatggatctcctgtgaaagccggcgtggaaaccaccaagccatccaagcagagcaacaacaaatacgccgccagctcctacctgagcctgacacctgagcagtggaagtcccacagatcctacagctgccaagtgacccacgaaggcagcaccgtggaaaagacagtggcccctacagagtgcagcggcagagccgattgcggctttaccagcgagagctaccagcagggcgtgctgagcgccaccatcctgtacgagatcctgctgggcaaggccaccctgtacgccgtgctggtgtctgccctggtgctgatggctatggtcaagcggaaggacagccggggaagggccaagcgatctggatctggagcaacaaacttctcactactcaaacaagcaggtgacgtggaggagaatcccgggcctactagtatggactggatttggcgcatccttttccttgtcggcgctgctaccggcgcgcattccgggccccaggttcagctgcaagagtctggcggaggacttgctcaagctggcggaagcctgagactgtcttgtgccgcctctggcagaaccttcagcatgggctggtttagacaggcccctggcaaagagagagagttcgtcgccgccatcacatacagcggcggcagcccttactacgcctcttctgtcagaggccggttcaccatcagccgggacaacgccaagaacaccgtgtacctccagatgaacagcctgaagccagaggacaccgccgtgtactactgtgccgccaatccaacctacggcagcgactggaatgccgagaattggggccagggcacccaagtgacagtgtctagtacgcgtgcctctacaaagggaccctccgtgtttcctctggctcccagcagcaagtctacaagcggaggaacagccgctctgggctgcctggtcaaggattactttcccgagcctgtgaccgtgtcctggaatagcggagcactgacaagcggcgtgcacacctttccagccgtgctgcaaagcagcggcctgtactctctgagcagcgtggtcacagtgcctagctctagcctgggcacccagacctacatctgcaatgtgaaccacaagcctagcaacaccaaggtggacaagagagtggaacccaagagctgtatccccgaggacacattcttcccaagccccgagagcagctgcgacgtgaagctggtggaaaagagcttcgagacagacaccaacctgaacttccagaacctgagcgtgatcggcttcagaatcctgctgctgaaagtggccggctttaacctgctgatgaccctgcggctgtggtccagc

SEQ ID NO: 5135 - DNA, 2388 bp, Artificial Sequence
  Synthetic Polynucloetide
atggccttaccagtgaccgccttgctcctgccgctggccttgctgctccacgccgccaggccggaggttcagctgcttgagtctggcggaggactggttcaacctggcggaagcctgagactgtcttgtgccgccagcggcttcacctttagcagctacgccatgagctgggtccgacaggctcctggcaaaggactggaatgggtgtccagcatcagcggcagcggcgactacatctactacgccgatagcgtgaagggcagattcaccatcagccgggacatcagcaagaacaccctgtacctccagatgaacagcctgagagccgaggacaccgccgtgtactactgtgccaaagaaggcaccggcgctaacagcagcctggccgattatagaggccagggcacactggtcaccgtgtctagtggcggaggaagcggcggaggatctcaggtccagctcgtcgagtccggcggcggcctcgtccaggccggcgactccgtcaccctctcctgcaccgcctccggccgcaccttctcctcctacgccctcgcctggttccgccagcgccccggcaaggagcgcgagttcgtcgccggcctccgctggggcggccccaccaactacgccgactccgtcaaggaccgcttcaccatctccggcgactccgccaagcacaccatgtacctccagatgaactccctcaagcccgaggacaccgccgtctactactgcggctacaaccccggcggctgggccgtcccctcccagtacgagtacgactcctggggccagggcacccaggtcaccgtctcctccctcgagggatctggcagagccgattgcggctttaccagcgagagctaccagcagggcgtgctgagcgccaccatcctgtacgagatcctgctgggcaaggccaccctgtacgccgtgctggtgtctgccctggtgctgatggctatggtcaagcggaaggacagccggggaagggccaagcgatctggatctggagcaacaaacttctcactactcaaacaagcaggtgacgtggaggagaatcccgggcctactagtatggactggatttggcgcatccttttccttgtcggcgctgctaccggcgcgcattccgggccccaggttcagctgcaagagtctggcggaggacttgctcaagctggcggaagcctgagactgtcttgtgccgcctctggcagaaccttcagcatgggctggtttagacaggcccctggcaaagagagagagttcgtcgccgccatcacatacagcggcggcagcccttactacgcctcttctgtcagaggccggttcaccatcagccgggacaacgccaagaacaccgtgtacctccagatgaacagcctgaagccagaggacaccgccgtgtactactgtgccgccaatccaacctacggcagcgactggaatgccgagaattggggccagggcacccaagtgacagtgtctagtacgcgtggcagcatccccgaggacacattcttcccaagccccgagagcagctgcgacgtgaagctggtggaaaagagcttcgagacagacaccaacctgaacttccagaacctgagcgtgatcggcttcagaatcctgctgctgaaagtggccggctttaacctgctgatgaccctgcggctgtggtccagccgcgccaagagaagcggatctggcgtgaagcagaccctgaatttcgacctgctgaagctggctggcgacgtggaatccaacccaggcccttctagaggccatatgaccgagtacaagcccacggtgcgcctcgccacccgcgacgacgtccccagggccgtacgcaccctcgccgccgcgttcgccgactaccccgccacgcgccacaccgtcgatccggaccgccacatcgagcgggtcaccgagctgcaagaactcttcctcacgcgcgtcgggctcgacatcggcaaggtgtgggtcgcggacgacggcgccgcggtggcggtctggaccacgccggagagcgtcgaagcgggggcggtgttcgccgagatcggcccgcgcatggccgagttgagcggttcccggctggccgcgcagcaacagatggaaggcctcctggcgccgcaccggcccaaggagcccgcgtggttcctggccaccgtcggcgtctcgcccgaccaccagggcaagggtctgggcagcgccgtcgtgctccccggagtggaggcggccgagcgcgccggggtgcccgccttcctggagacctccgcgccccgcaacctccccttctacgagcggctcggcttcaccgtcaccgccgacgtcgaggtgcccgaaggaccgcgcacctggtgcatgacccgcaagcccggtgcctga

SEQ ID NO: 5136 - DNA, 1686 bp, Artificial Sequence
  Synthetic Polynucloetide
atggccttaccagtgaccgccttgctcctgccgctggccttgctgctccacgccgccaggccggaggttcagctgcttgagtctggcggaggactggttcaacctggcggaagcctgagactgtcttgtgccgccagcggcttcacctttagcagctacgccatgagctgggtccgacaggctcctggcaaaggactggaatgggtgtccagcatcagcggcagcggcgactacatctactacgccgatagcgtgaagggcagattcaccatcagccgggacatcagcaagaacaccctgtacctccagatgaacagcctgagagccgaggacaccgccgtgtactactgtgccaaagaaggcaccggcgctaacagcagcctggccgattatagaggccagggcacactggtcaccgtgtctagtggcggaggaagcggcggaggatctcaggtccagctcgtcgagtccggcggcggcctcgtccaggccggcgactccgtcaccctctcctgcaccgcctccggccgcaccttctcctcctacgccctcgcctggttccgccagcgccccggcaaggagcgcgagttcgtcgccggcctccgctggggcggccccaccaactacgccgactccgtcaaggaccgcttcaccatctccggcgactccgccaagcacaccatgtacctccagatgaactccctcaagcccgaggacaccgccgtctactactgcggctacaaccccggcggctgggccgtcccctcccagtacgagtacgactcctggggccagggcacccaggtcaccgtctcctccctcgagggatctggcagagccgattgcggctttaccagcgagagctaccagcagggcgtgctgagcgccaccatcctgtacgagatcctgctgggcaaggccaccctgtacgccgtgctggtgtctgccctggtgctgatggctatggtcaagcggaaggacagccggggaagggccaagcgatctggatctggagcaacaaacttctcactactcaaacaagcaggtgacgtggaggagaatcccgggcctactagtatggactggatttggcgcatccttttccttgtcggcgctgctaccggcgcgcattccgggccccaggttcagctgcaagagtctggcggaggacttgctcaagctggcggaagcctgagactgtcttgtgccgcctctggcagaaccttcagcatgggctggtttagacaggcccctggcaaagagagagagttcgtcgccgccatcacatacagcggcggcagcccttactacgcctcttctgtcagaggccggttcaccatcagccgggacaacgccaagaacaccgtgtacctccagatgaacagcctgaagccagaggacaccgccgtgtactactgtgccgccaatccaacctacggcagcgactggaatgccgagaattggggccagggcacccaagtgacagtgtctagtacgcgtggcagcatccccgaggacacattcttcccaagccccgagagcagctgcgacgtgaagctggtggaaaagagcttcgagacagacaccaacctgaacttccagaacctgagcgtgatcggcttcagaatcctgctgctgaaagtggccggctttaacctgctgatgaccctgcggctgtggtccagc

SEQ ID NO: 5137 - DNA, 2415 bp, Artificial Sequence
  Synthetic Polynucloetide
atggccttaccagtgaccgccttgctcctgccgctggccttgctgctccacgccgccaggccggaggttcagctgcttgagtctggcggaggactggttcaacctggcggaagcctgagactgtcttgtgccgccagcggcttcacctttagcagctacgccatgagctgggtccgacaggctcctggcaaaggactggaatgggtgtccagcatcagcggcagcggcgactacatctactacgccgatagcgtgaagggcagattcaccatcagccgggacatcagcaagaacaccctgtacctccagatgaacagcctgagagccgaggacaccgccgtgtactactgtgccaaagaaggcaccggcgctaacagcagcctggccgattatagaggccagggcacactggtcaccgtgtctagtggcggaggaagcggcggaggatctcaggtccagctcgtcgagtccggcggcggcctcgtccaggccggcgactccgtcaccctctcctgcaccgcctccggccgcaccttctcctcctacgccctcgcctggttccgccagcgccccggcaaggagcgcgagttcgtcgccggcctccgctggggcggccccaccaactacgccgactccgtcaaggaccgcttcaccatctccggcgactccgccaagcacaccatgtacctccagatgaactccctcaagcccgaggacaccgccgtctactactgcggctacaaccccggcggctgggccgtcccctcccagtacgagtacgactcctggggccagggcacccaggtcaccgtctcctccctcgaggacaaaactcacacatgcccaccgtgcccagcaggcagagccgattgcggctttaccagcgagagctaccagcagggcgtgctgagcgccaccatcctgtacgagatcctgctgggcaaggccaccctgtacgccgtgctggtgtctgccctggtgctgatggctatggtcaagcggaaggacagccggggaagggccaagcgatctggatctggagcaacaaacttctcactactcaaacaagcaggtgacgtggaggagaatcccgggcctactagtatggactggatttggcgcatccttttccttgtcggcgctgctaccggcgcgcattccgggccccaggttcagctgcaagagtctggcggaggacttgctcaagctggcggaagcctgagactgtcttgtgccgcctctggcagaaccttcagcatgggctggtttagacaggcccctggcaaagagagagagttcgtcgccgccatcacatacagcggcggcagcccttactacgcctcttctgtcagaggccggttcaccatcagccgggacaacgccaagaacaccgtgtacctccagatgaacagcctgaagccagaggacaccgccgtgtactactgtgccgccaatccaacctacggcagcgactggaatgccgagaattggggccagggcacccaagtgacagtgtctagtacgcgtggcagcatccccgaggacacattcttcccaagccccgagagcagctgcgacgtgaagctggtggaaaagagcttcgagacagacaccaacctgaacttccagaacctgagcgtgatcggcttcagaatcctgctgctgaaagtggccggctttaacctgctgatgaccctgcggctgtggtccagccgcgccaagagaagcggatctggcgtgaagcagaccctgaatttcgacctgctgaagctggctggcgacgtggaatccaacccaggcccttctagaggccatatgaccgagtacaagcccacggtgcgcctcgccacccgcgacgacgtccccagggccgtacgcaccctcgccgccgcgttcgccgactaccccgccacgcgccacaccgtcgatccggaccgccacatcgagcgggtcaccgagctgcaagaactcttcctcacgcgcgtcgggctcgacatcggcaaggtgtgggtcgcggacgacggcgccgcggtggcggtctggaccacgccggagagcgtcgaagcgggggcggtgttcgccgagatcggcccgcgcatggccgagttgagcggttcccggctggccgcgcagcaacagatggaaggcctcctggcgccgcaccggcccaaggagcccgcgtggttcctggccaccgtcggcgtctcgcccgaccaccagggcaagggtctgggcagcgccgtcgtgctccccggagtggaggcggccgagcgcgccggggtgcccgccttcctggagacctccgcgccccgcaacctccccttctacgagcggctcggcttcaccgtcaccgccgacgtcgaggtgcccgaaggaccgcgcacctggtgcatgacccgcaagcccggtgcctga

SEQ ID NO: 5138 - DNA, 2415 bp, Artificial Sequence
  Synthetic Polynucloetide
atggccttaccagtgaccgccttgctcctgccgctggccttgctgctccacgccgccaggccggaggttcagctgcttgagtctggcggaggactggttcaacctggcggaagcctgagactgtcttgtgccgccagcggcttcacctttagcagctacgccatgagctgggtccgacaggctcctggcaaaggactggaatgggtgtccagcatcagcggcagcggcgactacatctactacgccgatagcgtgaagggcagattcaccatcagccgggacatcagcaagaacaccctgtacctccagatgaacagcctgagagccgaggacaccgccgtgtactactgtgccaaagaaggcaccggcgctaacagcagcctggccgattatagaggccagggcacactggtcaccgtgtctagtggcggaggaagcggcggaggatctcaggtccagctcgtcgagtccggcggcggcctcgtccaggccggcgactccgtcaccctctcctgcaccgcctccggccgcaccttctcctcctacgccctcgcctggttccgccagcgccccggcaaggagcgcgagttcgtcgccggcctccgctggggcggccccaccaactacgccgactccgtcaaggaccgcttcaccatctccggcgactccgccaagcacaccatgtacctccagatgaactccctcaagcccgaggacaccgccgtctactactgcggctacaaccccggcggctgggccgtcccctcccagtacgagtacgactcctggggccagggcacccaggtcaccgtctcctccctcgagggatctggcagagccgattgcggctttaccagcgagagctaccagcagggcgtgctgagcgccaccatcctgtacgagatcctgctgggcaaggccaccctgtacgccgtgctggtgtctgccctggtgctgatggctatggtcaagcggaaggacagccggggaagggccaagcgatctggatctggagcaacaaacttctcactactcaaacaagcaggtgacgtggaggagaatcccgggcctactagtatggactggatttggcgcatccttttccttgtcggcgctgctaccggcgcgcattccgggccccaggttcagctgcaagagtctggcggaggacttgctcaagctggcggaagcctgagactgtcttgtgccgcctctggcagaaccttcagcatgggctggtttagacaggcccctggcaaagagagagagttcgtcgccgccatcacatacagcggcggcagcccttactacgcctcttctgtcagaggccggttcaccatcagccgggacaacgccaagaacaccgtgtacctccagatgaacagcctgaagccagaggacaccgccgtgtactactgtgccgccaatccaacctacggcagcgactggaatgccgagaattggggccagggcacccaagtgacagtgtctagtacgcgtgataaaactcatacctgtccgccatgcccggcaatccccgaggacacattcttcccaagccccgagagcagctgcgacgtgaagctggtggaaaagagcttcgagacagacaccaacctgaacttccagaacctgagcgtgatcggcttcagaatcctgctgctgaaagtggccggctttaacctgctgatgaccctgcggctgtggtccagccgcgccaagagaagcggatctggcgtgaagcagaccctgaatttcgacctgctgaagctggctggcgacgtggaatccaacccaggcccttctagaggccatatgaccgagtacaagcccacggtgcgcctcgccacccgcgacgacgtccccagggccgtacgcaccctcgccgccgcgttcgccgactaccccgccacgcgccacaccgtcgatccggaccgccacatcgagcgggtcaccgagctgcaagaactcttcctcacgcgcgtcgggctcgacatcggcaaggtgtgggtcgcggacgacggcgccgcggtggcggtctggaccacgccggagagcgtcgaagcgggggcggtgttcgccgagatcggcccgcgcatggccgagttgagcggttcccggctggccgcgcagcaacagatggaaggcctcctggcgccgcaccggcccaaggagcccgcgtggttcctggccaccgtcggcgtctcgcccgaccaccagggcaagggtctgggcagcgccgtcgtgctccccggagtggaggcggccgagcgcgccggggtgcccgccttcctggagacctccgcgccccgcaacctccccttctacgagcggctcggcttcaccgtcaccgccgacgtcgaggtgcccgaaggaccgcgcacctggtgcatgacccgcaagcccggtgcctga

SEQ ID NO: 5139 - DNA, 2442 bp, Artificial Sequence
  Synthetic Polynucloetide
atggccttaccagtgaccgccttgctcctgccgctggccttgctgctccacgccgccaggccggaggttcagctgcttgagtctggcggaggactggttcaacctggcggaagcctgagactgtcttgtgccgccagcggcttcacctttagcagctacgccatgagctgggtccgacaggctcctggcaaaggactggaatgggtgtccagcatcagcggcagcggcgactacatctactacgccgatagcgtgaagggcagattcaccatcagccgggacatcagcaagaacaccctgtacctccagatgaacagcctgagagccgaggacaccgccgtgtactactgtgccaaagaaggcaccggcgctaacagcagcctggccgattatagaggccagggcacactggtcaccgtgtctagtggcggaggaagcggcggaggatctcaggtccagctcgtcgagtccggcggcggcctcgtccaggccggcgactccgtcaccctctcctgcaccgcctccggccgcaccttctcctcctacgccctcgcctggttccgccagcgccccggcaaggagcgcgagttcgtcgccggcctccgctggggcggccccaccaactacgccgactccgtcaaggaccgcttcaccatctccggcgactccgccaagcacaccatgtacctccagatgaactccctcaagcccgaggacaccgccgtctactactgcggctacaaccccggcggctgggccgtcccctcccagtacgagtacgactcctggggccagggcacccaggtcaccgtctcctccctcgaggacaaaactcacacatgcccaccgtgcccagcaggcagagccgattgcggctttaccagcgagagctaccagcagggcgtgctgagcgccaccatcctgtacgagatcctgctgggcaaggccaccctgtacgccgtgctggtgtctgccctggtgctgatggctatggtcaagcggaaggacagccggggaagggccaagcgatctggatctggagcaacaaacttctcactactcaaacaagcaggtgacgtggaggagaatcccgggcctactagtatggactggatttggcgcatccttttccttgtcggcgctgctaccggcgcgcattccgggccccaggttcagctgcaagagtctggcggaggacttgctcaagctggcggaagcctgagactgtcttgtgccgcctctggcagaaccttcagcatgggctggtttagacaggcccctggcaaagagagagagttcgtcgccgccatcacatacagcggcggcagcccttactacgcctcttctgtcagaggccggttcaccatcagccgggacaacgccaagaacaccgtgtacctccagatgaacagcctgaagccagaggacaccgccgtgtactactgtgccgccaatccaacctacggcagcgactggaatgccgagaattggggccagggcacccaagtgacagtgtctagtacgcgtgataaaactcatacctgtccgccatgcccggcaatccccgaggacacattcttcccaagccccgagagcagctgcgacgtgaagctggtggaaaagagcttcgagacagacaccaacctgaacttccagaacctgagcgtgatcggcttcagaatcctgctgctgaaagtggccggctttaacctgctgatgaccctgcggctgtggtccagccgcgccaagagaagcggatctggcgtgaagcagaccctgaatttcgacctgctgaagctggctggcgacgtggaatccaacccaggcccttctagaggccatatgaccgagtacaagcccacggtgcgcctcgccacccgcgacgacgtccccagggccgtacgcaccctcgccgccgcgttcgccgactaccccgccacgcgccacaccgtcgatccggaccgccacatcgagcgggtcaccgagctgcaagaactcttcctcacgcgcgtcgggctcgacatcggcaaggtgtgggtcgcggacgacggcgccgcggtggcggtctggaccacgccggagagcgtcgaagcgggggcggtgttcgccgagatcggcccgcgcatggccgagttgagcggttcccggctggccgcgcagcaacagatggaaggcctcctggcgccgcaccggcccaaggagcccgcgtggttcctggccaccgtcggcgtctcgcccgaccaccagggcaagggtctgggcagcgccgtcgtgctccccggagtggaggcggccgagcgcgccggggtgcccgccttcctggagacctccgcgccccgcaacctccccttctacgagcggctcggcttcaccgtcaccgccgacgtcgaggtgcccgaaggaccgcgcacctggtgcatgacccgcaagcccggtgcctga

SEQ ID NO: 5140 - DNA, 1740 bp, Artificial Sequence
  Synthetic Polynucloetide
atggccttaccagtgaccgccttgctcctgccgctggccttgctgctccacgccgccaggccggaggttcagctgcttgagtctggcggaggactggttcaacctggcggaagcctgagactgtcttgtgccgccagcggcttcacctttagcagctacgccatgagctgggtccgacaggctcctggcaaaggactggaatgggtgtccagcatcagcggcagcggcgactacatctactacgccgatagcgtgaagggcagattcaccatcagccgggacatcagcaagaacaccctgtacctccagatgaacagcctgagagccgaggacaccgccgtgtactactgtgccaaagaaggcaccggcgctaacagcagcctggccgattatagaggccagggcacactggtcaccgtgtctagtggcggaggaagcggcggaggatctcaggtccagctcgtcgagtccggcggcggcctcgtccaggccggcgactccgtcaccctctcctgcaccgcctccggccgcaccttctcctcctacgccctcgcctggttccgccagcgccccggcaaggagcgcgagttcgtcgccggcctccgctggggcggccccaccaactacgccgactccgtcaaggaccgcttcaccatctccggcgactccgccaagcacaccatgtacctccagatgaactccctcaagcccgaggacaccgccgtctactactgcggctacaaccccggcggctgggccgtcccctcccagtacgagtacgactcctggggccagggcacccaggtcaccgtctcctccctcgaggacaaaactcacacatgcccaccgtgcccagcaggcagagccgattgcggctttaccagcgagagctaccagcagggcgtgctgagcgccaccatcctgtacgagatcctgctgggcaaggccaccctgtacgccgtgctggtgtctgccctggtgctgatggctatggtcaagcggaaggacagccggggaagggccaagcgatctggatctggagcaacaaacttctcactactcaaacaagcaggtgacgtggaggagaatcccgggcctactagtatggactggatttggcgcatccttttccttgtcggcgctgctaccggcgcgcattccgggccccaggttcagctgcaagagtctggcggaggacttgctcaagctggcggaagcctgagactgtcttgtgccgcctctggcagaaccttcagcatgggctggtttagacaggcccctggcaaagagagagagttcgtcgccgccatcacatacagcggcggcagcccttactacgcctcttctgtcagaggccggttcaccatcagccgggacaacgccaagaacaccgtgtacctccagatgaacagcctgaagccagaggacaccgccgtgtactactgtgccgccaatccaacctacggcagcgactggaatgccgagaattggggccagggcacccaagtgacagtgtctagtacgcgtgataaaactcatacctgtccgccatgcccggcaatccccgaggacacattcttcccaagccccgagagcagctgcgacgtgaagctggtggaaaagagcttcgagacagacaccaacctgaacttccagaacctgagcgtgatcggcttcagaatcctgctgctgaaagtggccggctttaacctgctgatgaccctgcggctgtggtccagc

SEQ ID NO: 5141 - DNA, 1713 bp, Artificial Sequence
  Synthetic Polynucloetide
atggccttaccagtgaccgccttgctcctgccgctggccttgctgctccacgccgccaggccggaggttcagctgcttgagtctggcggaggactggttcaacctggcggaagcctgagactgtcttgtgccgccagcggcttcacctttagcagctacgccatgagctgggtccgacaggctcctggcaaaggactggaatgggtgtccagcatcagcggcagcggcgactacatctactacgccgatagcgtgaagggcagattcaccatcagccgggacatcagcaagaacaccctgtacctccagatgaacagcctgagagccgaggacaccgccgtgtactactgtgccaaagaaggcaccggcgctaacagcagcctggccgattatagaggccagggcacactggtcaccgtgtctagtggcggaggaagcggcggaggatctcaggtccagctcgtcgagtccggcggcggcctcgtccaggccggcgactccgtcaccctctcctgcaccgcctccggccgcaccttctcctcctacgccctcgcctggttccgccagcgccccggcaaggagcgcgagttcgtcgccggcctccgctggggcggccccaccaactacgccgactccgtcaaggaccgcttcaccatctccggcgactccgccaagcacaccatgtacctccagatgaactccctcaagcccgaggacaccgccgtctactactgcggctacaaccccggcggctgggccgtcccctcccagtacgagtacgactcctggggccagggcacccaggtcaccgtctcctccctcgagggatctggcagagccgattgcggctttaccagcgagagctaccagcagggcgtgctgagcgccaccatcctgtacgagatcctgctgggcaaggccaccctgtacgccgtgctggtgtctgccctggtgctgatggctatggtcaagcggaaggacagccggggaagggccaagcgatctggatctggagcaacaaacttctcactactcaaacaagcaggtgacgtggaggagaatcccgggcctactagtatggactggatttggcgcatccttttccttgtcggcgctgctaccggcgcgcattccgggccccaggttcagctgcaagagtctggcggaggacttgctcaagctggcggaagcctgagactgtcttgtgccgcctctggcagaaccttcagcatgggctggtttagacaggcccctggcaaagagagagagttcgtcgccgccatcacatacagcggcggcagcccttactacgcctcttctgtcagaggccggttcaccatcagccgggacaacgccaagaacaccgtgtacctccagatgaacagcctgaagccagaggacaccgccgtgtactactgtgccgccaatccaacctacggcagcgactggaatgccgagaattggggccagggcacccaagtgacagtgtctagtacgcgtgataaaactcatacctgtccgccatgcccggcaatccccgaggacacattcttcccaagccccgagagcagctgcgacgtgaagctggtggaaaagagcttcgagacagacaccaacctgaacttccagaacctgagcgtgatcggcttcagaatcctgctgctgaaagtggccggctttaacctgctgatgaccctgcggctgtggtccagc

SEQ ID NO: 5142 - DNA, 3069 bp, Artificial Sequence
  Synthetic Polynucloetide
atggccttaccagtgaccgccttgctcctgccgctggccttgctgctccacgccgccaggccggaggttcagctgcttgagtctggcggaggactggttcaacctggcggaagcctgagactgtcttgtgccgccagcggcttcacctttagcagctacgccatgagctgggtccgacaggctcctggcaaaggactggaatgggtgtccagcatcagcggcagcggcgactacatctactacgccgatagcgtgaagggcagattcaccatcagccgggacatcagcaagaacaccctgtacctccagatgaacagcctgagagccgaggacaccgccgtgtactactgtgccaaagaaggcaccggcgctaacagcagcctggccgattatagaggccagggcacactggtcaccgtgtctagtggcggaggaagcggcggaggatctcaggtccagctcgtcgagtccggcggcggcctcgtccaggccggcgactccgtcaccctctcctgcaccgcctccggccgcaccttctcctcctacgccctcgcctggttccgccagcgccccggcaaggagcgcgagttcgtcgccggcctccgctggggcggccccaccaactacgccgactccgtcaaggaccgcttcaccatctccggcgactccgccaagcacaccatgtacctccagatgaactccctcaagcccgaggacaccgccgtctactactgcggctacaaccccggcggctgggccgtcccctcccagtacgagtacgactcctggggccagggcacccaggtcaccgtctcctccctcgagggacagcctaaggccaatcctaccgtgacactgttccctccaagcagcgaagaactccaggccaacaaggccacacttgtgtgcctgatctccgacttctaccctggggctgtgacagtggcttggaaggccgatggatctcctgtgaaagccggcgtggaaaccaccaagccatccaagcagagcaacaacaaatacgccgccagctcctacctgagcctgacacctgagcagtggaagtcccacagatcctacagctgccaagtgacccacgaaggcagcaccgtggaaaagacagtggcccctacagagtgcagccccatcaagaccgatgtgattacaatggaccccaaggacaactgctccaaggacgccaacgataccctgctgctccagctgaccaacaccagcgcctactacatgtacttgttgctgctgctgaagtccgtggtgtacttcgccatcatcacatgctgcctgctgcggagaaccgccttctgctgcaacggcgagaagtctagggccaagcgatctggatctggagcaacaaacttctcactactcaaacaagcaggtgacgtggaggagaatcccgggcctactagtatggactggatttggcgcatccttttccttgtcggcgctgctaccggcgcgcattccgggccccaggttcagctgcaagagtctggcggaggacttgctcaagctggcggaagcctgagactgtcttgtgccgcctctggcagaaccttcagcatgggctggtttagacaggcccctggcaaagagagagagttcgtcgccgccatcacatacagcggcggcagcccttactacgcctcttctgtcagaggccggttcaccatcagccgggacaacgccaagaacaccgtgtacctccagatgaacagcctgaagccagaggacaccgccgtgtactactgtgccgccaatccaacctacggcagcgactggaatgccgagaattggggccagggcacccaagtgacagtgtctagtacgcgtgcctctacaaagggaccctccgtgtttcctctggctcccagcagcaagtctacaagcggaggaacagccgctctgggctgcctggtcaaggattactttcccgagcctgtgaccgtgtcctggaatagcggagcactgacaagcggcgtgcacacctttccagccgtgctgcaaagcagcggcctgtactctctgagcagcgtggtcacagtgcctagctctagcctgggcacccagacctacatctgcaatgtgaaccacaagcctagcaacaccaaggtggacaagagagtggaacccaagagctgtgaagtgaaaaccgactccaccgaccacgtgaagcccaaagagacagagaacaccaagcagcccagcaagagctgccacaagcccaaggccatcgtgcacaccgagaaagtgaacatgatgagcctgaccgtgctgggcctgcggatgctgttcgccaaaaccgtggccgtgaacttcctgctgaccgccaagctgttcttcctccgcgccaagagaagcggatctggcgtgaagcagaccctgaatttcgacctgctgaagctggctggcgacgtggaatccaacccaggcccttctagaggccatatgaccgagtacaagcccacggtgcgcctcgccacccgcgacgacgtccccagggccgtacgcaccctcgccgccgcgttcgccgactaccccgccacgcgccacaccgtcgatccggaccgccacatcgagcgggtcaccgagctgcaagaactcttcctcacgcgcgtcgggctcgacatcggcaaggtgtgggtcgcggacgacggcgccgcggtggcggtctggaccacgccggagagcgtcgaagcgggggcggtgttcgccgagatcggcccgcgcatggccgagttgagcggttcccggctggccgcgcagcaacagatggaaggcctcctggcgccgcaccggcccaaggagcccgcgtggttcctggccaccgtcggcgtctcgcccgaccaccagggcaagggtctgggcagcgccgtcgtgctccccggagtggaggcggccgagcgcgccggggtgcccgccttcctggagacctccgcgccccgcaacctccccttctacgagcggctcggcttcaccgtcaccgccgacgtcgaggtgcccgaaggaccgcgcacctggtgcatgacccgcaagcccggtgcctga

SEQ ID NO: 5143 - DNA, 2367 bp, Artificial Sequence
  Synthetic Polynucloetide
atggccttaccagtgaccgccttgctcctgccgctggccttgctgctccacgccgccaggccggaggttcagctgcttgagtctggcggaggactggttcaacctggcggaagcctgagactgtcttgtgccgccagcggcttcacctttagcagctacgccatgagctgggtccgacaggctcctggcaaaggactggaatgggtgtccagcatcagcggcagcggcgactacatctactacgccgatagcgtgaagggcagattcaccatcagccgggacatcagcaagaacaccctgtacctccagatgaacagcctgagagccgaggacaccgccgtgtactactgtgccaaagaaggcaccggcgctaacagcagcctggccgattatagaggccagggcacactggtcaccgtgtctagtggcggaggaagcggcggaggatctcaggtccagctcgtcgagtccggcggcggcctcgtccaggccggcgactccgtcaccctctcctgcaccgcctccggccgcaccttctcctcctacgccctcgcctggttccgccagcgccccggcaaggagcgcgagttcgtcgccggcctccgctggggcggccccaccaactacgccgactccgtcaaggaccgcttcaccatctccggcgactccgccaagcacaccatgtacctccagatgaactccctcaagcccgaggacaccgccgtctactactgcggctacaaccccggcggctgggccgtcccctcccagtacgagtacgactcctggggccagggcacccaggtcaccgtctcctccctcgagggacagcctaaggccaatcctaccgtgacactgttccctccaagcagcgaagaactccaggccaacaaggccacacttgtgtgcctgatctccgacttctaccctggggctgtgacagtggcttggaaggccgatggatctcctgtgaaagccggcgtggaaaccaccaagccatccaagcagagcaacaacaaatacgccgccagctcctacctgagcctgacacctgagcagtggaagtcccacagatcctacagctgccaagtgacccacgaaggcagcaccgtggaaaagacagtggcccctacagagtgcagccccatcaagaccgatgtgattacaatggaccccaaggacaactgctccaaggacgccaacgataccctgctgctccagctgaccaacaccagcgcctactacatgtacttgttgctgctgctgaagtccgtggtgtacttcgccatcatcacatgctgcctgctgcggagaaccgccttctgctgcaacggcgagaagtctagggccaagcgatctggatctggagcaacaaacttctcactactcaaacaagcaggtgacgtggaggagaatcccgggcctactagtatggactggatttggcgcatccttttccttgtcggcgctgctaccggcgcgcattccgggccccaggttcagctgcaagagtctggcggaggacttgctcaagctggcggaagcctgagactgtcttgtgccgcctctggcagaaccttcagcatgggctggtttagacaggcccctggcaaagagagagagttcgtcgccgccatcacatacagcggcggcagcccttactacgcctcttctgtcagaggccggttcaccatcagccgggacaacgccaagaacaccgtgtacctccagatgaacagcctgaagccagaggacaccgccgtgtactactgtgccgccaatccaacctacggcagcgactggaatgccgagaattggggccagggcacccaagtgacagtgtctagtacgcgtgcctctacaaagggaccctccgtgtttcctctggctcccagcagcaagtctacaagcggaggaacagccgctctgggctgcctggtcaaggattactttcccgagcctgtgaccgtgtcctggaatagcggagcactgacaagcggcgtgcacacctttccagccgtgctgcaaagcagcggcctgtactctctgagcagcgtggtcacagtgcctagctctagcctgggcacccagacctacatctgcaatgtgaaccacaagcctagcaacaccaaggtggacaagagagtggaacccaagagctgtgaagtgaaaaccgactccaccgaccacgtgaagcccaaagagacagagaacaccaagcagcccagcaagagctgccacaagcccaaggccatcgtgcacaccgagaaagtgaacatgatgagcctgaccgtgctgggcctgcggatgctgttcgccaaaaccgtggccgtgaacttcctgctgaccgccaagctgttcttcctc

SEQ ID NO: 5144 - DNA, 2454 bp, Artificial Sequence
  Synthetic Polynucloetide
atggccttaccagtgaccgccttgctcctgccgctggccttgctgctccacgccgccaggccggaggttcagctgcttgagtctggcggaggactggttcaacctggcggaagcctgagactgtcttgtgccgccagcggcttcacctttagcagctacgccatgagctgggtccgacaggctcctggcaaaggactggaatgggtgtccagcatcagcggcagcggcgactacatctactacgccgatagcgtgaagggcagattcaccatcagccgggacatcagcaagaacaccctgtacctccagatgaacagcctgagagccgaggacaccgccgtgtactactgtgccaaagaaggcaccggcgctaacagcagcctggccgattatagaggccagggcacactggtcaccgtgtctagtggcggaggaagcggcggaggatctcaggtccagctcgtcgagtccggcggcggcctcgtccaggccggcgactccgtcaccctctcctgcaccgcctccggccgcaccttctcctcctacgccctcgcctggttccgccagcgccccggcaaggagcgcgagttcgtcgccggcctccgctggggcggccccaccaactacgccgactccgtcaaggaccgcttcaccatctccggcgactccgccaagcacaccatgtacctccagatgaactccctcaagcccgaggacaccgccgtctactactgcggctacaaccccggcggctgggccgtcccctcccagtacgagtacgactcctggggccagggcacccaggtcaccgtctcctccctcgagggatctcccatcaagaccgatgtgattacaatggaccccaaggacaactgctccaaggacgccaacgataccctgctgctccagctgaccaacaccagcgcctactacatgtacttgttgctgctgctgaagtccgtggtgtacttcgccatcatcacatgctgcctgctgcggagaaccgccttctgctgcaacggcgagaagtctagggccaagcgatctggatctggagcaacaaacttctcactactcaaacaagcaggtgacgtggaggagaatcccgggcctactagtatggactggatttggcgcatccttttccttgtcggcgctgctaccggcgcgcattccgggccccaggttcagctgcaagagtctggcggaggacttgctcaagctggcggaagcctgagactgtcttgtgccgcctctggcagaaccttcagcatgggctggtttagacaggcccctggcaaagagagagagttcgtcgccgccatcacatacagcggcggcagcccttactacgcctcttctgtcagaggccggttcaccatcagccgggacaacgccaagaacaccgtgtacctccagatgaacagcctgaagccagaggacaccgccgtgtactactgtgccgccaatccaacctacggcagcgactggaatgccgagaattggggccagggcacccaagtgacagtgtctagtacgcgtggcagcgaagtgaaaaccgactccaccgaccacgtgaagcccaaagagacagagaacaccaagcagcccagcaagagctgccacaagcccaaggccatcgtgcacaccgagaaagtgaacatgatgagcctgaccgtgctgggcctgcggatgctgttcgccaaaaccgtggccgtgaacttcctgctgaccgccaagctgttcttcctccgcgccaagagaagcggatctggcgtgaagcagaccctgaatttcgacctgctgaagctggctggcgacgtggaatccaacccaggcccttctagaggccatatgaccgagtacaagcccacggtgcgcctcgccacccgcgacgacgtccccagggccgtacgcaccctcgccgccgcgttcgccgactaccccgccacgcgccacaccgtcgatccggaccgccacatcgagcgggtcaccgagctgcaagaactcttcctcacgcgcgtcgggctcgacatcggcaaggtgtgggtcgcggacgacggcgccgcggtggcggtctggaccacgccggagagcgtcgaagcgggggcggtgttcgccgagatcggcccgcgcatggccgagttgagcggttcccggctggccgcgcagcaacagatggaaggcctcctggcgccgcaccggcccaaggagcccgcgtggttcctggccaccgtcggcgtctcgcccgaccaccagggcaagggtctgggcagcgccgtcgtgctccccggagtggaggcggccgagcgcgccggggtgcccgccttcctggagacctccgcgccccgcaacctccccttctacgagcggctcggcttcaccgtcaccgccgacgtcgaggtgcccgaaggaccgcgcacctggtgcatgacccgcaagcccggtgcctga

SEQ ID NO: 5145 - DNA, 1752 bp, Artificial Sequence
  Synthetic Polynucloetide
atggccttaccagtgaccgccttgctcctgccgctggccttgctgctccacgccgccaggccggaggttcagctgcttgagtctggcggaggactggttcaacctggcggaagcctgagactgtcttgtgccgccagcggcttcacctttagcagctacgccatgagctgggtccgacaggctcctggcaaaggactggaatgggtgtccagcatcagcggcagcggcgactacatctactacgccgatagcgtgaagggcagattcaccatcagccgggacatcagcaagaacaccctgtacctccagatgaacagcctgagagccgaggacaccgccgtgtactactgtgccaaagaaggcaccggcgctaacagcagcctggccgattatagaggccagggcacactggtcaccgtgtctagtggcggaggaagcggcggaggatctcaggtccagctcgtcgagtccggcggcggcctcgtccaggccggcgactccgtcaccctctcctgcaccgcctccggccgcaccttctcctcctacgccctcgcctggttccgccagcgccccggcaaggagcgcgagttcgtcgccggcctccgctggggcggccccaccaactacgccgactccgtcaaggaccgcttcaccatctccggcgactccgccaagcacaccatgtacctccagatgaactccctcaagcccgaggacaccgccgtctactactgcggctacaaccccggcggctgggccgtcccctcccagtacgagtacgactcctggggccagggcacccaggtcaccgtctcctccctcgagggatctcccatcaagaccgatgtgattacaatggaccccaaggacaactgctccaaggacgccaacgataccctgctgctccagctgaccaacaccagcgcctactacatgtacttgttgctgctgctgaagtccgtggtgtacttcgccatcatcacatgctgcctgctgcggagaaccgccttctgctgcaacggcgagaagtctagggccaagcgatctggatctggagcaacaaacttctcactactcaaacaagcaggtgacgtggaggagaatcccgggcctactagtatggactggatttggcgcatccttttccttgtcggcgctgctaccggcgcgcattccgggccccaggttcagctgcaagagtctggcggaggacttgctcaagctggcggaagcctgagactgtcttgtgccgcctctggcagaaccttcagcatgggctggtttagacaggcccctggcaaagagagagagttcgtcgccgccatcacatacagcggcggcagcccttactacgcctcttctgtcagaggccggttcaccatcagccgggacaacgccaagaacaccgtgtacctccagatgaacagcctgaagccagaggacaccgccgtgtactactgtgccgccaatccaacctacggcagcgactggaatgccgagaattggggccagggcacccaagtgacagtgtctagtacgcgtggcagcgaagtgaaaaccgactccaccgaccacgtgaagcccaaagagacagagaacaccaagcagcccagcaagagctgccacaagcccaaggccatcgtgcacaccgagaaagtgaacatgatgagcctgaccgtgctgggcctgcggatgctgttcgccaaaaccgtggccgtgaacttcctgctgaccgccaagctgttcttcctc

SEQ ID NO: 5146 - DNA, 2481 bp, Artificial Sequence
  Synthetic Polynucloetide
atggccttaccagtgaccgccttgctcctgccgctggccttgctgctccacgccgccaggccggaggttcagctgcttgagtctggcggaggactggttcaacctggcggaagcctgagactgtcttgtgccgccagcggcttcacctttagcagctacgccatgagctgggtccgacaggctcctggcaaaggactggaatgggtgtccagcatcagcggcagcggcgactacatctactacgccgatagcgtgaagggcagattcaccatcagccgggacatcagcaagaacaccctgtacctccagatgaacagcctgagagccgaggacaccgccgtgtactactgtgccaaagaaggcaccggcgctaacagcagcctggccgattatagaggccagggcacactggtcaccgtgtctagtggcggaggaagcggcggaggatctcaggtccagctcgtcgagtccggcggcggcctcgtccaggccggcgactccgtcaccctctcctgcaccgcctccggccgcaccttctcctcctacgccctcgcctggttccgccagcgccccggcaaggagcgcgagttcgtcgccggcctccgctggggcggccccaccaactacgccgactccgtcaaggaccgcttcaccatctccggcgactccgccaagcacaccatgtacctccagatgaactccctcaagcccgaggacaccgccgtctactactgcggctacaaccccggcggctgggccgtcccctcccagtacgagtacgactcctggggccagggcacccaggtcaccgtctcctccctcgaggacaaaactcacacatgcccaccgtgcccagcacccatcaagaccgatgtgattacaatggaccccaaggacaactgctccaaggacgccaacgataccctgctgctccagctgaccaacaccagcgcctactacatgtacttgttgctgctgctgaagtccgtggtgtacttcgccatcatcacatgctgcctgctgcggagaaccgccttctgctgcaacggcgagaagtctagggccaagcgatctggatctggagcaacaaacttctcactactcaaacaagcaggtgacgtggaggagaatcccgggcctactagtatggactggatttggcgcatccttttccttgtcggcgctgctaccggcgcgcattccgggccccaggttcagctgcaagagtctggcggaggacttgctcaagctggcggaagcctgagactgtcttgtgccgcctctggcagaaccttcagcatgggctggtttagacaggcccctggcaaagagagagagttcgtcgccgccatcacatacagcggcggcagcccttactacgcctcttctgtcagaggccggttcaccatcagccgggacaacgccaagaacaccgtgtacctccagatgaacagcctgaagccagaggacaccgccgtgtactactgtgccgccaatccaacctacggcagcgactggaatgccgagaattggggccagggcacccaagtgacagtgtctagtacgcgtggcagcgaagtgaaaaccgactccaccgaccacgtgaagcccaaagagacagagaacaccaagcagcccagcaagagctgccacaagcccaaggccatcgtgcacaccgagaaagtgaacatgatgagcctgaccgtgctgggcctgcggatgctgttcgccaaaaccgtggccgtgaacttcctgctgaccgccaagctgttcttcctccgcgccaagagaagcggatctggcgtgaagcagaccctgaatttcgacctgctgaagctggctggcgacgtggaatccaacccaggcccttctagaggccatatgaccgagtacaagcccacggtgcgcctcgccacccgcgacgacgtccccagggccgtacgcaccctcgccgccgcgttcgccgactaccccgccacgcgccacaccgtcgatccggaccgccacatcgagcgggtcaccgagctgcaagaactcttcctcacgcgcgtcgggctcgacatcggcaaggtgtgggtcgcggacgacggcgccgcggtggcggtctggaccacgccggagagcgtcgaagcgggggcggtgttcgccgagatcggcccgcgcatggccgagttgagcggttcccggctggccgcgcagcaacagatggaaggcctcctggcgccgcaccggcccaaggagcccgcgtggttcctggccaccgtcggcgtctcgcccgaccaccagggcaagggtctgggcagcgccgtcgtgctccccggagtggaggcggccgagcgcgccggggtgcccgccttcctggagacctccgcgccccgcaacctccccttctacgagcggctcggcttcaccgtcaccgccgacgtcgaggtgcccgaaggaccgcgcacctggtgcatgacccgcaagcccggtgcctga

SEQ ID NO: 5147 - DNA, 2481 bp, Artificial Sequence
  Synthetic Polynucloetide
atggccttaccagtgaccgccttgctcctgccgctggccttgctgctccacgccgccaggccggaggttcagctgcttgagtctggcggaggactggttcaacctggcggaagcctgagactgtcttgtgccgccagcggcttcacctttagcagctacgccatgagctgggtccgacaggctcctggcaaaggactggaatgggtgtccagcatcagcggcagcggcgactacatctactacgccgatagcgtgaagggcagattcaccatcagccgggacatcagcaagaacaccctgtacctccagatgaacagcctgagagccgaggacaccgccgtgtactactgtgccaaagaaggcaccggcgctaacagcagcctggccgattatagaggccagggcacactggtcaccgtgtctagtggcggaggaagcggcggaggatctcaggtccagctcgtcgagtccggcggcggcctcgtccaggccggcgactccgtcaccctctcctgcaccgcctccggccgcaccttctcctcctacgccctcgcctggttccgccagcgccccggcaaggagcgcgagttcgtcgccggcctccgctggggcggccccaccaactacgccgactccgtcaaggaccgcttcaccatctccggcgactccgccaagcacaccatgtacctccagatgaactccctcaagcccgaggacaccgccgtctactactgcggctacaaccccggcggctgggccgtcccctcccagtacgagtacgactcctggggccagggcacccaggtcaccgtctcctccctcgagggatctcccatcaagaccgatgtgattacaatggaccccaaggacaactgctccaaggacgccaacgataccctgctgctccagctgaccaacaccagcgcctactacatgtacttgttgctgctgctgaagtccgtggtgtacttcgccatcatcacatgctgcctgctgcggagaaccgccttctgctgcaacggcgagaagtctagggccaagcgatctggatctggagcaacaaacttctcactactcaaacaagcaggtgacgtggaggagaatcccgggcctactagtatggactggatttggcgcatccttttccttgtcggcgctgctaccggcgcgcattccgggccccaggttcagctgcaagagtctggcggaggacttgctcaagctggcggaagcctgagactgtcttgtgccgcctctggcagaaccttcagcatgggctggtttagacaggcccctggcaaagagagagagttcgtcgccgccatcacatacagcggcggcagcccttactacgcctcttctgtcagaggccggttcaccatcagccgggacaacgccaagaacaccgtgtacctccagatgaacagcctgaagccagaggacaccgccgtgtactactgtgccgccaatccaacctacggcagcgactggaatgccgagaattggggccagggcacccaagtgacagtgtctagtacgcgtgataaaactcatacctgtccgccatgcccggcagaagtgaaaaccgactccaccgaccacgtgaagcccaaagagacagagaacaccaagcagcccagcaagagctgccacaagcccaaggccatcgtgcacaccgagaaagtgaacatgatgagcctgaccgtgctgggcctgcggatgctgttcgccaaaaccgtggccgtgaacttcctgctgaccgccaagctgttcttcctccgcgccaagagaagcggatctggcgtgaagcagaccctgaatttcgacctgctgaagctggctggcgacgtggaatccaacccaggcccttctagaggccatatgaccgagtacaagcccacggtgcgcctcgccacccgcgacgacgtccccagggccgtacgcaccctcgccgccgcgttcgccgactaccccgccacgcgccacaccgtcgatccggaccgccacatcgagcgggtcaccgagctgcaagaactcttcctcacgcgcgtcgggctcgacatcggcaaggtgtgggtcgcggacgacggcgccgcggtggcggtctggaccacgccggagagcgtcgaagcgggggcggtgttcgccgagatcggcccgcgcatggccgagttgagcggttcccggctggccgcgcagcaacagatggaaggcctcctggcgccgcaccggcccaaggagcccgcgtggttcctggccaccgtcggcgtctcgcccgaccaccagggcaagggtctgggcagcgccgtcgtgctccccggagtggaggcggccgagcgcgccggggtgcccgccttcctggagacctccgcgccccgcaacctccccttctacgagcggctcggcttcaccgtcaccgccgacgtcgaggtgcccgaaggaccgcgcacctggtgcatgacccgcaagcccggtgcctga

SEQ ID NO: 5148 - DNA, 2508 bp, Artificial Sequence
  Synthetic Polynucloetide
atggccttaccagtgaccgccttgctcctgccgctggccttgctgctccacgccgccaggccggaggttcagctgcttgagtctggcggaggactggttcaacctggcggaagcctgagactgtcttgtgccgccagcggcttcacctttagcagctacgccatgagctgggtccgacaggctcctggcaaaggactggaatgggtgtccagcatcagcggcagcggcgactacatctactacgccgatagcgtgaagggcagattcaccatcagccgggacatcagcaagaacaccctgtacctccagatgaacagcctgagagccgaggacaccgccgtgtactactgtgccaaagaaggcaccggcgctaacagcagcctggccgattatagaggccagggcacactggtcaccgtgtctagtggcggaggaagcggcggaggatctcaggtccagctcgtcgagtccggcggcggcctcgtccaggccggcgactccgtcaccctctcctgcaccgcctccggccgcaccttctcctcctacgccctcgcctggttccgccagcgccccggcaaggagcgcgagttcgtcgccggcctccgctggggcggccccaccaactacgccgactccgtcaaggaccgcttcaccatctccggcgactccgccaagcacaccatgtacctccagatgaactccctcaagcccgaggacaccgccgtctactactgcggctacaaccccggcggctgggccgtcccctcccagtacgagtacgactcctggggccagggcacccaggtcaccgtctcctccctcgaggacaaaactcacacatgcccaccgtgcccagcacccatcaagaccgatgtgattacaatggaccccaaggacaactgctccaaggacgccaacgataccctgctgctccagctgaccaacaccagcgcctactacatgtacttgttgctgctgctgaagtccgtggtgtacttcgccatcatcacatgctgcctgctgcggagaaccgccttctgctgcaacggcgagaagtctagggccaagcgatctggatctggagcaacaaacttctcactactcaaacaagcaggtgacgtggaggagaatcccgggcctactagtatggactggatttggcgcatccttttccttgtcggcgctgctaccggcgcgcattccgggccccaggttcagctgcaagagtctggcggaggacttgctcaagctggcggaagcctgagactgtcttgtgccgcctctggcagaaccttcagcatgggctggtttagacaggcccctggcaaagagagagagttcgtcgccgccatcacatacagcggcggcagcccttactacgcctcttctgtcagaggccggttcaccatcagccgggacaacgccaagaacaccgtgtacctccagatgaacagcctgaagccagaggacaccgccgtgtactactgtgccgccaatccaacctacggcagcgactggaatgccgagaattggggccagggcacccaagtgacagtgtctagtacgcgtgataaaactcatacctgtccgccatgcccggcagaagtgaaaaccgactccaccgaccacgtgaagcccaaagagacagagaacaccaagcagcccagcaagagctgccacaagcccaaggccatcgtgcacaccgagaaagtgaacatgatgagcctgaccgtgctgggcctgcggatgctgttcgccaaaaccgtggccgtgaacttcctgctgaccgccaagctgttcttcctccgcgccaagagaagcggatctggcgtgaagcagaccctgaatttcgacctgctgaagctggctggcgacgtggaatccaacccaggcccttctagaggccatatgaccgagtacaagcccacggtgcgcctcgccacccgcgacgacgtccccagggccgtacgcaccctcgccgccgcgttcgccgactaccccgccacgcgccacaccgtcgatccggaccgccacatcgagcgggtcaccgagctgcaagaactcttcctcacgcgcgtcgggctcgacatcggcaaggtgtgggtcgcggacgacggcgccgcggtggcggtctggaccacgccggagagcgtcgaagcgggggcggtgttcgccgagatcggcccgcgcatggccgagttgagcggttcccggctggccgcgcagcaacagatggaaggcctcctggcgccgcaccggcccaaggagcccgcgtggttcctggccaccgtcggcgtctcgcccgaccaccagggcaagggtctgggcagcgccgtcgtgctccccggagtggaggcggccgagcgcgccggggtgcccgccttcctggagacctccgcgccccgcaacctccccttctacgagcggctcggcttcaccgtcaccgccgacgtcgaggtgcccgaaggaccgcgcacctggtgcatgacccgcaagcccggtgcctga

SEQ ID NO: 5149 - DNA, 1806 bp, Artificial Sequence
  Synthetic Polynucloetide
atggccttaccagtgaccgccttgctcctgccgctggccttgctgctccacgccgccaggccggaggttcagctgcttgagtctggcggaggactggttcaacctggcggaagcctgagactgtcttgtgccgccagcggcttcacctttagcagctacgccatgagctgggtccgacaggctcctggcaaaggactggaatgggtgtccagcatcagcggcagcggcgactacatctactacgccgatagcgtgaagggcagattcaccatcagccgggacatcagcaagaacaccctgtacctccagatgaacagcctgagagccgaggacaccgccgtgtactactgtgccaaagaaggcaccggcgctaacagcagcctggccgattatagaggccagggcacactggtcaccgtgtctagtggcggaggaagcggcggaggatctcaggtccagctcgtcgagtccggcggcggcctcgtccaggccggcgactccgtcaccctctcctgcaccgcctccggccgcaccttctcctcctacgccctcgcctggttccgccagcgccccggcaaggagcgcgagttcgtcgccggcctccgctggggcggccccaccaactacgccgactccgtcaaggaccgcttcaccatctccggcgactccgccaagcacaccatgtacctccagatgaactccctcaagcccgaggacaccgccgtctactactgcggctacaaccccggcggctgggccgtcccctcccagtacgagtacgactcctggggccagggcacccaggtcaccgtctcctccctcgaggacaaaactcacacatgcccaccgtgcccagcacccatcaagaccgatgtgattacaatggaccccaaggacaactgctccaaggacgccaacgataccctgctgctccagctgaccaacaccagcgcctactacatgtacttgttgctgctgctgaagtccgtggtgtacttcgccatcatcacatgctgcctgctgcggagaaccgccttctgctgcaacggcgagaagtctagggccaagcgatctggatctggagcaacaaacttctcactactcaaacaagcaggtgacgtggaggagaatcccgggcctactagtatggactggatttggcgcatccttttccttgtcggcgctgctaccggcgcgcattccgggccccaggttcagctgcaagagtctggcggaggacttgctcaagctggcggaagcctgagactgtcttgtgccgcctctggcagaaccttcagcatgggctggtttagacaggcccctggcaaagagagagagttcgtcgccgccatcacatacagcggcggcagcccttactacgcctcttctgtcagaggccggttcaccatcagccgggacaacgccaagaacaccgtgtacctccagatgaacagcctgaagccagaggacaccgccgtgtactactgtgccgccaatccaacctacggcagcgactggaatgccgagaattggggccagggcacccaagtgacagtgtctagtacgcgtgataaaactcatacctgtccgccatgcccggcagaagtgaaaaccgactccaccgaccacgtgaagcccaaagagacagagaacaccaagcagcccagcaagagctgccacaagcccaaggccatcgtgcacaccgagaaagtgaacatgatgagcctgaccgtgctgggcctgcggatgctgttcgccaaaaccgtggccgtgaacttcctgctgaccgccaagctgttcttcctc

SEQ ID NO: 5150 - DNA, 1779 bp, Artificial Sequence
  Synthetic Polynucloetide
atggccttaccagtgaccgccttgctcctgccgctggccttgctgctccacgccgccaggccggaggttcagctgcttgagtctggcggaggactggttcaacctggcggaagcctgagactgtcttgtgccgccagcggcttcacctttagcagctacgccatgagctgggtccgacaggctcctggcaaaggactggaatgggtgtccagcatcagcggcagcggcgactacatctactacgccgatagcgtgaagggcagattcaccatcagccgggacatcagcaagaacaccctgtacctccagatgaacagcctgagagccgaggacaccgccgtgtactactgtgccaaagaaggcaccggcgctaacagcagcctggccgattatagaggccagggcacactggtcaccgtgtctagtggcggaggaagcggcggaggatctcaggtccagctcgtcgagtccggcggcggcctcgtccaggccggcgactccgtcaccctctcctgcaccgcctccggccgcaccttctcctcctacgccctcgcctggttccgccagcgccccggcaaggagcgcgagttcgtcgccggcctccgctggggcggccccaccaactacgccgactccgtcaaggaccgcttcaccatctccggcgactccgccaagcacaccatgtacctccagatgaactccctcaagcccgaggacaccgccgtctactactgcggctacaaccccggcggctgggccgtcccctcccagtacgagtacgactcctggggccagggcacccaggtcaccgtctcctccctcgagggatctcccatcaagaccgatgtgattacaatggaccccaaggacaactgctccaaggacgccaacgataccctgctgctccagctgaccaacaccagcgcctactacatgtacttgttgctgctgctgaagtccgtggtgtacttcgccatcatcacatgctgcctgctgcggagaaccgccttctgctgcaacggcgagaagtctagggccaagcgatctggatctggagcaacaaacttctcactactcaaacaagcaggtgacgtggaggagaatcccgggcctactagtatggactggatttggcgcatccttttccttgtcggcgctgctaccggcgcgcattccgggccccaggttcagctgcaagagtctggcggaggacttgctcaagctggcggaagcctgagactgtcttgtgccgcctctggcagaaccttcagcatgggctggtttagacaggcccctggcaaagagagagagttcgtcgccgccatcacatacagcggcggcagcccttactacgcctcttctgtcagaggccggttcaccatcagccgggacaacgccaagaacaccgtgtacctccagatgaacagcctgaagccagaggacaccgccgtgtactactgtgccgccaatccaacctacggcagcgactggaatgccgagaattggggccagggcacccaagtgacagtgtctagtacgcgtgataaaactcatacctgtccgccatgcccggcagaagtgaaaaccgactccaccgaccacgtgaagcccaaagagacagagaacaccaagcagcccagcaagagctgccacaagcccaaggccatcgtgcacaccgagaaagtgaacatgatgagcctgaccgtgctgggcctgcggatgctgttcgccaaaaccgtggccgtgaacttcctgctgaccgccaagctgttcttcctc

SEQ ID NO: 5151 - DNA, 2430 bp, Artificial Sequence
  Synthetic Polynucloetide
atggccttaccagtgaccgccttgctcctgccgctggccttgctgctccacgccgccaggccggaggttcagctgcttgagtctggcggaggactggttcaacctggcggaagcctgagactgtcttgtgccgccagcggcttcacctttagcagctacgccatgagctgggtccgacaggctcctggcaaaggactggaatgggtgtccagcatcagcggcagcggcgactacatctactacgccgatagcgtgaagggcagattcaccatcagccgggacatcagcaagaacaccctgtacctccagatgaacagcctgagagccgaggacaccgccgtgtactactgtgccaaagaaggcaccggcgctaacagcagcctggccgattatagaggccagggcacactggtcaccgtgtctagtggcggaggaagcggcggaggatctcaggtccagctcgtcgagtccggcggcggcctcgtccaggccggcgactccgtcaccctctcctgcaccgcctccggccgcaccttctcctcctacgccctcgcctggttccgccagcgccccggcaaggagcgcgagttcgtcgccggcctccgctggggcggccccaccaactacgccgactccgtcaaggaccgcttcaccatctccggcgactccgccaagcacaccatgtacctccagatgaactccctcaagcccgaggacaccgccgtctactactgcggctacaaccccggcggctgggccgtcccctcccagtacgagtacgactcctggggccagggcacccaggtcaccgtctcctccctcgagggatctatggaccccaaggacaactgctccaaggacgccaacgataccctgctgctccagctgaccaacaccagcgcctactacatgtacttgttgctgctgctgaagtccgtggtgtacttcgccatcatcacatgctgcctgctgcggagaaccgccttctgctgcaacggcgagaagtctagggccaagcgatctggatctggagcaacaaacttctcactactcaaacaagcaggtgacgtggaggagaatcccgggcctactagtatggactggatttggcgcatccttttccttgtcggcgctgctaccggcgcgcattccgggccccaggttcagctgcaagagtctggcggaggacttgctcaagctggcggaagcctgagactgtcttgtgccgcctctggcagaaccttcagcatgggctggtttagacaggcccctggcaaagagagagagttcgtcgccgccatcacatacagcggcggcagcccttactacgcctcttctgtcagaggccggttcaccatcagccgggacaacgccaagaacaccgtgtacctccagatgaacagcctgaagccagaggacaccgccgtgtactactgtgccgccaatccaacctacggcagcgactggaatgccgagaattggggccagggcacccaagtgacagtgtctagtacgcgtggcagcgaagtgaaaaccgactccaccgaccacgtgaagcccaaagagacagagaacaccaagcagcccagcaagagctgccacaagcccaaggccatcgtgcacaccgagaaagtgaacatgatgagcctgaccgtgctgggcctgcggatgctgttcgccaaaaccgtggccgtgaacttcctgctgaccgccaagctgttcttcctccgcgccaagagaagcggatctggcgtgaagcagaccctgaatttcgacctgctgaagctggctggcgacgtggaatccaacccaggcccttctagaggccatatgaccgagtacaagcccacggtgcgcctcgccacccgcgacgacgtccccagggccgtacgcaccctcgccgccgcgttcgccgactaccccgccacgcgccacaccgtcgatccggaccgccacatcgagcgggtcaccgagctgcaagaactcttcctcacgcgcgtcgggctcgacatcggcaaggtgtgggtcgcggacgacggcgccgcggtggcggtctggaccacgccggagagcgtcgaagcgggggcggtgttcgccgagatcggcccgcgcatggccgagttgagcggttcccggctggccgcgcagcaacagatggaaggcctcctggcgccgcaccggcccaaggagcccgcgtggttcctggccaccgtcggcgtctcgcccgaccaccagggcaagggtctgggcagcgccgtcgtgctccccggagtggaggcggccgagcgcgccggggtgcccgccttcctggagacctccgcgccccgcaacctccccttctacgagcggctcggcttcaccgtcaccgccgacgtcgaggtgcccgaaggaccgcgcacctggtgcatgacccgcaagcccggtgcctga

SEQ ID NO: 5152 - DNA, 2433 bp, Artificial Sequence
  Synthetic Polynucloetide
atggccttaccagtgaccgccttgctcctgccgctggccttgctgctccacgccgccaggccggaggttcagctgcttgagtctggcggaggactggttcaacctggcggaagcctgagactgtcttgtgccgccagcggcttcacctttagcagctacgccatgagctgggtccgacaggctcctggcaaaggactggaatgggtgtccagcatcagcggcagcggcgactacatctactacgccgatagcgtgaagggcagattcaccatcagccgggacatcagcaagaacaccctgtacctccagatgaacagcctgagagccgaggacaccgccgtgtactactgtgccaaagaaggcaccggcgctaacagcagcctggccgattatagaggccagggcacactggtcaccgtgtctagtggcggaggaagcggcggaggatctcaggtccagctcgtcgagtccggcggcggcctcgtccaggccggcgactccgtcaccctctcctgcaccgcctccggccgcaccttctcctcctacgccctcgcctggttccgccagcgccccggcaaggagcgcgagttcgtcgccggcctccgctggggcggccccaccaactacgccgactccgtcaaggaccgcttcaccatctccggcgactccgccaagcacaccatgtacctccagatgaactccctcaagcccgaggacaccgccgtctactactgcggctacaaccccggcggctgggccgtcccctcccagtacgagtacgactcctggggccagggcacccaggtcaccgtctcctccctcgagggatctcccatcaagaccgatgtgattacaatggaccccaaggacaactgctccaaggacgccaacgataccctgctgctccagctgaccaacaccagcgcctactacatgtacttgttgctgctgctgaagtccgtggtgtacttcgccatcatcacatgctgcctgctgcggagaaccgccttctgctgcaacggcgagaagtctagggccaagcgatctggatctggagcaacaaacttctcactactcaaacaagcaggtgacgtggaggagaatcccgggcctactagtatggactggatttggcgcatccttttccttgtcggcgctgctaccggcgcgcattccgggccccaggttcagctgcaagagtctggcggaggacttgctcaagctggcggaagcctgagactgtcttgtgccgcctctggcagaaccttcagcatgggctggtttagacaggcccctggcaaagagagagagttcgtcgccgccatcacatacagcggcggcagcccttactacgcctcttctgtcagaggccggttcaccatcagccgggacaacgccaagaacaccgtgtacctccagatgaacagcctgaagccagaggacaccgccgtgtactactgtgccgccaatccaacctacggcagcgactggaatgccgagaattggggccagggcacccaagtgacagtgtctagtacgcgtggcagcgaccacgtgaagcccaaagagacagagaacaccaagcagcccagcaagagctgccacaagcccaaggccatcgtgcacaccgagaaagtgaacatgatgagcctgaccgtgctgggcctgcggatgctgttcgccaaaaccgtggccgtgaacttcctgctgaccgccaagctgttcttcctccgcgccaagagaagcggatctggcgtgaagcagaccctgaatttcgacctgctgaagctggctggcgacgtggaatccaacccaggcccttctagaggccatatgaccgagtacaagcccacggtgcgcctcgccacccgcgacgacgtccccagggccgtacgcaccctcgccgccgcgttcgccgactaccccgccacgcgccacaccgtcgatccggaccgccacatcgagcgggtcaccgagctgcaagaactcttcctcacgcgcgtcgggctcgacatcggcaaggtgtgggtcgcggacgacggcgccgcggtggcggtctggaccacgccggagagcgtcgaagcgggggcggtgttcgccgagatcggcccgcgcatggccgagttgagcggttcccggctggccgcgcagcaacagatggaaggcctcctggcgccgcaccggcccaaggagcccgcgtggttcctggccaccgtcggcgtctcgcccgaccaccagggcaagggtctgggcagcgccgtcgtgctccccggagtggaggcggccgagcgcgccggggtgcccgccttcctggagacctccgcgccccgcaacctccccttctacgagcggctcggcttcaccgtcaccgccgacgtcgaggtgcccgaaggaccgcgcacctggtgcatgacccgcaagcccggtgcctga

SEQ ID NO: 5153 - DNA, 1302 bp, Artificial Sequence
  Synthetic Polynucloetide
atggccttaccagtgaccgccttgctcctgccgctggccttgctgctccacgccgccaggccggaggttcagctgcttgagtctggcggaggactggttcaacctggcggaagcctgagactgtcttgtgccgccagcggcttcacctttagcagctacgccatgagctgggtccgacaggctcctggcaaaggactggaatgggtgtccagcatcagcggcagcggcgactacatctactacgccgatagcgtgaagggcagattcaccatcagccgggacatcagcaagaacaccctgtacctccagatgaacagcctgagagccgaggacaccgccgtgtactactgtgccaaagaaggcaccggcgctaacagcagcctggccgattatagaggccagggcacactggtcaccgtgtctagtggcggaggaagcggcggaggatctcaggtccagctcgtcgagtccggcggcggcctcgtccaggccggcgactccgtcaccctctcctgcaccgcctccggccgcaccttctcctcctacgccctcgcctggttccgccagcgccccggcaaggagcgcgagttcgtcgccggcctccgctggggcggccccaccaactacgccgactccgtcaaggaccgcttcaccatctccggcgactccgccaagcacaccatgtacctccagatgaactccctcaagcccgaggacaccgccgtctactactgcggctacaaccccggcggctgggccgtcccctcccagtacgagtacgactcctggggccagggcacccaggtcaccgtctcctccctcgagggacagcctaaggccaatcctaccgtgacactgttccctccaagcagcgaagaactccaggccaacaaggccacacttgtgtgcctgatctccgacttctaccctggggctgtgacagtggcttggaaggccgatggatctcctgtgaaagccggcgtggaaaccaccaagccatccaagcagagcaacaacaaatacgccgccagctcctacctgagcctgacacctgagcagtggaagtcccacagatcctacagctgccaagtgacccacgaaggcagcaccgtggaaaagacagtggcccctacagagtgcagcggcagagccgattgcggctttaccagcgagagctaccagcagggcgtgctgagcgccaccatcctgtacgagatcctgctgggcaaggccaccctgtacgccgtgctggtgtctgccctggtgctgatggctatggtcaagcggaaggacagccgggga

SEQ ID NO: 5154 - DNA, 1344 bp, Artificial Sequence
  Synthetic Polynucloetide
atggccttaccagtgaccgccttgctcctgccgctggccttgctgctccacgccgccaggccggaggttcagctgcttgagtctggcggaggactggttcaacctggcggaagcctgagactgtcttgtgccgccagcggcttcacctttagcagctacgccatgagctgggtccgacaggctcctggcaaaggactggaatgggtgtccagcatcagcggcagcggcgactacatctactacgccgatagcgtgaagggcagattcaccatcagccgggacatcagcaagaacaccctgtacctccagatgaacagcctgagagccgaggacaccgccgtgtactactgtgccaaagaaggcaccggcgctaacagcagcctggccgattatagaggccagggcacactggtcaccgtgtctagtggcggaggaagcggcggaggatctcaggtccagctcgtcgagtccggcggcggcctcgtccaggccggcgactccgtcaccctctcctgcaccgcctccggccgcaccttctcctcctacgccctcgcctggttccgccagcgccccggcaaggagcgcgagttcgtcgccggcctccgctggggcggccccaccaactacgccgactccgtcaaggaccgcttcaccatctccggcgactccgccaagcacaccatgtacctccagatgaactccctcaagcccgaggacaccgccgtctactactgcggctacaaccccggcggctgggccgtcccctcccagtacgagtacgactcctggggccagggcacccaggtcaccgtctcctccctcgagggacagcctaaggccaatcctaccgtgacactgttccctccaagcagcgaagaactccaggccaacaaggccacacttgtgtgcctgatctccgacttctaccctggggctgtgacagtggcttggaaggccgatggatctcctgtgaaagccggcgtggaaaccaccaagccatccaagcagagcaacaacaaatacgccgccagctcctacctgagcctgacacctgagcagtggaagtcccacagatcctacagctgccaagtgacccacgaaggcagcaccgtggaaaagacagtggcccctacagagtgcagccccatcaagaccgatgtgattacaatggaccccaaggacaactgctccaaggacgccaacgataccctgctgctccagctgaccaacaccagcgcctactacatgtacttgttgctgctgctgaagtccgtggtgtacttcgccatcatcacatgctgcctgctgcggagaaccgccttctgctgcaacggcgagaagtct

SEQ ID NO: 5155 - DNA, 2304 bp, Artificial Sequence
  Synthetic Polynucloetide
atggactggatttggcgcatccttttccttgtcggcgctgctaccggcgcccattcccagctccagttgcaagagagcggccctggcttggtaaaaccttccgagacccttagcctcacatgcacggttagtgggggcagcatttcctcaggtgattactattggggatggattcggcaacccccgggtaaaggattggagtggattggtcatatttattatagtggagcgacgtactacaacccaagtctcaaatccagggttacaatatccgtcgatacgagcaggaaccaattcagcttgaaactttctagtgtcaccgcagcagacacagccgtctattactgtacgcgggatgactccagtaattggcggtcccgagggcaagggacactggtcacggtctcctcatctggaggcggtggaagcggtggaggaggatctcaggttcagctgcaagagtctggcggaggacttgctcaagctggcggaagcctgagactgtcttgtgccgcctctggcagaaccttcagcatgggctggtttagacaggcccctggcaaagagagagagttcgtcgccgccatcacatacagcggcggcagcccttactacgcctcttctgtcagaggccggttcaccatcagccgggacaacgccaagaacaccgtgtacctccagatgaacagcctgaagccagaggacaccgccgtgtactactgtgccgccaatccaacctacggcagcgactggaatgccgagaattggggccagggcacccaagtgacagtgtctagtggatccggcggcggaggatctggcggaggcggatctgggggcggaggctctttcgaacaagttcagcttcaacagcctggcgctgagctggtcaaacctggcgcttctgtgaagatgagctgcaaagccagcggctacgccttcagcagctactggatcaactggatgaagcagaaacccggccagggactcgaatggatcggccaaatctatcccggcgacggcgacaccaactacaacggcaagttcaagggcagagccacactgaccgccgatacctctagcagcacagcctacatgcagctgagcagcctgaccagcgaagatagcgccgtgtacttctgtgcccggtccatcacaacagtcgtgggctgcgctatggactattggggccagggaacaagcgtgaccgtgtctagtggcggaggcggaagtggaggcggaggatctggcggcggaggctctgacatccagatgacacagagccctagcagcctgtctgccagcgtgggagacagagtgaccatcacatgcaaggccagcgaccacatcaacaactggctggcctggtatcagcagaagcctggacaggcccctaagctgctgatctacggcgctaccacactggaaacaggcgtgcccagcagattttctggcagcggctctggcaccgactacaccctgacaatatccagcctccagcctgaggacttcgccacctactactgtcagcagagctggaacaccccttggacattcggccagggcaccaagctggaaatcaagagaacgcgtgagcagaaactgatctcggaagaggatctggcgaagcccaccacgacgccagcgccgcgaccaccaacaccggcgcccaccatcgcgtcgcagcccctgtccctgcgcccagaggcgtgccggccagcggcggggggcgcagtgcacacgagggggctggacttcgcctgtgacatctacatctgggcgcccttggccgggacttgtggggtccttctcctgtcactggttatcaccctttactgcaaacggggcagaaagaaactcctgtatatattcaaacaaccatttatgagaccagtacaaactactcaagaggaagatggctgtagctgccgatttccagaagaagaagaaggaggatgtgaactgagagtgaagttcagcaggagcgcagacgcccccgcgtaccagcagggccagaaccagctctataacgagctgaatctaggacgaagagaggagtacgatgttttggacaagagacgtggccgggaccctgagatggggggaaagccgagaaggaagaaccctcaggaaggcctgtacaatgaactgcagaaagataagatggcggaggcctacagtgagattgggatgaaaggcgagcgccggaggggcaaggggcacgatggcctttaccagggtctcagtacagccaccaaggacacctacgacgcccttcacatgcaggccctgccccctcgctga

SEQ ID NO: 5156 - DNA, 3363 bp, Artificial Sequence
  Synthetic Polynucloetide
atggccttaccagtgaccgccttgctcctgccgctggccttgctgctccacgccgccaggccggacatccagatgacacagagccctagcagcctgtctgccagcgtgggagacagagtgaccatcacatgcaaggccagcgaccacatcaacaactggctggcctggtatcagcagaagcctggacaggcccctaagctgctgatctacggcgctaccacactggaaacaggcgtgcccagcagattttctggcagcggctctggcaccgactacaccctgacaatatccagcctccagcctgaggacttcgccacctactactgtcagcagagctggaacaccccttggacattcggccagggcaccaagctggaaatcaagagactcgagatccagaaccctgatcctgccgtgtaccagctgcgggatagcaagagcagcgacaagagcgtgtgtctgttcaccgacttcgacagccagaccaacgtgtcccagagcaaggactccgacgtgtacatcaccgataagtgcgtgctggacatgcggagcatggacttcaagagcaactccgccgtggcctggtccaacaagtccgatttcgcctgcgccaacgccttcaacaacagcattatccccgaggacacattcttcccaagcagcgacgtgccctgcgacgtgaagctggtggaaaagagcttcgagacagacaccaacctgaacttccagaacctgagcgtgatcggcttcagaatcctgctgctgaaagtggccggctttaacctgctgatgaccctgcggctgtggtccagccgcgccaagagaagcggatctggcgtgaagcagaccctgaatttcgacctgctgaagctggctggcgacgtggaatccaacccaggccctactagtatggactggatttggcgcatccttttccttgtcggcgctgctaccggcgcccattcccagctccagttgcaagagagcggccctggcttggtaaaaccttccgagacccttagcctcacatgcacggttagtgggggcagcatttcctcaggtgattactattggggatggattcggcaacccccgggtaaaggattggagtggattggtcatatttattatagtggagcgacgtactacaacccaagtctcaaatccagggttacaatatccgtcgatacgagcaggaaccaattcagcttgaaactttctagtgtcaccgcagcagacacagccgtctattactgtacgcgggatgactccagtaattggcggtcccgagggcaagggacactggtcacggtctcctcatctggaggcggtggaagcggtggaggaggatctcaggttcagctgcaagagtctggcggaggacttgctcaagctggcggaagcctgagactgtcttgtgccgcctctggcagaaccttcagcatgggctggtttagacaggcccctggcaaagagagagagttcgtcgccgccatcacatacagcggcggcagcccttactacgcctcttctgtcagaggccggttcaccatcagccgggacaacgccaagaacaccgtgtacctccagatgaacagcctgaagccagaggacaccgccgtgtactactgtgccgccaatccaacctacggcagcgactggaatgccgagaattggggccagggcacccaagtgacagtgtctagtggatccggcggcggaggatctggcggaggcggatctgggggcggaggctctttcgaacaagttcagcttcaacagcctggcgctgagctggtcaaacctggcgcttctgtgaagatgagctgcaaagccagcggctacgccttcagcagctactggatcaactggatgaagcagaaacccggccagggactcgaatggatcggccaaatctatcccggcgacggcgacaccaactacaacggcaagttcaagggcagagccacactgaccgccgatacctctagcagcacagcctacatgcagctgagcagcctgaccagcgaagatagcgccgtgtacttctgtgcccggtccatcacaacagtcgtgggctgcgctatggactattggggccagggaacaagcgtgaccgtgtctagtacgcgtgaggacctgaagaacgtgttcccacctgaggtggccgtgttcgagcctagcaaggccgagatcgcccacacccagaaagccaccctcgtgtgcctggctaccggcttctaccccgaccatgtggaactgtcttggtgggtcaacggcaaagaggtgcacagcggcgtgtgtaccgacccccagccactgaaagaacagcccgccctgaacgacagccggtactgcctgagcagcagactgagagtgtccgccaccttctggcagaacccccggaaccacttcagatgccaggtgcagttctacggcctgagcgagaacgacgagtggacccaggacagagccaagcccgtgacccagatcgtgtctgccgaagcctggggcagagccgattgcggcatcaccagcgccagctaccaccagggcgtgctgagcgccaccatcctgtacgagatcctgctgggcaaggccaccctgtacgccgtgctggtgtctgccctggtgctgatggctatggtcaagcggaaggacagccggggaagggccaagcgatctggatctggagcaacaaacttctcactactcaaacaagcaggtgacgtggaggagaatcccgggccttctagaggccatatgaccgagtacaagcccacggtgcgcctcgccacccgcgacgacgtccccagggccgtacgcaccctcgccgccgcgttcgccgactaccccgccacgcgccacaccgtcgatccggaccgccacatcgagcgggtcaccgagctgcaagaactcttcctcacgcgcgtcgggctcgacatcggcaaggtgtgggtcgcggacgacggcgccgcggtggcggtctggaccacgccggagagcgtcgaagcgggggcggtgttcgccgagatcggcccgcgcatggccgagttgagcggttcccggctggccgcgcagcaacagatggaaggcctcctggcgccgcaccggcccaaggagcccgcgtggttcctggccaccgtcggcgtctcgcccgaccaccagggcaagggtctgggcagcgccgtcgtgctccccggagtggaggcggccgagcgcgccggggtgcccgccttcctggagacctccgcgccccgcaacctccccttctacgagcggctcggcttcaccgtcaccgccgacgtcgaggtgcccgaaggaccgcgcacctggtgcatgacccgcaagcccggtgcctga

SEQ ID NO: 5157 - DNA, 3360 bp, Artificial Sequence
  Synthetic Polynucloetide
atggccttaccagtgaccgccttgctcctgccgctggccttgctgctccacgccgccaggccggacatccagatgacacagagccctagcagcctgtctgccagcgtgggagacagagtgaccatcacatgcaaggccagcgaccacatcaacaactggctggcctggtatcagcagaagcctggacaggcccctaagctgctgatctacggcgctaccacactggaaacaggcgtgcccagcagattttctggcagcggctctggcaccgactacaccctgacaatatccagcctccagcctgaggacttcgccacctactactgtcagcagagctggaacaccccttggacattcggccagggcaccaagctggaaatcaagagactcgaggacctgaagaacgtgttcccacctgaggtggccgtgttcgagcctagcaaggccgagatcgcccacacccagaaagccaccctcgtgtgcctggctaccggcttctaccccgaccatgtggaactgtcttggtgggtcaacggcaaagaggtgcacagcggcgtgtgtaccgacccccagccactgaaagaacagcccgccctgaacgacagccggtactgcctgagcagcagactgagagtgtccgccaccttctggcagaacccccggaaccacttcagatgccaggtgcagttctacggcctgagcgagaacgacgagtggacccaggacagagccaagcccgtgacccagatcgtgtctgccgaagcctggggcagagccgattgcggcatcaccagcgccagctaccaccagggcgtgctgagcgccaccatcctgtacgagatcctgctgggcaaggccaccctgtacgccgtgctggtgtctgccctggtgctgatggctatggtcaagcggaaggacagccggggaagggccaagcgatctggatctggagcaacaaacttctcactactcaaacaagcaggtgacgtggaggagaatcccgggcctactagtatggactggatttggcgcatccttttccttgtcggcgctgctaccggcgcccattcccagctccagttgcaagagagcggccctggcttggtaaaaccttccgagacccttagcctcacatgcacggttagtgggggcagcatttcctcaggtgattactattggggatggattcggcaacccccgggtaaaggattggagtggattggtcatatttattatagtggagcgacgtactacaacccaagtctcaaatccagggttacaatatccgtcgatacgagcaggaaccaattcagcttgaaactttctagtgtcaccgcagcagacacagccgtctattactgtacgcgggatgactccagtaattggcggtcccgagggcaagggacactggtcacggtctcctcatctggaggcggtggaagcggtggaggaggatctcaggttcagctgcaagagtctggcggaggacttgctcaagctggcggaagcctgagactgtcttgtgccgcctctggcagaaccttcagcatgggctggtttagacaggcccctggcaaagagagagagttcgtcgccgccatcacatacagcggcggcagcccttactacgcctcttctgtcagaggccggttcaccatcagccgggacaacgccaagaacaccgtgtacctccagatgaacagcctgaagccagaggacaccgccgtgtactactgtgccgccaatccaacctacggcagcgactggaatgccgagaattggggccagggcacccaagtgacagtgtctagtggatccggcggcggaggatctggcggaggcggatctgggggcggaggctctttcgaacaagttcagcttcaacagcctggcgctgagctggtcaaacctggcgcttctgtgaagatgagctgcaaagccagcggctacgccttcagcagctactggatcaactggatgaagcagaaacccggccagggactcgaatggatcggccaaatctatcccggcgacggcgacaccaactacaacggcaagttcaagggcagagccacactgaccgccgatacctctagcagcacagcctacatgcagctgagcagcctgaccagcgaagatagcgccgtgtacttctgtgcccggtccatcacaacagtcgtgggctgcgctatggactattggggccagggaacaagcgtgaccgtgtctagtacgcgtatccagaaccctgatcctgccgtgtaccagctgcgggatagcaagagcagcgacaagagcgtgtgtctgttcaccgacttcgacagccagaccaacgtgtcccagagcaaggactccgacgtgtacatcaccgataagtgcgtgctggacatgcggagcatggacttcaagagcaactccgccgtggcctggtccaacaagtccgatttcgcctgcgccaacgccttcaacaacagcattatccccgaggacacattcttcccaagcagcgacgtgccctgcgacgtgaagctggtggaaaagagcttcgagacagacaccaacctgaacttccagaacctgagcgtgatcggcttcagaatcctgctgctgaaagtggccggctttaacctgctgatgaccctgcggctgtggtccagccgcgccaagagaagcggatctggcgtgaagcagaccctgaatttcgacctgctgaagctggctggcgacgtggaatccaacccaggcccttctagaggccatatgaccgagtacaagcccacggtgcgcctcgccacccgcgacgacgtccccagggccgtacgcaccctcgccgccgcgttcgccgactaccccgccacgcgccacaccgtcgatccggaccgccacatcgagcgggtcaccgagctgcaagaactcttcctcacgcgcgtcgggctcgacatcggcaaggtgtgggtcgcggacgacggcgccgcggtggcggtctggaccacgccggagagcgtcgaagcgggggcggtgttcgccgagatcggcccgcgcatggccgagttgagcggttcccggctggccgcgcagcaacagatggaaggcctcctggcgccgcaccggcccaaggagcccgcgtggttcctggccaccgtcggcgtctcgcccgaccaccagggcaagggtctgggcagcgccgtcgtgctccccggagtggaggcggccgagcgcgccggggtgcccgccttcctggagacctccgcgccccgcaacctccccttctacgagcggctcggcttcaccgtcaccgccgacgtcgaggtgcccgaaggaccgcgcacctggtgcatgacccgcaagcccggtgcctga

SEQ ID NO: 5158 - DNA, 3360 bp, Artificial Sequence
  Synthetic Polynucloetide
atggccttaccagtgaccgccttgctcctgccgctggccttgctgctccacgccgccaggccggacatccagatgacacagagccctagcagcctgtctgccagcgtgggagacagagtgaccatcacatgcaaggccagcgaccacatcaacaactggctggcctggtatcagcagaagcctggacaggcccctaagctgctgatctacggcgctaccacactggaaacaggcgtgcccagcagattttctggcagcggctctggcaccgactacaccctgacaatatccagcctccagcctgaggacttcgccacctactactgtcagcagagctggaacaccccttggacattcggccagggcaccaagctggaaatcaagagactcgaggacctgaagaacgtgttcccacctgaggtggccgtgttcgagcctagcgaggccgagatcagccacacccagaaagccaccctcgtgtgcctggctaccggcttctaccccgaccatgtggaactgtcttggtgggtcaacggcaaagaggtgcacagcggcgtgtgtaccgacccccagccactgaaagaacagcccgccctgaacgacagccggtactgcctgagcagcagactgagagtgtccgccaccttctggcagaacccccggaaccacttcagatgccaggtgcagttctacggcctgagcgagaacgacgagtggacccaggacagagccaagcccgtgacccagatcgtgtctgccgaagcctggggcagagccgattgcggctttaccagcgagagctaccagcagggcgtgctgagcgccaccatcctgtacgagatcctgctgggcaaggccaccctgtacgccgtgctggtgtctgccctggtgctgatggctatggtcaagcggaaggacagccggggaagggccaagcgatctggatctggagcaacaaacttctcactactcaaacaagcaggtgacgtggaggagaatcccgggcctactagtatggactggatttggcgcatccttttccttgtcggcgctgctaccggcgcccattcccagctccagttgcaagagagcggccctggcttggtaaaaccttccgagacccttagcctcacatgcacggttagtgggggcagcatttcctcaggtgattactattggggatggattcggcaacccccgggtaaaggattggagtggattggtcatatttattatagtggagcgacgtactacaacccaagtctcaaatccagggttacaatatccgtcgatacgagcaggaaccaattcagcttgaaactttctagtgtcaccgcagcagacacagccgtctattactgtacgcgggatgactccagtaattggcggtcccgagggcaagggacactggtcacggtctcctcatctggaggcggtggaagcggtggaggaggatctcaggttcagctgcaagagtctggcggaggacttgctcaagctggcggaagcctgagactgtcttgtgccgcctctggcagaaccttcagcatgggctggtttagacaggcccctggcaaagagagagagttcgtcgccgccatcacatacagcggcggcagcccttactacgcctcttctgtcagaggccggttcaccatcagccgggacaacgccaagaacaccgtgtacctccagatgaacagcctgaagccagaggacaccgccgtgtactactgtgccgccaatccaacctacggcagcgactggaatgccgagaattggggccagggcacccaagtgacagtgtctagtggatccggcggcggaggatctggcggaggcggatctgggggcggaggctctttcgaacaagttcagcttcaacagcctggcgctgagctggtcaaacctggcgcttctgtgaagatgagctgcaaagccagcggctacgccttcagcagctactggatcaactggatgaagcagaaacccggccagggactcgaatggatcggccaaatctatcccggcgacggcgacaccaactacaacggcaagttcaagggcagagccacactgaccgccgatacctctagcagcacagcctacatgcagctgagcagcctgaccagcgaagatagcgccgtgtacttctgtgcccggtccatcacaacagtcgtgggctgcgctatggactattggggccagggaacaagcgtgaccgtgtctagtacgcgtatccagaaccctgatcctgccgtgtaccagctgcgggatagcaagagcagcgacaagagcgtgtgtctgttcaccgacttcgacagccagaccaacgtgtcccagagcaaggactccgacgtgtacatcaccgataagtgcgtgctggacatgcggagcatggacttcaagagcaactccgccgtggcctggtccaacaagtccgatttcgcctgcgccaacgccttcaacaacagcattatccccgaggacacattcttcccaagccccgagagcagctgcgacgtgaagctggtggaaaagagcttcgagacagacaccaacctgaacttccagaacctgagcgtgatcggcttcagaatcctgctgctgaaagtggccggctttaacctgctgatgaccctgcggctgtggtccagccgcgccaagagaagcggatctggcgtgaagcagaccctgaatttcgacctgctgaagctggctggcgacgtggaatccaacccaggcccttctagaggccatatgaccgagtacaagcccacggtgcgcctcgccacccgcgacgacgtccccagggccgtacgcaccctcgccgccgcgttcgccgactaccccgccacgcgccacaccgtcgatccggaccgccacatcgagcgggtcaccgagctgcaagaactcttcctcacgcgcgtcgggctcgacatcggcaaggtgtgggtcgcggacgacggcgccgcggtggcggtctggaccacgccggagagcgtcgaagcgggggcggtgttcgccgagatcggcccgcgcatggccgagttgagcggttcccggctggccgcgcagcaacagatggaaggcctcctggcgccgcaccggcccaaggagcccgcgtggttcctggccaccgtcggcgtctcgcccgaccaccagggcaagggtctgggcagcgccgtcgtgctccccggagtggaggcggccgagcgcgccggggtgcccgccttcctggagacctccgcgccccgcaacctccccttctacgagcggctcggcttcaccgtcaccgccgacgtcgaggtgcccgaaggaccgcgcacctggtgcatgacccgcaagcccggtgcctga

SEQ ID NO: 5159 - DNA, 2658 bp, Artificial Sequence
  Synthetic Polynucloetide
atggccttaccagtgaccgccttgctcctgccgctggccttgctgctccacgccgccaggccggacatccagatgacacagagccctagcagcctgtctgccagcgtgggagacagagtgaccatcacatgcaaggccagcgaccacatcaacaactggctggcctggtatcagcagaagcctggacaggcccctaagctgctgatctacggcgctaccacactggaaacaggcgtgcccagcagattttctggcagcggctctggcaccgactacaccctgacaatatccagcctccagcctgaggacttcgccacctactactgtcagcagagctggaacaccccttggacattcggccagggcaccaagctggaaatcaagagactcgaggacctgaagaacgtgttcccacctgaggtggccgtgttcgagcctagcgaggccgagatcagccacacccagaaagccaccctcgtgtgcctggctaccggcttctaccccgaccatgtggaactgtcttggtgggtcaacggcaaagaggtgcacagcggcgtgtgtaccgacccccagccactgaaagaacagcccgccctgaacgacagccggtactgcctgagcagcagactgagagtgtccgccaccttctggcagaacccccggaaccacttcagatgccaggtgcagttctacggcctgagcgagaacgacgagtggacccaggacagagccaagcccgtgacccagatcgtgtctgccgaagcctggggcagagccgattgcggctttaccagcgagagctaccagcagggcgtgctgagcgccaccatcctgtacgagatcctgctgggcaaggccaccctgtacgccgtgctggtgtctgccctggtgctgatggctatggtcaagcggaaggacagccggggaagggccaagcgatctggatctggagcaacaaacttctcactactcaaacaagcaggtgacgtggaggagaatcccgggcctactagtatggactggatttggcgcatccttttccttgtcggcgctgctaccggcgcccattcccagctccagttgcaagagagcggccctggcttggtaaaaccttccgagacccttagcctcacatgcacggttagtgggggcagcatttcctcaggtgattactattggggatggattcggcaacccccgggtaaaggattggagtggattggtcatatttattatagtggagcgacgtactacaacccaagtctcaaatccagggttacaatatccgtcgatacgagcaggaaccaattcagcttgaaactttctagtgtcaccgcagcagacacagccgtctattactgtacgcgggatgactccagtaattggcggtcccgagggcaagggacactggtcacggtctcctcatctggaggcggtggaagcggtggaggaggatctcaggttcagctgcaagagtctggcggaggacttgctcaagctggcggaagcctgagactgtcttgtgccgcctctggcagaaccttcagcatgggctggtttagacaggcccctggcaaagagagagagttcgtcgccgccatcacatacagcggcggcagcccttactacgcctcttctgtcagaggccggttcaccatcagccgggacaacgccaagaacaccgtgtacctccagatgaacagcctgaagccagaggacaccgccgtgtactactgtgccgccaatccaacctacggcagcgactggaatgccgagaattggggccagggcacccaagtgacagtgtctagtggatccggcggcggaggatctggcggaggcggatctgggggcggaggctctttcgaacaagttcagcttcaacagcctggcgctgagctggtcaaacctggcgcttctgtgaagatgagctgcaaagccagcggctacgccttcagcagctactggatcaactggatgaagcagaaacccggccagggactcgaatggatcggccaaatctatcccggcgacggcgacaccaactacaacggcaagttcaagggcagagccacactgaccgccgatacctctagcagcacagcctacatgcagctgagcagcctgaccagcgaagatagcgccgtgtacttctgtgcccggtccatcacaacagtcgtgggctgcgctatggactattggggccagggaacaagcgtgaccgtgtctagtacgcgtatccagaaccctgatcctgccgtgtaccagctgcgggatagcaagagcagcgacaagagcgtgtgtctgttcaccgacttcgacagccagaccaacgtgtcccagagcaaggactccgacgtgtacatcaccgataagtgcgtgctggacatgcggagcatggacttcaagagcaactccgccgtggcctggtccaacaagtccgatttcgcctgcgccaacgccttcaacaacagcattatccccgaggacacattcttcccaagccccgagagcagctgcgacgtgaagctggtggaaaagagcttcgagacagacaccaacctgaacttccagaacctgagcgtgatcggcttcagaatcctgctgctgaaagtggccggctttaacctgctgatgaccctgcggctgtggtccagc

SEQ ID NO: 5160 - DNA, 3333 bp, Artificial Sequence
  Synthetic Polynucloetide
atggccttaccagtgaccgccttgctcctgccgctggccttgctgctccacgccgccaggccggacatccagatgacacagagccctagcagcctgtctgccagcgtgggagacagagtgaccatcacatgcaaggccagcgaccacatcaacaactggctggcctggtatcagcagaagcctggacaggcccctaagctgctgatctacggcgctaccacactggaaacaggcgtgcccagcagattttctggcagcggctctggcaccgactacaccctgacaatatccagcctccagcctgaggacttcgccacctactactgtcagcagagctggaacaccccttggacattcggccagggcaccaagctggaaatcaagagactcgaggacctgaagaacgtgttcccacctgaggtggccgtgttcgagcctagcgaggccgagatcagccacacccagaaagccaccctcgtgtgcctggctaccggcttctaccccgaccatgtggaactgtcttggtgggtcaacggcaaagaggtgcacagcggcgtgtgtaccgacccccagccactgaaagaacagcccgccctgaacgacagccggtactgcctgagcagcagactgagagtgtccgccaccttctggcagaacccccggaaccacttcagatgccaggtgcagttctacggcctgagcgagaacgacgagtggacccaggacagagccaagcccgtgacccagatcgtgtctgccgaagcctggggcagagccgattgcggctttaccagcgagagctaccagcagggcgtgctgagcgccaccatcctgtacgagatcctgctgggcaaggccaccctgtacgccgtgctggtgtctgccctggtgctgatggctatggtcaagcggaaggacagccggggaagggccaagcgatctggatctggagcaacaaacttctcactactcaaacaagcaggtgacgtggaggagaatcccgggcctactagtatggactggatttggcgcatccttttccttgtcggcgctgctaccggcgcccattcccagctccagttgcaagagagcggccctggcttggtaaaaccttccgagacccttagcctcacatgcacggttagtgggggcagcatttcctcaggtgattactattggggatggattcggcaacccccgggtaaaggattggagtggattggtcatatttattatagtggagcgacgtactacaacccaagtctcaaatccagggttacaatatccgtcgatacgagcaggaaccaattcagcttgaaactttctagtgtcaccgcagcagacacagccgtctattactgtacgcgggatgactccagtaattggcggtcccgagggcaagggacactggtcacggtctcctcatctggaggcggtggaagcggtggaggaggatctcaggttcagctgcaagagtctggcggaggacttgctcaagctggcggaagcctgagactgtcttgtgccgcctctggcagaaccttcagcatgggctggtttagacaggcccctggcaaagagagagagttcgtcgccgccatcacatacagcggcggcagcccttactacgcctcttctgtcagaggccggttcaccatcagccgggacaacgccaagaacaccgtgtacctccagatgaacagcctgaagccagaggacaccgccgtgtactactgtgccgccaatccaacctacggcagcgactggaatgccgagaattggggccagggcacccaagtgacagtgtctagtggatccggcggcggaggatctggcggaggcggatctgggggcggaggctctttcgaacaagttcagcttcaacagcctggcgctgagctggtcaaacctggcgcttctgtgaagatgagctgcaaagccagcggctacgccttcagcagctactggatcaactggatgaagcagaaacccggccagggactcgaatggatcggccaaatctatcccggcgacggcgacaccaactacaacggcaagttcaagggcagagccacactgaccgccgatacctctagcagcacagcctacatgcagctgagcagcctgaccagcgaagatagcgccgtgtacttctgtgcccggtccatcacaacagtcgtgggctgcgctatggactattggggccagggaacaagcgtgaccgtgtctagtacgcgtatccagaaccctgatcctgccgtgtaccagctgcgggatagcaagagcagcgacaagagcgtgtgtctgttcaccgacttcgacagccagaccaacgtgtcccagagcaaggactccgacgtgtacatcaccgataagtgcgtgctggacatgcggagcatggacttcaagagcaactccgccgtggcctggtccaacaagtccgatttcgcctgcgccaacgccttcaacaacagcattatccccgaggacacattcttcccaagccccgagagcagctgcgacgtgaagctggtggaaaagagcttcgagacagacaccaacctgaacttccagaacctgagcgtgatcggcttcagaatcctgctgctgaaagtggccggctttaacctgctgatgaccctgcggctgtggtccagccgcgccaagagaagcggatctggcgtgaagcagaccctgaatttcgacctgctgaagctggctggcgacgtggaatccaacccaggcccttctagaggcgggatccacaccatggctacctacgaggtgctgtgcgaggtggcaagaaagctgggcaccgacgacagagaagtggtgctgttcctgctgaacgtgttcatccctcagcctacactggcccagctgatcggtgcactgagagccctgaaagaggaaggccggctgacctttcctctgctggccgaatgcctgttcagagccggaagaagggatctgctgcgggacctgctgcatctggaccccagatttctggaaagacacctggccggcaccatgagctacttcagcccttaccagctgaccgtgctgcacgttgacggcgaactgtgcgccagagatattcggagcctgatcttcctgagcaaggacaccatcggcagccggtctacccctcagacatttctgcactgggtgtactgcatggaaaacctggacctgctcggccccacagatgtggatgccctgatgtccatgctgagaagcctgagcagagtggacctccagagacaggtgcagacactgatgggactgcacctgagcggacctagccacagccagcactacagacacacccct

SEQ ID NO: 5161 - DNA, 2670 bp, Artificial Sequence
  Synthetic Polynucloetide
atggccttaccagtgaccgccttgctcctgccgctggccttgctgctccacgccgccaggccggacatccagatgacacagagccctagcagcctgtctgccagcgtgggagacagagtgaccatcacatgcaaggccagcgaccacatcaacaactggctggcctggtatcagcagaagcctggacaggcccctaagctgctgatctacggcgctaccacactggaaacaggcgtgcccagcagattttctggcagcggctctggcaccgactacaccctgacaatatccagcctccagcctgaggacttcgccacctactactgtcagcagagctggaacaccccttggacattcggccagggcaccaagctggaaatcaagagactcgagatccagaaccctgatcctgccgtgtaccagctgcgggatagcaagagcagcgacaagagcgtgtgtctgttcaccgacttcgacagccagaccaacgtgtcccagagcaaggactccgacgtgtacatcaccgataagtgcgtgctggacatgcggagcatggacttcaagagcaactccgccgtggcctggtccaacaagtccgatttcgcctgcgccaacgccttcaacaacagcattatccccgaggacacattcttcccaagccccgagagcagctgcgacgtgaagctggtggaaaagagcttcgagacagacaccaacctgaacttccagaacctgagcgtgatcggcttcagaatcctgctgctgaaagtggccggctttaacctgctgatgaccctgcggctgtggtccagccgcgccaagagaagcggatctggcgtgaagcagaccctgaatttcgacctgctgaagctggctggcgacgtggaatccaacccaggccctactagtatggactggatttggcgcatccttttccttgtcggcgctgctaccggcgcccattcccagctccagttgcaagagagcggccctggcttggtaaaaccttccgagacccttagcctcacatgcacggttagtgggggcagcatttcctcaggtgattactattggggatggattcggcaacccccgggtaaaggattggagtggattggtcatatttattatagtggagcgacgtactacaacccaagtctcaaatccagggttacaatatccgtcgatacgagcaggaaccaattcagcttgaaactttctagtgtcaccgcagcagacacagccgtctattactgtacgcgggatgactccagtaattggcggtcccgagggcaagggacactggtcacggtctcctcatctggaggcggtggaagcggtggaggaggatctcaggttcagctgcaagagtctggcggaggacttgctcaagctggcggaagcctgagactgtcttgtgccgcctctggcagaaccttcagcatgggctggtttagacaggcccctggcaaagagagagagttcgtcgccgccatcacatacagcggcggcagcccttactacgcctcttctgtcagaggccggttcaccatcagccgggacaacgccaagaacaccgtgtacctccagatgaacagcctgaagccagaggacaccgccgtgtactactgtgccgccaatccaacctacggcagcgactggaatgccgagaattggggccagggcacccaagtgacagtgtctagtggatccggcggcggaggatctggcggaggcggatctgggggcggaggctctttcgaacaagttcagcttcaacagcctggcgctgagctggtcaaacctggcgcttctgtgaagatgagctgcaaagccagcggctacgccttcagcagctactggatcaactggatgaagcagaaacccggccagggactcgaatggatcggccaaatctatcccggcgacggcgacaccaactacaacggcaagttcaagggcagagccacactgaccgccgatacctctagcagcacagcctacatgcagctgagcagcctgaccagcgaagatagcgccgtgtacttctgtgcccggtccatcacaacagtcgtgggctgcgctatggactattggggccagggaacaagcgtgaccgtgtctagtacgcgtgaggacctgaagaacgtgttcccacctgaggtggccgtgttcgagcctagcgaggccgagatcagccacacccagaaagccaccctcgtgtgcctggctaccggcttctaccccgaccatgtggaactgtcttggtgggtcaacggcaaagaggtgcacagcggcgtgtgtaccgacccccagccactgaaagaacagcccgccctgaacgacagccggtactgcctgagcagcagactgagagtgtccgccaccttctggcagaacccccggaaccacttcagatgccaggtgcagttctacggcctgagcgagaacgacgagtggacccaggacagagccaagcccgtgacccagatcgtgtctgccgaagcctggggcagagccgattgcggctttaccagcgagagctaccagcagggcgtgctgagcgccaccatcctgtacgagatcctgctgggcaaggccaccctgtacgccgtgctggtgtctgccctggtgctgatggctatggtcaagcggaaggacagccgggga

SEQ ID NO: 5162 - DNA, 3336 bp, Artificial Sequence
  Synthetic Polynucloetide
atggccttaccagtgaccgccttgctcctgccgctggccttgctgctccacgccgccaggccggacatccagatgacacagagccctagcagcctgtctgccagcgtgggagacagagtgaccatcacatgcaaggccagcgaccacatcaacaactggctggcctggtatcagcagaagcctggacaggcccctaagctgctgatctacggcgctaccacactggaaacaggcgtgcccagcagattttctggcagcggctctggcaccgactacaccctgacaatatccagcctccagcctgaggacttcgccacctactactgtcagcagagctggaacaccccttggacattcggccagggcaccaagctggaaatcaagagactcgagatccagaaccctgatcctgccgtgtaccagctgcgggatagcaagagcagcgacaagagcgtgtgtctgttcaccgacttcgacagccagaccaacgtgtcccagagcaaggactccgacgtgtacatcaccgataagtgcgtgctggacatgcggagcatggacttcaagagcaactccgccgtggcctggtccaacaagtccgatttcgcctgcgccaacgccttcaacaacagcattatccccgaggacacattcttcccaagccccgagagcagctgcgacgtgaagctggtggaaaagagcttcgagacagacaccaacctgaacttccagaacctgagcgtgatcggcttcagaatcctgctgctgaaagtggccggctttaacctgctgatgaccctgcggctgtggtccagccgcgccaagagaagcggatctggcgtgaagcagaccctgaatttcgacctgctgaagctggctggcgacgtggaatccaacccaggccctactagtatggactggatttggcgcatccttttccttgtcggcgctgctaccggcgcccattcccagctccagttgcaagagagcggccctggcttggtaaaaccttccgagacccttagcctcacatgcacggttagtgggggcagcatttcctcaggtgattactattggggatggattcggcaacccccgggtaaaggattggagtggattggtcatatttattatagtggagcgacgtactacaacccaagtctcaaatccagggttacaatatccgtcgatacgagcaggaaccaattcagcttgaaactttctagtgtcaccgcagcagacacagccgtctattactgtacgcgggatgactccagtaattggcggtcccgagggcaagggacactggtcacggtctcctcatctggaggcggtggaagcggtggaggaggatctcaggttcagctgcaagagtctggcggaggacttgctcaagctggcggaagcctgagactgtcttgtgccgcctctggcagaaccttcagcatgggctggtttagacaggcccctggcaaagagagagagttcgtcgccgccatcacatacagcggcggcagcccttactacgcctcttctgtcagaggccggttcaccatcagccgggacaacgccaagaacaccgtgtacctccagatgaacagcctgaagccagaggacaccgccgtgtactactgtgccgccaatccaacctacggcagcgactggaatgccgagaattggggccagggcacccaagtgacagtgtctagtggatccggcggcggaggatctggcggaggcggatctgggggcggaggctctttcgaacaagttcagcttcaacagcctggcgctgagctggtcaaacctggcgcttctgtgaagatgagctgcaaagccagcggctacgccttcagcagctactggatcaactggatgaagcagaaacccggccagggactcgaatggatcggccaaatctatcccggcgacggcgacaccaactacaacggcaagttcaagggcagagccacactgaccgccgatacctctagcagcacagcctacatgcagctgagcagcctgaccagcgaagatagcgccgtgtacttctgtgcccggtccatcacaacagtcgtgggctgcgctatggactattggggccagggaacaagcgtgaccgtgtctagtacgcgtgaggacctgaagaacgtgttcccacctgaggtggccgtgttcgagcctagcgaggccgagatcagccacacccagaaagccaccctcgtgtgcctggctaccggcttctaccccgaccatgtggaactgtcttggtgggtcaacggcaaagaggtgcacagcggcgtgtgtaccgacccccagccactgaaagaacagcccgccctgaacgacagccggtactgcctgagcagcagactgagagtgtccgccaccttctggcagaacccccggaaccacttcagatgccaggtgcagttctacggcctgagcgagaacgacgagtggacccaggacagagccaagcccgtgacccagatcgtgtctgccgaagcctggggcagagccgattgcggctttaccagcgagagctaccagcagggcgtgctgagcgccaccatcctgtacgagatcctgctgggcaaggccaccctgtacgccgtgctggtgtctgccctggtgctgatggctatggtcaagcggaaggacagccggggaagggccaagcgatctggatctggagcaacaaacttctcactactcaaacaagcaggtgacgtggaggagaatcccgggccttctagaggcgggatccacaccatggctacctacgaggtgctgtgcgaggtggcaagaaagctgggcaccgacgacagagaagtggtgctgttcctgctgaacgtgttcatccctcagcctacactggcccagctgatcggtgcactgagagccctgaaagaggaaggccggctgacctttcctctgctggccgaatgcctgttcagagccggaagaagggatctgctgcgggacctgctgcatctggaccccagatttctggaaagacacctggccggcaccatgagctacttcagcccttaccagctgaccgtgctgcacgttgacggcgaactgtgcgccagagatattcggagcctgatcttcctgagcaaggacaccatcggcagccggtctacccctcagacatttctgcactgggtgtactgcatggaaaacctggacctgctcggccccacagatgtggatgccctgatgtccatgctgagaagcctgagcagagtggacctccagagacaggtgcagacactgatgggactgcacctgagcggacctagccacagccagcactacagacacacccct

SEQ ID NO: 5163 - DNA, 3360 bp, Artificial Sequence
  Synthetic Polynucloetide
atggccttaccagtgaccgccttgctcctgccgctggccttgctgctccacgccgccaggccggacatccagatgacacagagccctagcagcctgtctgccagcgtgggagacagagtgaccatcacatgcaaggccagcgaccacatcaacaactggctggcctggtatcagcagaagcctggacaggcccctaagctgctgatctacggcgctaccacactggaaacaggcgtgcccagcagattttctggcagcggctctggcaccgactacaccctgacaatatccagcctccagcctgaggacttcgccacctactactgtcagcagagctggaacaccccttggacattcggccagggcaccaagctggaaatcaagagactcgaggacctgaagaacgtgttcccacctgaggtggccgtgttcgagcctagcgaggccgagatcagccacacccagaaagccaccctcgtgtgcctggctaccggcttctaccccgaccatgtggaactgtcttggtgggtcaacggcaaagaggtgcacagcggcgtgtctaccgacccccagccactgaaagaacagcccgccctgaacgacagccggtactgcctgagcagcagactgagagtgtccgccaccttctggcagaacccccggaaccacttcagatgccaggtgcagttctacggcctgagcgagaacgacgagtggacccaggacagagccaagcccgtgacccagatcgtgtctgccgaagcctggggcagagccgattgcggctttaccagcgagagctaccagcagggcgtgctgagcgccaccatcctgtacgagatcctgctgggcaaggccaccctgtacgccgtgctggtgtctgccctggtgctgatggctatggtcaagcggaaggacagccggggaagggccaagcgatctggatctggagcaacaaacttctcactactcaaacaagcaggtgacgtggaggagaatcccgggcctactagtatggactggatttggcgcatccttttccttgtcggcgctgctaccggcgcccattcccagctccagttgcaagagagcggccctggcttggtaaaaccttccgagacccttagcctcacatgcacggttagtgggggcagcatttcctcaggtgattactattggggatggattcggcaacccccgggtaaaggattggagtggattggtcatatttattatagtggagcgacgtactacaacccaagtctcaaatccagggttacaatatccgtcgatacgagcaggaaccaattcagcttgaaactttctagtgtcaccgcagcagacacagccgtctattactgtacgcgggatgactccagtaattggcggtcccgagggcaagggacactggtcacggtctcctcatctggaggcggtggaagcggtggaggaggatctcaggttcagctgcaagagtctggcggaggacttgctcaagctggcggaagcctgagactgtcttgtgccgcctctggcagaaccttcagcatgggctggtttagacaggcccctggcaaagagagagagttcgtcgccgccatcacatacagcggcggcagcccttactacgcctcttctgtcagaggccggttcaccatcagccgggacaacgccaagaacaccgtgtacctccagatgaacagcctgaagccagaggacaccgccgtgtactactgtgccgccaatccaacctacggcagcgactggaatgccgagaattggggccagggcacccaagtgacagtgtctagtggatccggcggcggaggatctggcggaggcggatctgggggcggaggctctttcgaacaagttcagcttcaacagcctggcgctgagctggtcaaacctggcgcttctgtgaagatgagctgcaaagccagcggctacgccttcagcagctactggatcaactggatgaagcagaaacccggccagggactcgaatggatcggccaaatctatcccggcgacggcgacaccaactacaacggcaagttcaagggcagagccacactgaccgccgatacctctagcagcacagcctacatgcagctgagcagcctgaccagcgaagatagcgccgtgtacttctgtgcccggtccatcacaacagtcgtgggctgcgctatggactattggggccagggaacaagcgtgaccgtgtctagtacgcgtatccagaaccctgatcctgccgtgtaccagctgcgggatagcaagagcagcgacaagagcgtgtgtctgttcaccgacttcgacagccagaccaacgtgtcccagagcaaggactccgacgtgtacatcaccgataagaccgtgctggacatgcggagcatggacttcaagagcaactccgccgtggcctggtccaacaagtccgatttcgcctgcgccaacgccttcaacaacagcattatccccgaggacacattcttcccaagccccgagagcagctgcgacgtgaagctggtggaaaagagcttcgagacagacaccaacctgaacttccagaacctgagcgtgatcggcttcagaatcctgctgctgaaagtggccggctttaacctgctgatgaccctgcggctgtggtccagccgcgccaagagaagcggatctggcgtgaagcagaccctgaatttcgacctgctgaagctggctggcgacgtggaatccaacccaggcccttctagaggccatatgaccgagtacaagcccacggtgcgcctcgccacccgcgacgacgtccccagggccgtacgcaccctcgccgccgcgttcgccgactaccccgccacgcgccacaccgtcgatccggaccgccacatcgagcgggtcaccgagctgcaagaactcttcctcacgcgcgtcgggctcgacatcggcaaggtgtgggtcgcggacgacggcgccgcggtggcggtctggaccacgccggagagcgtcgaagcgggggcggtgttcgccgagatcggcccgcgcatggccgagttgagcggttcccggctggccgcgcagcaacagatggaaggcctcctggcgccgcaccggcccaaggagcccgcgtggttcctggccaccgtcggcgtctcgcccgaccaccagggcaagggtctgggcagcgccgtcgtgctccccggagtggaggcggccgagcgcgccggggtgcccgccttcctggagacctccgcgccccgcaacctccccttctacgagcggctcggcttcaccgtcaccgccgacgtcgaggtgcccgaaggaccgcgcacctggtgcatgacccgcaagcccggtgcctga

SEQ ID NO: 5164 - DNA, 3606 bp, Artificial Sequence
  Synthetic Polynucloetide
atggccttaccagtgaccgccttgctcctgccgctggccttgctgctccacgccgccaggccggacatccagatgacacagagccctagcagcctgtctgccagcgtgggagacagagtgaccatcacatgcaaggccagcgaccacatcaacaactggctggcctggtatcagcagaagcctggacaggcccctaagctgctgatctacggcgctaccacactggaaacaggcgtgcccagcagattttctggcagcggctctggcaccgactacaccctgacaatatccagcctccagcctgaggacttcgccacctactactgtcagcagagctggaacaccccttggacattcggccagggcaccaagctggaaatcaagagactcgaggacctgaagaacgtgttcccacctgaggtggccgtgttcgagcctagcgaggccgagatcagccacacccagaaagccaccctcgtgtgcctggctaccggcttctaccccgaccatgtggaactgtcttggtgggtcaacggcaaagaggtgcacagcggcgtgtctaccgacccccagccactgaaagaacagcccgccctgaacgacagccggtactgcctgagcagcagactgagagtgtccgccaccttctggcagaacccccggaaccacttcagatgccaggtgcagttctacggcctgagcgagaacgacgagtggacccaggacagagccaagcccgtgacccagatcgtgtctgccgaagcctggggcagagccgattgcggctttaccagcgagagctaccagcagggcgtgctgagcgccaccatcctgtacgagatcctgctgggcaaggccaccctgtacgccgtgctggtgtctgccctggtgctgatggctatggtcaagcggaaggacagccggggaagggccaagcgatctggatctggagcaacaaacttctcactactcaaacaagcaggtgacgtggaggagaatcccgggcctactagtatggactggatttggcgcatccttttccttgtcggcgctgctaccggcgcccattcccagctccagttgcaagagagcggccctggcttggtaaaaccttccgagacccttagcctcacatgcacggttagtgggggcagcatttcctcaggtgattactattggggatggattcggcaacccccgggtaaaggattggagtggattggtcatatttattatagtggagcgacgtactacaacccaagtctcaaatccagggttacaatatccgtcgatacgagcaggaaccaattcagcttgaaactttctagtgtcaccgcagcagacacagccgtctattactgtacgcgggatgactccagtaattggcggtcccgagggcaagggacactggtcacggtctcctcatctggaggcggtggaagcggtggaggaggatctcaggttcagctgcaagagtctggcggaggacttgctcaagctggcggaagcctgagactgtcttgtgccgcctctggcagaaccttcagcatgggctggtttagacaggcccctggcaaagagagagagttcgtcgccgccatcacatacagcggcggcagcccttactacgcctcttctgtcagaggccggttcaccatcagccgggacaacgccaagaacaccgtgtacctccagatgaacagcctgaagccagaggacaccgccgtgtactactgtgccgccaatccaacctacggcagcgactggaatgccgagaattggggccagggcacccaagtgacagtgtctagtggatccggcggcggaggatctggcggaggcggatctgggggcggaggctctttcgaacaagttcagcttcaacagcctggcgctgagctggtcaaacctggcgcttctgtgaagatgagctgcaaagccagcggctacgccttcagcagctactggatcaactggatgaagcagaaacccggccagggactcgaatggatcggccaaatctatcccggcgacggcgacaccaactacaacggcaagttcaagggcagagccacactgaccgccgatacctctagcagcacagcctacatgcagctgagcagcctgaccagcgaagatagcgccgtgtacttctgtgcccggtccatcacaacagtcgtgggctgcgctatggactattggggccagggaacaagcgtgaccgtgtctagtacgcgtgagcagaaactgatctcggaagaggatgggagcggcaccccattcccttctctggcccctcccatcatgctgctggtggacggcaagcagcagatggtggtcgtgtgcctggtgctggatgtggccccacctggactggacagccccatctggtttagcgccggcaatggctctgccctggacgcctttacctacggcccaagccctgccaccgatggcacctggacaaatctggcccacctgagcctgcccagcgaggaactggcttcttgggagcctctcgtgtgccacacaggacctggcgctgagggacacagcagatccacccagcctatgcacctgtctggcgaggccagcaccgccagaacctgtcctcaggaacctctgagaggcacccctggcggagcactgtggctgggagtgctgagactgctgctgttcaagctgctgctgtttgacctgctgctgacctgctcctgtctgtgcgatcctgccggccctctgccttctcctgccaccaccacaagactgagagccctgggcagccacagactgcaccctgccacagagacaggcggcagagaggccacaagcagccctagaccccagcccagagacagaagatggggcgataccccccctggcagaaagcctggatctccagtccgcgccaagagaagcggatctggcgtgaagcagaccctgaatttcgacctgctgaagctggctggcgacgtggaatccaacccaggcccttctagaggccatatgaccgagtacaagcccacggtgcgcctcgccacccgcgacgacgtccccagggccgtacgcaccctcgccgccgcgttcgccgactaccccgccacgcgccacaccgtcgatccggaccgccacatcgagcgggtcaccgagctgcaagaactcttcctcacgcgcgtcgggctcgacatcggcaaggtgtgggtcgcggacgacggcgccgcggtggcggtctggaccacgccggagagcgtcgaagcgggggcggtgttcgccgagatcggcccgcgcatggccgagttgagcggttcccggctggccgcgcagcaacagatggaaggcctcctggcgccgcaccggcccaaggagcccgcgtggttcctggccaccgtcggcgtctcgcccgaccaccagggcaagggtctgggcagcgccgtcgtgctccccggagtggaggcggccgagcgcgccggggtgcccgccttcctggagacctccgcgccccgcaacctccccttctacgagcggctcggcttcaccgtcaccgccgacgtcgaggtgcccgaaggaccgcgcacctggtgcatgacccgcaagcccggtgcctga

SEQ ID NO: 5165 - DNA, 3471 bp, Artificial Sequence
  Synthetic Polynucloetide
atggccttaccagtgaccgccttgctcctgccgctggccttgctgctccacgccgccaggccggacatccagatgacacagagccctagcagcctgtctgccagcgtgggagacagagtgaccatcacatgcaaggccagcgaccacatcaacaactggctggcctggtatcagcagaagcctggacaggcccctaagctgctgatctacggcgctaccacactggaaacaggcgtgcccagcagattttctggcagcggctctggcaccgactacaccctgacaatatccagcctccagcctgaggacttcgccacctactactgtcagcagagctggaacaccccttggacattcggccagggcaccaagctggaaatcaagagactcgaggggaaaccaattcccaaccctcttctgggactggattcaaccggcagcggcgacaagcagctggacgccgacgtgtcccccaagcctaccatcttcctgccctctatcgccgagacaaagctccagaaggccggcacctacctgtgcctgctggaaaagttcttcccagatgtgattaagatccactggcaggaaaagaagtccaacaccatcctgggcagccaggaaggcaacaccatgaagaccaacgacacctacatgaagttcagctggctgaccgtgcccgagaagtccctggacaaagaacacagatgcatcgtgcggcacgaaaacaacaagaacggcgtggaccaggaaatcatcttcccacccatcaagaccgatgtgattacaatggaccccaaggacaactgctccaaggacgccaacgataccctgctgctccagctgaccaacaccagcgcctactacatgtacttgttgctgctgctgaagtccgtggtgtacttcgccatcatcacatgctgcctgctgcggagaaccgccttctgctgcaacggcgagaagtctagggccaagcgatctggatctggagcaacaaacttctcactactcaaacaagcaggtgacgtggaggagaatcccgggcctactagtatggactggatttggcgcatccttttccttgtcggcgctgctaccggcgcccattcccagctccagttgcaagagagcggccctggcttggtaaaaccttccgagacccttagcctcacatgcacggttagtgggggcagcatttcctcaggtgattactattggggatggattcggcaacccccgggtaaaggattggagtggattggtcatatttattatagtggagcgacgtactacaacccaagtctcaaatccagggttacaatatccgtcgatacgagcaggaaccaattcagcttgaaactttctagtgtcaccgcagcagacacagccgtctattactgtacgcgggatgactccagtaattggcggtcccgagggcaagggacactggtcacggtctcctcatctggaggcggtggaagcggtggaggaggatctcaggttcagctgcaagagtctggcggaggacttgctcaagctggcggaagcctgagactgtcttgtgccgcctctggcagaaccttcagcatgggctggtttagacaggcccctggcaaagagagagagttcgtcgccgccatcacatacagcggcggcagcccttactacgcctcttctgtcagaggccggttcaccatcagccgggacaacgccaagaacaccgtgtacctccagatgaacagcctgaagccagaggacaccgccgtgtactactgtgccgccaatccaacctacggcagcgactggaatgccgagaattggggccagggcacccaagtgacagtgtctagtggatccggcggcggaggatctggcggaggcggatctgggggcggaggctctttcgaacaagttcagcttcaacagcctggcgctgagctggtcaaacctggcgcttctgtgaagatgagctgcaaagccagcggctacgccttcagcagctactggatcaactggatgaagcagaaacccggccagggactcgaatggatcggccaaatctatcccggcgacggcgacaccaactacaacggcaagttcaagggcagagccacactgaccgccgatacctctagcagcacagcctacatgcagctgagcagcctgaccagcgaagatagcgccgtgtacttctgtgcccggtccatcacaacagtcgtgggctgcgctatggactattggggccagggaacaagcgtgaccgtgtctagtacgcgtgagcagaaactgatctcggaagaggatgggagcggcagccagcctcacaccaagcccagcgtgttcgtgatgaagaacggcaccaacgtggcctgcctcgtgaaagagttctaccccaaggacatcaggatcaacctggtgtccagcaagaagatcaccgagttcgaccccgccatcgtgatctcccccagcggcaagtacaacgccgtgaagctggggaagtacgaggacagcaacagcgtgacctgctccgtgcagcacgacaacaagaccgtgcacagcaccgactttgaagtgaaaaccgactccaccgaccacgtgaagcccaaagagacagagaacaccaagcagcccagcaagagctgccacaagcccaaggccatcgtgcacaccgagaaagtgaacatgatgagcctgaccgtgctgggcctgcggatgctgttcgccaaaaccgtggccgtgaacttcctgctgaccgccaagctgttcttcctccgcgccaagagaagcggatctggcgtgaagcagaccctgaatttcgacctgctgaagctggctggcgacgtggaatccaacccaggcccttctagaggccatatgaccgagtacaagcccacggtgcgcctcgccacccgcgacgacgtccccagggccgtacgcaccctcgccgccgcgttcgccgactaccccgccacgcgccacaccgtcgatccggaccgccacatcgagcgggtcaccgagctgcaagaactcttcctcacgcgcgtcgggctcgacatcggcaaggtgtgggtcgcggacgacggcgccgcggtggcggtctggaccacgccggagagcgtcgaagcgggggcggtgttcgccgagatcggcccgcgcatggccgagttgagcggttcccggctggccgcgcagcaacagatggaaggcctcctggcgccgcaccggcccaaggagcccgcgtggttcctggccaccgtcggcgtctcgcccgaccaccagggcaagggtctgggcagcgccgtcgtgctccccggagtggaggcggccgagcgcgccggggtgcccgccttcctggagacctccgcgccccgcaacctccccttctacgagcggctcggcttcaccgtcaccgccgacgtcgaggtgcccgaaggaccgcgcacctggtgcatgacccgcaagcccggtgcctga

SEQ ID NO: 5166 - DNA, 2682 bp, Artificial Sequence
  Synthetic Polynucloetide
atggccttaccagtgaccgccttgctcctgccgctggccttgctgctccacgccgccaggccggacatccagatgacacagagccctagcagcctgtctgccagcgtgggagacagagtgaccatcacatgcaaggccagcgaccacatcaacaactggctggcctggtatcagcagaagcctggacaggcccctaagctgctgatctacggcgctaccacactggaaacaggcgtgcccagcagattttctggcagcggctctggcaccgactacaccctgacaatatccagcctccagcctgaggacttcgccacctactactgtcagcagagctggaacaccccttggacattcggccagggcaccaagctggaaatcaagagactcgagagccagcctcacaccaagcccagcgtgttcgtgatgaagaacggcaccaacgtggcctgcctcgtgaaagagttctaccccaaggacatcaggatcaacctggtgtccagcaagaagatcaccgagttcgaccccgccatcgtgatctcccccagcggcaagtacaacgccgtgaagctggggaagtacgaggacagcaacagcgtgacctgctccgtgcagcacgacaacaagaccgtgcacagcaccgactttgaagtgaaaaccgactccaccgaccacgtgaagcccaaagagacagagaacaccaagcagcccagcaagagctgccacaagcccaaggccatcgtgcacaccgagaaagtgaacatgatgagcctgaccgtgctgggcctgcggatgctgttcgccaaaaccgtggccgtgaacttcctgctgaccgccaagctgttcttcctcagggccaagcgatctggatctggagcaacaaacttctcactactcaaacaagcaggtgacgtggaggagaatcccgggcctactagtatggactggatttggcgcatccttttccttgtcggcgctgctaccggcgcccattcccagctccagttgcaagagagcggccctggcttggtaaaaccttccgagacccttagcctcacatgcacggttagtgggggcagcatttcctcaggtgattactattggggatggattcggcaacccccgggtaaaggattggagtggattggtcatatttattatagtggagcgacgtactacaacccaagtctcaaatccagggttacaatatccgtcgatacgagcaggaaccaattcagcttgaaactttctagtgtcaccgcagcagacacagccgtctattactgtacgcgggatgactccagtaattggcggtcccgagggcaagggacactggtcacggtctcctcatctggaggcggtggaagcggtggaggaggatctcaggttcagctgcaagagtctggcggaggacttgctcaagctggcggaagcctgagactgtcttgtgccgcctctggcagaaccttcagcatgggctggtttagacaggcccctggcaaagagagagagttcgtcgccgccatcacatacagcggcggcagcccttactacgcctcttctgtcagaggccggttcaccatcagccgggacaacgccaagaacaccgtgtacctccagatgaacagcctgaagccagaggacaccgccgtgtactactgtgccgccaatccaacctacggcagcgactggaatgccgagaattggggccagggcacccaagtgacagtgtctagtggatccggcggcggaggatctggcggaggcggatctgggggcggaggctctttcgaacaagttcagcttcaacagcctggcgctgagctggtcaaacctggcgcttctgtgaagatgagctgcaaagccagcggctacgccttcagcagctactggatcaactggatgaagcagaaacccggccagggactcgaatggatcggccaaatctatcccggcgacggcgacaccaactacaacggcaagttcaagggcagagccacactgaccgccgatacctctagcagcacagcctacatgcagctgagcagcctgaccagcgaagatagcgccgtgtacttctgtgcccggtccatcacaacagtcgtgggctgcgctatggactattggggccagggaacaagcgtgaccgtgtctagtacgcgtgacaagcagctggacgccgacgtgtcccccaagcctaccatcttcctgccctctatcgccgagacaaagctccagaaggccggcacctacctgtgcctgctggaaaagttcttcccagatgtgattaagatccactggcaggaaaagaagtccaacaccatcctgggcagccaggaaggcaacaccatgaagaccaacgacacctacatgaagttcagctggctgaccgtgcccgagaagtccctggacaaagaacacagatgcatcgtgcggcacgaaaacaacaagaacggcgtggaccaggaaatcatcttcccacccatcaagaccgatgtgattacaatggaccccaaggacaactgctccaaggacgccaacgataccctgctgctccagctgaccaacaccagcgcctactacatgtacttgttgctgctgctgaagtccgtggtgtacttcgccatcatcacatgctgcctgctgcggagaaccgccttctgctgcaacggcgagaagtct

SEQ ID NO: 5167 - DNA, 3891 bp, Artificial Sequence
  Synthetic Polynucloetide
atggccttaccagtgaccgccttgctcctgccgctggccttgctgctccacgccgccaggccggacatccagatgacacagagccctagcagcctgtctgccagcgtgggagacagagtgaccatcacatgcaaggccagcgaccacatcaacaactggctggcctggtatcagcagaagcctggacaggcccctaagctgctgatctacggcgctaccacactggaaacaggcgtgcccagcagattttctggcagcggctctggcaccgactacaccctgacaatatccagcctccagcctgaggacttcgccacctactactgtcagcagagctggaacaccccttggacattcggccagggcaccaagctggaaatcaagagaggacagcctaaggccaatcctaccgtgacactgttccctccaagcagcgaagaactccaggccaacaaggccacacttgtgtgcctgatctccgacttctaccctggggctgtgacagtggcttggaaggccgatggatctcctgtgaaagccggcgtggaaaccaccaagccatccaagcagagcaacaacaaatacgccgccagctcctacctgagcctgacacctgagcagtggaagtcccacagatcctacagctgccaagtgacccacgaaggcagcaccgtggaaaagacagtggcccctacagagtgcagcggatcccagagcttcggcctgctggaccccaagctgtgctacctgctggatggcatcctgttcatctacggcgtgatcctgaccgccctgttcctgagagtgaagttcagcagaagcgccgacgcccctgcctaccagcagggacagaaccaactgtacaacgagctgaacctgggcagacgggaagagtacgacgtgctggacaagcggagaggcagggaccctgagatgggcggaaagccccagcggagaaagaacccccaggaaggactgtataacgaactccagaaagacaagatggccgaagcctacagcgagatcggcatgaagggcgagcggagaagaggcaagggccacgatggcctgtaccagggcctgagcaccgccaccaaggacacctatgacgccctgcacatgcaggccctgcctccaagaagggccaagcgatctggatctggagcaacaaacttctcactactcaaacaagcaggtgacgtggaggagaatcccgggcctactagtatggactggatttggcgcatccttttccttgtcggcgctgctaccggcgcccattcccagctccagttgcaagagagcggccctggcttggtaaaaccttccgagacccttagcctcacatgcacggttagtgggggcagcatttcctcaggtgattactattggggatggattcggcaacccccgggtaaaggattggagtggattggtcatatttattatagtggagcgacgtactacaacccaagtctcaaatccagggttacaatatccgtcgatacgagcaggaaccaattcagcttgaaactttctagtgtcaccgcagcagacacagccgtctattactgtacgcgggatgactccagtaattggcggtcccgagggcaagggacactggtcacggtctcctcatctggaggcggtggaagcggtggaggaggatctcaggttcagctgcaagagtctggcggaggacttgctcaagctggcggaagcctgagactgtcttgtgccgcctctggcagaaccttcagcatgggctggtttagacaggcccctggcaaagagagagagttcgtcgccgccatcacatacagcggcggcagcccttactacgcctcttctgtcagaggccggttcaccatcagccgggacaacgccaagaacaccgtgtacctccagatgaacagcctgaagccagaggacaccgccgtgtactactgtgccgccaatccaacctacggcagcgactggaatgccgagaattggggccagggcacccaagtgacagtgtctagtggatccggcggcggaggatctggcggaggcggatctgggggcggaggctctttcgaacaagttcagcttcaacagcctggcgctgagctggtcaaacctggcgcttctgtgaagatgagctgcaaagccagcggctacgccttcagcagctactggatcaactggatgaagcagaaacccggccagggactcgaatggatcggccaaatctatcccggcgacggcgacaccaactacaacggcaagttcaagggcagagccacactgaccgccgatacctctagcagcacagcctacatgcagctgagcagcctgaccagcgaagatagcgccgtgtacttctgtgcccggtccatcacaacagtcgtgggctgcgctatggactattggggccagggaacaagcgtgaccgtgtctagtgcctctacaaagggaccctccgtgtttcctctggctcccagcagcaagtctacaagcggaggaacagccgctctgggctgcctggtcaaggattactttcccgagcctgtgaccgtgtcctggaatagcggagcactgacaagcggcgtgcacacctttccagccgtgctgcaaagcagcggcctgtactctctgagcagcgtggtcacagtgcctagctctagcctgggcacccagacctacatctgcaatgtgaaccacaagcctagcaacaccaaggtggacaagagagtggaacccaagagctgtggtacccagagttttgggttgttggaccctaaattgtgctatctgttggacggaatcctgttcatttacggagtgatcctgaccgcattgttcctgcgggttaagttttccagatccgcagacgcacccgcttaccaacaagggcagaaccaactctacaatgaacttaatttggggcggagggaagagtacgacgttctggacaaaaggaggggacgagatcccgagatgggcggaaagcctcagcgaaggaagaatccgcaagaggggctttataacgaactccagaaagataaaatggcagaagcctatagtgagattgggatgaagggagaaaggaggaggggtaaaggtcacgatgggttgtaccaaggattgagcacagccactaaagatacctatgatgcgctccacatgcaggccctgccgccaagacgcgccaagagaagcggatctggcgtgaagcagaccctgaatttcgacctgctgaagctggctggcgacgtggaatccaacccaggcccttctagaggccatatgaccgagtacaagcccacggtgcgcctcgccacccgcgacgacgtccccagggccgtacgcaccctcgccgccgcgttcgccgactaccccgccacgcgccacaccgtcgatccggaccgccacatcgagcgggtcaccgagctgcaagaactcttcctcacgcgcgtcgggctcgacatcggcaaggtgtgggtcgcggacgacggcgccgcggtggcggtctggaccacgccggagagcgtcgaagcgggggcggtgttcgccgagatcggcccgcgcatggccgagttgagcggttcccggctggccgcgcagcaacagatggaaggcctcctggcgccgcaccggcccaaggagcccgcgtggttcctggccaccgtcggcgtctcgcccgaccaccagggcaagggtctgggcagcgccgtcgtgctccccggagtggaggcggccgagcgcgccggggtgcccgccttcctggagacctccgcgccccgcaacctccccttctacgagcggctcggcttcaccgtcaccgccgacgtcgaggtgcccgaaggaccgcgcacctggtgcatgacccgcaagcccggtgcctga

SEQ ID NO: 5168 - DNA, 3246 bp, Artificial Sequence
  Synthetic Polynucloetide
atggccttaccagtgaccgccttgctcctgccgctggccttgctgctccacgccgccaggccggacatccagatgacacagagccctagcagcctgtctgccagcgtgggagacagagtgaccatcacatgcaaggccagcgaccacatcaacaactggctggcctggtatcagcagaagcctggacaggcccctaagctgctgatctacggcgctaccacactggaaacaggcgtgcccagcagattttctggcagcggctctggcaccgactacaccctgacaatatccagcctccagcctgaggacttcgccacctactactgtcagcagagctggaacaccccttggacattcggccagggcaccaagctggaaatcaagagactcgaggacctgaagaacgtgttcccacctgaggtggccgtgttcgagcctagcgaggccgagatcagccacacccagaaagccaccctcgtgtgcctggctaccggcttctaccccgaccatgtggaactgtcttggtgggtcaacggcaaagaggtgcacagcggcgtgtctaccgacccccagccactgaaagaacagcccgccctgaacgacagccggtactgcctgagcagcagactgagagtgtccgccaccttctggcagaacccccggaaccacttcagatgccaggtgcagttctacggcctgagcgagaacgacgagtggacccaggacagagccaagcccgtgacccagatcgtgtctgccgaagcctggggcagagccgattgcggatcccagagcttcggcctgctggaccccaagctgtgctacctgctggatggcatcctgttcatctacggcgtgatcctgaccgccctgttcctgagagtgaagttcagcagaagcgccgacgcccctgcctaccagcagggacagaaccaactgtacaacgagctgaacctgggcagacgggaagagtacgacgtgctggacaagcggagaggcagggaccctgagatgggcggaaagccccagcggagaaagaacccccaggaaggactgtataacgaactccagaaagacaagatggccgaagcctacagcgagatcggcatgaagggcgagcggagaagaggcaagggccacgatggcctgtaccagggcctgagcaccgccaccaaggacacctatgacgccctgcacatgcaggccctgcctccaagaagggccaagcgatctggatctggagcaacaaacttctcactactcaaacaagcaggtgacgtggaggagaatcccgggcctactagtatggactggatttggcgcatccttttccttgtcggcgctgctaccggcgcccattcccagctccagttgcaagagagcggccctggcttggtaaaaccttccgagacccttagcctcacatgcacggttagtgggggcagcatttcctcaggtgattactattggggatggattcggcaacccccgggtaaaggattggagtggattggtcatatttattatagtggagcgacgtactacaacccaagtctcaaatccagggttacaatatccgtcgatacgagcaggaaccaattcagcttgaaactttctagtgtcaccgcagcagacacagccgtctattactgtacgcgggatgactccagtaattggcggtcccgagggcaagggacactggtcacggtctcctcatctggaggcggtggaagcggtggaggaggatctcaggttcagctgcaagagtctggcggaggacttgctcaagctggcggaagcctgagactgtcttgtgccgcctctggcagaaccttcagcatgggctggtttagacaggcccctggcaaagagagagagttcgtcgccgccatcacatacagcggcggcagcccttactacgcctcttctgtcagaggccggttcaccatcagccgggacaacgccaagaacaccgtgtacctccagatgaacagcctgaagccagaggacaccgccgtgtactactgtgccgccaatccaacctacggcagcgactggaatgccgagaattggggccagggcacccaagtgacagtgtctagtggatccggcggcggaggatctggcggaggcggatctgggggcggaggctctttcgaacaagttcagcttcaacagcctggcgctgagctggtcaaacctggcgcttctgtgaagatgagctgcaaagccagcggctacgccttcagcagctactggatcaactggatgaagcagaaacccggccagggactcgaatggatcggccaaatctatcccggcgacggcgacaccaactacaacggcaagttcaagggcagagccacactgaccgccgatacctctagcagcacagcctacatgcagctgagcagcctgaccagcgaagatagcgccgtgtacttctgtgcccggtccatcacaacagtcgtgggctgcgctatggactattggggccagggaacaagcgtgaccgtgtctagtacgcgtatccagaaccctgatcctgccgtgtaccagctgcgggatagcaagagcagcgacaagagcgtgtgtctgttcaccgacttcgacagccagaccaacgtgtcccagagcaaggactccgacgtgtacatcaccgataagaccgtgctggacatgcggagcatggacttcaagagcaactccgccgtggcctggtccaacaagtccgatttcgcctgcgccaacgccttcaacaacagcattatccccgaggacacattcttcccaagccccgagagcagctgcggtacccagagttttgggttgttggaccctaaattgtgctatctgttggacggaatcctgttcatttacggagtgatcctgaccgcattgttcctgcgggttaagttttccagatccgcagacgcacccgcttaccaacaagggcagaaccaactctacaatgaacttaatttggggcggagggaagagtacgacgttctggacaaaaggaggggacgagatcccgagatgggcggaaagcctcagcgaaggaagaatccgcaagaggggctttataacgaactccagaaagataaaatggcagaagcctatagtgagattgggatgaagggagaaaggaggaggggtaaaggtcacgatgggttgtaccaaggattgagcacagccactaaagatacctatgatgcgctccacatgcaggccctgccgccaaga

SEQ ID NO: 5169 - DNA, 3246 bp, Artificial Sequence
  Synthetic Polynucloetide
atggccttaccagtgaccgccttgctcctgccgctggccttgctgctccacgccgccaggccggacatccagatgacacagagccctagcagcctgtctgccagcgtgggagacagagtgaccatcacatgcaaggccagcgaccacatcaacaactggctggcctggtatcagcagaagcctggacaggcccctaagctgctgatctacggcgctaccacactggaaacaggcgtgcccagcagattttctggcagcggctctggcaccgactacaccctgacaatatccagcctccagcctgaggacttcgccacctactactgtcagcagagctggaacaccccttggacattcggccagggcaccaagctggaaatcaagagactcgaggacctgaagaacgtgttcccacctgaggtggccgtgttcgagcctagcaaggccgagatcgcccacacccagaaagccaccctcgtgtgcctggctaccggcttctaccccgaccatgtggaactgtcttggtgggtcaacggcaaagaggtgcacagcggcgtgtgtaccgacccccagccactgaaagaacagcccgccctgaacgacagccggtactgcctgagcagcagactgagagtgtccgccaccttctggcagaacccccggaaccacttcagatgccaggtgcagttctacggcctgagcgagaacgacgagtggacccaggacagagccaagcccgtgacccagatcgtgtctgccgaagcctggggcagagccgattgcggatcccagagcttcggcctgctggaccccaagctgtgctacctgctggatggcatcctgttcatctacggcgtgatcctgaccgccctgttcctgagagtgaagttcagcagaagcgccgacgcccctgcctaccagcagggacagaaccaactgtacaacgagctgaacctgggcagacgggaagagtacgacgtgctggacaagcggagaggcagggaccctgagatgggcggaaagccccagcggagaaagaacccccaggaaggactgtataacgaactccagaaagacaagatggccgaagcctacagcgagatcggcatgaagggcgagcggagaagaggcaagggccacgatggcctgtaccagggcctgagcaccgccaccaaggacacctatgacgccctgcacatgcaggccctgcctccaagaagggccaagcgatctggatctggagcaacaaacttctcactactcaaacaagcaggtgacgtggaggagaatcccgggcctactagtatggactggatttggcgcatccttttccttgtcggcgctgctaccggcgcccattcccagctccagttgcaagagagcggccctggcttggtaaaaccttccgagacccttagcctcacatgcacggttagtgggggcagcatttcctcaggtgattactattggggatggattcggcaacccccgggtaaaggattggagtggattggtcatatttattatagtggagcgacgtactacaacccaagtctcaaatccagggttacaatatccgtcgatacgagcaggaaccaattcagcttgaaactttctagtgtcaccgcagcagacacagccgtctattactgtacgcgggatgactccagtaattggcggtcccgagggcaagggacactggtcacggtctcctcatctggaggcggtggaagcggtggaggaggatctcaggttcagctgcaagagtctggcggaggacttgctcaagctggcggaagcctgagactgtcttgtgccgcctctggcagaaccttcagcatgggctggtttagacaggcccctggcaaagagagagagttcgtcgccgccatcacatacagcggcggcagcccttactacgcctcttctgtcagaggccggttcaccatcagccgggacaacgccaagaacaccgtgtacctccagatgaacagcctgaagccagaggacaccgccgtgtactactgtgccgccaatccaacctacggcagcgactggaatgccgagaattggggccagggcacccaagtgacagtgtctagtggatccggcggcggaggatctggcggaggcggatctgggggcggaggctctttcgaacaagttcagcttcaacagcctggcgctgagctggtcaaacctggcgcttctgtgaagatgagctgcaaagccagcggctacgccttcagcagctactggatcaactggatgaagcagaaacccggccagggactcgaatggatcggccaaatctatcccggcgacggcgacaccaactacaacggcaagttcaagggcagagccacactgaccgccgatacctctagcagcacagcctacatgcagctgagcagcctgaccagcgaagatagcgccgtgtacttctgtgcccggtccatcacaacagtcgtgggctgcgctatggactattggggccagggaacaagcgtgaccgtgtctagtacgcgtatccagaaccctgatcctgccgtgtaccagctgcgggatagcaagagcagcgacaagagcgtgtgtctgttcaccgacttcgacagccagaccaacgtgtcccagagcaaggactccgacgtgtacatcaccgataagtgcgtgctggacatgcggagcatggacttcaagagcaactccgccgtggcctggtccaacaagtccgatttcgcctgcgccaacgccttcaacaacagcattatccccgaggacacattcttcccaagcagcgacgtgccctgcggtacccagagttttgggttgttggaccctaaattgtgctatctgttggacggaatcctgttcatttacggagtgatcctgaccgcattgttcctgcgggttaagttttccagatccgcagacgcacccgcttaccaacaagggcagaaccaactctacaatgaacttaatttggggcggagggaagagtacgacgttctggacaaaaggaggggacgagatcccgagatgggcggaaagcctcagcgaaggaagaatccgcaagaggggctttataacgaactccagaaagataaaatggcagaagcctatagtgagattgggatgaagggagaaaggaggaggggtaaaggtcacgatgggttgtaccaaggattgagcacagccactaaagatacctatgatgcgctccacatgcaggccctgccgccaaga

SEQ ID NO: 5170 - DNA, 3459 bp, Artificial Sequence
  Synthetic Polynucloetide
atggccttaccagtgaccgccttgctcctgccgctggccttgctgctccacgccgccaggccggacatccagatgacacagagccctagcagcctgtctgccagcgtgggagacagagtgaccatcacatgcaaggccagcgaccacatcaacaactggctggcctggtatcagcagaagcctggacaggcccctaagctgctgatctacggcgctaccacactggaaacaggcgtgcccagcagattttctggcagcggctctggcaccgactacaccctgacaatatccagcctccagcctgaggacttcgccacctactactgtcagcagagctggaacaccccttggacattcggccagggcaccaagctggaaatcaagagactcgaggggaaaccaattcccaaccctcttctgggactggattcaaccggcagcggcgaggacctgaagaacgtgttcccacctgaggtggccgtgttcgagcctagcgaggccgagatcagccacacccagaaagccaccctcgtgtgcctggctaccggcttctaccccgaccatgtggaactgtcttggtgggtcaacggcaaagaggtgcacagcggcgtgtctaccgacccccagccactgaaagaacagcccgccctgaacgacagccggtactgcctgagcagcagactgagagtgtccgccaccttctggcagaacccccggaaccacttcagatgccaggtgcagttctacggcctgagcgagaacgacgagtggacccaggacagagccaagcccgtgacccagatcgtgtctgccgaagcctggggcagagccgattgcggatcccagagcttcggcctgctggaccccaagctgtgctacctgctggatggcatcctgttcatctacggcgtgatcctgaccgccctgttcctgagagtgaagttcagcagaagcgccgacgcccctgcctaccagcagggacagaaccaactgtacaacgagctgaacctgggcagacgggaagagtacgacgtgctggacaagcggagaggcagggaccctgagatgggcggaaagccccagcggagaaagaacccccaggaaggactgtataacgaactccagaaagacaagatggccgaagcctacagcgagatcggcatgaagggcgagcggagaagaggcaagggccacgatggcctgtaccagggcctgagcaccgccaccaaggacacctatgacgccctgcacatgcaggccctgcctccaagaagggccaagcgatctggatctggagcaacaaacttctcactactcaaacaagcaggtgacgtggaggagaatcccgggcctactagtatggactggatttggcgcatccttttccttgtcggcgctgctaccggcgcccattcccagctccagttgcaagagagcggccctggcttggtaaaaccttccgagacccttagcctcacatgcacggttagtgggggcagcatttcctcaggtgattactattggggatggattcggcaacccccgggtaaaggattggagtggattggtcatatttattatagtggagcgacgtactacaacccaagtctcaaatccagggttacaatatccgtcgatacgagcaggaaccaattcagcttgaaactttctagtgtcaccgcagcagacacagccgtctattactgtacgcgggatgactccagtaattggcggtcccgagggcaagggacactggtcacggtctcctcatctggaggcggtggaagcggtggaggaggatctcaggttcagctgcaagagtctggcggaggacttgctcaagctggcggaagcctgagactgtcttgtgccgcctctggcagaaccttcagcatgggctggtttagacaggcccctggcaaagagagagagttcgtcgccgccatcacatacagcggcggcagcccttactacgcctcttctgtcagaggccggttcaccatcagccgggacaacgccaagaacaccgtgtacctccagatgaacagcctgaagccagaggacaccgccgtgtactactgtgccgccaatccaacctacggcagcgactggaatgccgagaattggggccagggcacccaagtgacagtgtctagtggatccggcggcggaggatctggcggaggcggatctgggggcggaggctctttcgaacaagttcagcttcaacagcctggcgctgagctggtcaaacctggcgcttctgtgaagatgagctgcaaagccagcggctacgccttcagcagctactggatcaactggatgaagcagaaacccggccagggactcgaatggatcggccaaatctatcccggcgacggcgacaccaactacaacggcaagttcaagggcagagccacactgaccgccgatacctctagcagcacagcctacatgcagctgagcagcctgaccagcgaagatagcgccgtgtacttctgtgcccggtccatcacaacagtcgtgggctgcgctatggactattggggccagggaacaagcgtgaccgtgtctagtacgcgtgagcagaaactgatctcggaagaggatgggagcggcatccagaaccctgatcctgccgtgtaccagctgcgggatagcaagagcagcgacaagagcgtgtgtctgttcaccgacttcgacagccagaccaacgtgtcccagagcaaggactccgacgtgtacatcaccgataagaccgtgctggacatgcggagcatggacttcaagagcaactccgccgtggcctggtccaacaagtccgatttcgcctgcgccaacgccttcaacaacagcattatccccgaggacacattcttcccaagccccgagagcagctgcggtacccagagttttgggttgttggaccctaaattgtgctatctgttggacggaatcctgttcatttacggagtgatcctgaccgcattgttcctgaggagcaagcggtcacggctgctccacagcgattacatgaatatgacaccacgaagaccgggtcctactcgcaaacactaccaaccctacgcacctccccgcgactttgcagcgtaccgatctcgggttaagttttccagatccgcagacgcacccgcttaccaacaagggcagaaccaactctacaatgaacttaatttggggcggagggaagagtacgacgttctggacaaaaggaggggacgagatcccgagatgggcggaaagcctcagcgaaggaagaatccgcaagaggggctttataacgaactccagaaagataaaatggcagaagcctatagtgagattgggatgaagggagaaaggaggaggggtaaaggtcacgatgggttgtaccaaggattgagcacagccactaaagatacctatgatgcgctccacatgcaggccctgccgccaaga

SEQ ID NO: 5171 - DNA, 3582 bp, Artificial Sequence
  Synthetic Polynucloetide
atggccttaccagtgaccgccttgctcctgccgctggccttgctgctccacgccgccaggccggacatccagatgacacagagccctagcagcctgtctgccagcgtgggagacagagtgaccatcacatgcaaggccagcgaccacatcaacaactggctggcctggtatcagcagaagcctggacaggcccctaagctgctgatctacggcgctaccacactggaaacaggcgtgcccagcagattttctggcagcggctctggcaccgactacaccctgacaatatccagcctccagcctgaggacttcgccacctactactgtcagcagagctggaacaccccttggacattcggccagggcaccaagctggaaatcaagagactcgaggggaaaccaattcccaaccctcttctgggactggattcaaccggcagcggcgaggacctgaagaacgtgttcccacctgaggtggccgtgttcgagcctagcgaggccgagatcagccacacccagaaagccaccctcgtgtgcctggctaccggcttctaccccgaccatgtggaactgtcttggtgggtcaacggcaaagaggtgcacagcggcgtgtctaccgacccccagccactgaaagaacagcccgccctgaacgacagccggtactgcctgagcagcagactgagagtgtccgccaccttctggcagaacccccggaaccacttcagatgccaggtgcagttctacggcctgagcgagaacgacgagtggacccaggacagagccaagcccgtgacccagatcgtgtctgccgaagcctggggcagagccgattgcggatcccagagcttcggcctgctggaccccaagctgtgctacctgctggatggcatcctgttcatctacggcgtgatcctgaccgccctgttcctgaggagtaagaggagcaggctcctgcacagtgactacatgaacatgactccacgccgccccggacccacccgcaagcattaccagccctatgccccaccacgcgacttcgcagcctatcgctccagagtgaagttcagcagaagcgccgacgcccctgcctaccagcagggacagaaccaactgtacaacgagctgaacctgggcagacgggaagagtacgacgtgctggacaagcggagaggcagggaccctgagatgggcggaaagccccagcggagaaagaacccccaggaaggactgtataacgaactccagaaagacaagatggccgaagcctacagcgagatcggcatgaagggcgagcggagaagaggcaagggccacgatggcctgtaccagggcctgagcaccgccaccaaggacacctatgacgccctgcacatgcaggccctgcctccaagaagggccaagcgatctggatctggagcaacaaacttctcactactcaaacaagcaggtgacgtggaggagaatcccgggcctactagtatggactggatttggcgcatccttttccttgtcggcgctgctaccggcgcccattcccagctccagttgcaagagagcggccctggcttggtaaaaccttccgagacccttagcctcacatgcacggttagtgggggcagcatttcctcaggtgattactattggggatggattcggcaacccccgggtaaaggattggagtggattggtcatatttattatagtggagcgacgtactacaacccaagtctcaaatccagggttacaatatccgtcgatacgagcaggaaccaattcagcttgaaactttctagtgtcaccgcagcagacacagccgtctattactgtacgcgggatgactccagtaattggcggtcccgagggcaagggacactggtcacggtctcctcatctggaggcggtggaagcggtggaggaggatctcaggttcagctgcaagagtctggcggaggacttgctcaagctggcggaagcctgagactgtcttgtgccgcctctggcagaaccttcagcatgggctggtttagacaggcccctggcaaagagagagagttcgtcgccgccatcacatacagcggcggcagcccttactacgcctcttctgtcagaggccggttcaccatcagccgggacaacgccaagaacaccgtgtacctccagatgaacagcctgaagccagaggacaccgccgtgtactactgtgccgccaatccaacctacggcagcgactggaatgccgagaattggggccagggcacccaagtgacagtgtctagtggatccggcggcggaggatctggcggaggcggatctgggggcggaggctctttcgaacaagttcagcttcaacagcctggcgctgagctggtcaaacctggcgcttctgtgaagatgagctgcaaagccagcggctacgccttcagcagctactggatcaactggatgaagcagaaacccggccagggactcgaatggatcggccaaatctatcccggcgacggcgacaccaactacaacggcaagttcaagggcagagccacactgaccgccgatacctctagcagcacagcctacatgcagctgagcagcctgaccagcgaagatagcgccgtgtacttctgtgcccggtccatcacaacagtcgtgggctgcgctatggactattggggccagggaacaagcgtgaccgtgtctagtacgcgtgagcagaaactgatctcggaagaggatgggagcggcatccagaaccctgatcctgccgtgtaccagctgcgggatagcaagagcagcgacaagagcgtgtgtctgttcaccgacttcgacagccagaccaacgtgtcccagagcaaggactccgacgtgtacatcaccgataagaccgtgctggacatgcggagcatggacttcaagagcaactccgccgtggcctggtccaacaagtccgatttcgcctgcgccaacgccttcaacaacagcattatccccgaggacacattcttcccaagccccgagagcagctgcggtacccagagttttgggttgttggaccctaaattgtgctatctgttggacggaatcctgttcatttacggagtgatcctgaccgcattgttcctgaggagcaagcggtcacggctgctccacagcgattacatgaatatgacaccacgaagaccgggtcctactcgcaaacactaccaaccctacgcacctccccgcgactttgcagcgtaccgatctcgggttaagttttccagatccgcagacgcacccgcttaccaacaagggcagaaccaactctacaatgaacttaatttggggcggagggaagagtacgacgttctggacaaaaggaggggacgagatcccgagatgggcggaaagcctcagcgaaggaagaatccgcaagaggggctttataacgaactccagaaagataaaatggcagaagcctatagtgagattgggatgaagggagaaaggaggaggggtaaaggtcacgatgggttgtaccaaggattgagcacagccactaaagatacctatgatgcgctccacatgcaggccctgccgccaaga

SEQ ID NO: 5172 - DNA, 3465 bp, Artificial Sequence
  Synthetic Polynucloetide
atggccttaccagtgaccgccttgctcctgccgctggccttgctgctccacgccgccaggccggacatccagatgacacagagccctagcagcctgtctgccagcgtgggagacagagtgaccatcacatgcaaggccagcgaccacatcaacaactggctggcctggtatcagcagaagcctggacaggcccctaagctgctgatctacggcgctaccacactggaaacaggcgtgcccagcagattttctggcagcggctctggcaccgactacaccctgacaatatccagcctccagcctgaggacttcgccacctactactgtcagcagagctggaacaccccttggacattcggccagggcaccaagctggaaatcaagagactcgaggggaaaccaattcccaaccctcttctgggactggattcaaccggcagcggcgaggacctgaagaacgtgttcccacctgaggtggccgtgttcgagcctagcgaggccgagatcagccacacccagaaagccaccctcgtgtgcctggctaccggcttctaccccgaccatgtggaactgtcttggtgggtcaacggcaaagaggtgcacagcggcgtgtctaccgacccccagccactgaaagaacagcccgccctgaacgacagccggtactgcctgagcagcagactgagagtgtccgccaccttctggcagaacccccggaaccacttcagatgccaggtgcagttctacggcctgagcgagaacgacgagtggacccaggacagagccaagcccgtgacccagatcgtgtctgccgaagcctggggcagagccgattgcggatcccagagcttcggcctgctggaccccaagctgtgctacctgctggatggcatcctgttcatctacggcgtgatcctgaccgccctgttcctgagagtgaagttcagcagaagcgccgacgcccctgcctaccagcagggacagaaccaactgtacaacgagctgaacctgggcagacgggaagagtacgacgtgctggacaagcggagaggcagggaccctgagatgggcggaaagccccagcggagaaagaacccccaggaaggactgtataacgaactccagaaagacaagatggccgaagcctacagcgagatcggcatgaagggcgagcggagaagaggcaagggccacgatggcctgtaccagggcctgagcaccgccaccaaggacacctatgacgccctgcacatgcaggccctgcctccaagaagggccaagcgatctggatctggagcaacaaacttctcactactcaaacaagcaggtgacgtggaggagaatcccgggcctactagtatggactggatttggcgcatccttttccttgtcggcgctgctaccggcgcccattcccagctccagttgcaagagagcggccctggcttggtaaaaccttccgagacccttagcctcacatgcacggttagtgggggcagcatttcctcaggtgattactattggggatggattcggcaacccccgggtaaaggattggagtggattggtcatatttattatagtggagcgacgtactacaacccaagtctcaaatccagggttacaatatccgtcgatacgagcaggaaccaattcagcttgaaactttctagtgtcaccgcagcagacacagccgtctattactgtacgcgggatgactccagtaattggcggtcccgagggcaagggacactggtcacggtctcctcatctggaggcggtggaagcggtggaggaggatctcaggttcagctgcaagagtctggcggaggacttgctcaagctggcggaagcctgagactgtcttgtgccgcctctggcagaaccttcagcatgggctggtttagacaggcccctggcaaagagagagagttcgtcgccgccatcacatacagcggcggcagcccttactacgcctcttctgtcagaggccggttcaccatcagccgggacaacgccaagaacaccgtgtacctccagatgaacagcctgaagccagaggacaccgccgtgtactactgtgccgccaatccaacctacggcagcgactggaatgccgagaattggggccagggcacccaagtgacagtgtctagtggatccggcggcggaggatctggcggaggcggatctgggggcggaggctctttcgaacaagttcagcttcaacagcctggcgctgagctggtcaaacctggcgcttctgtgaagatgagctgcaaagccagcggctacgccttcagcagctactggatcaactggatgaagcagaaacccggccagggactcgaatggatcggccaaatctatcccggcgacggcgacaccaactacaacggcaagttcaagggcagagccacactgaccgccgatacctctagcagcacagcctacatgcagctgagcagcctgaccagcgaagatagcgccgtgtacttctgtgcccggtccatcacaacagtcgtgggctgcgctatggactattggggccagggaacaagcgtgaccgtgtctagtacgcgtgagcagaaactgatctcggaagaggatctggggagcggcatccagaaccctgatcctgccgtgtaccagctgcgggatagcaagagcagcgacaagagcgtgtgtctgttcaccgacttcgacagccagaccaacgtgtcccagagcaaggactccgacgtgtacatcaccgataagaccgtgctggacatgcggagcatggacttcaagagcaactccgccgtggcctggtccaacaagtccgatttcgcctgcgccaacgccttcaacaacagcattatccccgaggacacattcttcccaagccccgagagcagctgcggtacccagagttttgggttgttggaccctaaattgtgctatctgttggacggaatcctgttcatttacggagtgatcctgaccgcattgttcctgaagagaggccggaagaagctgctgtacatcttcaagcagcctttcatgcggcccgtgcagaccacccaggaagaggacggctgctcctgccggttccccgaggaagaagaaggcggctgcgagctgcgggttaagttttccagatccgcagacgcacccgcttaccaacaagggcagaaccaactctacaatgaacttaatttggggcggagggaagagtacgacgttctggacaaaaggaggggacgagatcccgagatgggcggaaagcctcagcgaaggaagaatccgcaagaggggctttataacgaactccagaaagataaaatggcagaagcctatagtgagattgggatgaagggagaaaggaggaggggtaaaggtcacgatgggttgtaccaaggattgagcacagccactaaagatacctatgatgcgctccacatgcaggccctgccgccaaga

SEQ ID NO: 5173 - DNA, 3591 bp, Artificial Sequence
  Synthetic Polynucloetide
atggccttaccagtgaccgccttgctcctgccgctggccttgctgctccacgccgccaggccggacatccagatgacacagagccctagcagcctgtctgccagcgtgggagacagagtgaccatcacatgcaaggccagcgaccacatcaacaactggctggcctggtatcagcagaagcctggacaggcccctaagctgctgatctacggcgctaccacactggaaacaggcgtgcccagcagattttctggcagcggctctggcaccgactacaccctgacaatatccagcctccagcctgaggacttcgccacctactactgtcagcagagctggaacaccccttggacattcggccagggcaccaagctggaaatcaagagactcgaggggaaaccaattcccaaccctcttctgggactggattcaaccggcagcggcgaggacctgaagaacgtgttcccacctgaggtggccgtgttcgagcctagcgaggccgagatcagccacacccagaaagccaccctcgtgtgcctggctaccggcttctaccccgaccatgtggaactgtcttggtgggtcaacggcaaagaggtgcacagcggcgtgtctaccgacccccagccactgaaagaacagcccgccctgaacgacagccggtactgcctgagcagcagactgagagtgtccgccaccttctggcagaacccccggaaccacttcagatgccaggtgcagttctacggcctgagcgagaacgacgagtggacccaggacagagccaagcccgtgacccagatcgtgtctgccgaagcctggggcagagccgattgcggatcccagagcttcggcctgctggaccccaagctgtgctacctgctggatggcatcctgttcatctacggcgtgatcctgaccgccctgttcctgaaacggggcagaaagaaactcctgtatatattcaaacaaccatttatgagaccagtacaaactactcaagaggaagatggctgtagctgccgatttccagaagaagaagaaggaggatgtgaactgagagtgaagttcagcagaagcgccgacgcccctgcctaccagcagggacagaaccaactgtacaacgagctgaacctgggcagacgggaagagtacgacgtgctggacaagcggagaggcagggaccctgagatgggcggaaagccccagcggagaaagaacccccaggaaggactgtataacgaactccagaaagacaagatggccgaagcctacagcgagatcggcatgaagggcgagcggagaagaggcaagggccacgatggcctgtaccagggcctgagcaccgccaccaaggacacctatgacgccctgcacatgcaggccctgcctccaagaagggccaagcgatctggatctggagcaacaaacttctcactactcaaacaagcaggtgacgtggaggagaatcccgggcctactagtatggactggatttggcgcatccttttccttgtcggcgctgctaccggcgcccattcccagctccagttgcaagagagcggccctggcttggtaaaaccttccgagacccttagcctcacatgcacggttagtgggggcagcatttcctcaggtgattactattggggatggattcggcaacccccgggtaaaggattggagtggattggtcatatttattatagtggagcgacgtactacaacccaagtctcaaatccagggttacaatatccgtcgatacgagcaggaaccaattcagcttgaaactttctagtgtcaccgcagcagacacagccgtctattactgtacgcgggatgactccagtaattggcggtcccgagggcaagggacactggtcacggtctcctcatctggaggcggtggaagcggtggaggaggatctcaggttcagctgcaagagtctggcggaggacttgctcaagctggcggaagcctgagactgtcttgtgccgcctctggcagaaccttcagcatgggctggtttagacaggcccctggcaaagagagagagttcgtcgccgccatcacatacagcggcggcagcccttactacgcctcttctgtcagaggccggttcaccatcagccgggacaacgccaagaacaccgtgtacctccagatgaacagcctgaagccagaggacaccgccgtgtactactgtgccgccaatccaacctacggcagcgactggaatgccgagaattggggccagggcacccaagtgacagtgtctagtggatccggcggcggaggatctggcggaggcggatctgggggcggaggctctttcgaacaagttcagcttcaacagcctggcgctgagctggtcaaacctggcgcttctgtgaagatgagctgcaaagccagcggctacgccttcagcagctactggatcaactggatgaagcagaaacccggccagggactcgaatggatcggccaaatctatcccggcgacggcgacaccaactacaacggcaagttcaagggcagagccacactgaccgccgatacctctagcagcacagcctacatgcagctgagcagcctgaccagcgaagatagcgccgtgtacttctgtgcccggtccatcacaacagtcgtgggctgcgctatggactattggggccagggaacaagcgtgaccgtgtctagtacgcgtgagcagaaactgatctcggaagaggatctggggagcggcatccagaaccctgatcctgccgtgtaccagctgcgggatagcaagagcagcgacaagagcgtgtgtctgttcaccgacttcgacagccagaccaacgtgtcccagagcaaggactccgacgtgtacatcaccgataagaccgtgctggacatgcggagcatggacttcaagagcaactccgccgtggcctggtccaacaagtccgatttcgcctgcgccaacgccttcaacaacagcattatccccgaggacacattcttcccaagccccgagagcagctgcggtacccagagttttgggttgttggaccctaaattgtgctatctgttggacggaatcctgttcatttacggagtgatcctgaccgcattgttcctgaagagaggccggaagaagctgctgtacatcttcaagcagcctttcatgcggcccgtgcagaccacccaggaagaggacggctgctcctgccggttccccgaggaagaagaaggcggctgcgagctgcgggttaagttttccagatccgcagacgcacccgcttaccaacaagggcagaaccaactctacaatgaacttaatttggggcggagggaagagtacgacgttctggacaaaaggaggggacgagatcccgagatgggcggaaagcctcagcgaaggaagaatccgcaagaggggctttataacgaactccagaaagataaaatggcagaagcctatagtgagattgggatgaagggagaaaggaggaggggtaaaggtcacgatgggttgtaccaaggattgagcacagccactaaagatacctatgatgcgctccacatgcaggccctgccgccaaga

SEQ ID NO: 5174 - DNA, 3264 bp, Artificial Sequence
  Synthetic Polynucloetide
atggccttaccagtgaccgccttgctcctgccgctggccttgctgctccacgccgccaggccggacatccagatgacacagagccctagcagcctgtctgccagcgtgggagacagagtgaccatcacatgcaaggccagcgaccacatcaacaactggctggcctggtatcagcagaagcctggacaggcccctaagctgctgatctacggcgctaccacactggaaacaggcgtgcccagcagattttctggcagcggctctggcaccgactacaccctgacaatatccagcctccagcctgaggacttcgccacctactactgtcagcagagctggaacaccccttggacattcggccagggcaccaagctggaaatcaagagactcgagcagagcttcggcctgctggaccccaagctgtgctacctgctggatggcatcctgttcatctacggcgtgatcctgaccgccctgttcctgagagtgaagttcagcagaagcgccgacgcccctgcctaccagcagggacagaaccaactgtacaacgagctgaacctgggcagacgggaagagtacgacgtgctggacaagcggagaggcagggaccctgagatgggcggaaagccccagcggagaaagaacccccaggaaggactgtataacgaactccagaaagacaagatggccgaagcctacagcgagatcggcatgaagggcgagcggagaagaggcaagggccacgatggcctgtaccagggcctgagcaccgccaccaaggacacctatgacgccctgcacatgcaggccctgcctccaagaagggccaagcgatctggatctggagcaacaaacttctcactactcaaacaagcaggtgacgtggaggagaatcccgggcctactagtatggactggatttggcgcatccttttccttgtcggcgctgctaccggcgcccattcccagctccagttgcaagagagcggccctggcttggtaaaaccttccgagacccttagcctcacatgcacggttagtgggggcagcatttcctcaggtgattactattggggatggattcggcaacccccgggtaaaggattggagtggattggtcatatttattatagtggagcgacgtactacaacccaagtctcaaatccagggttacaatatccgtcgatacgagcaggaaccaattcagcttgaaactttctagtgtcaccgcagcagacacagccgtctattactgtacgcgggatgactccagtaattggcggtcccgagggcaagggacactggtcacggtctcctcatctggaggcggtggaagcggtggaggaggatctcaggttcagctgcaagagtctggcggaggacttgctcaagctggcggaagcctgagactgtcttgtgccgcctctggcagaaccttcagcatgggctggtttagacaggcccctggcaaagagagagagttcgtcgccgccatcacatacagcggcggcagcccttactacgcctcttctgtcagaggccggttcaccatcagccgggacaacgccaagaacaccgtgtacctccagatgaacagcctgaagccagaggacaccgccgtgtactactgtgccgccaatccaacctacggcagcgactggaatgccgagaattggggccagggcacccaagtgacagtgtctagtggatccggcggcggaggatctggcggaggcggatctgggggcggaggctctttcgaacaagttcagcttcaacagcctggcgctgagctggtcaaacctggcgcttctgtgaagatgagctgcaaagccagcggctacgccttcagcagctactggatcaactggatgaagcagaaacccggccagggactcgaatggatcggccaaatctatcccggcgacggcgacaccaactacaacggcaagttcaagggcagagccacactgaccgccgatacctctagcagcacagcctacatgcagctgagcagcctgaccagcgaagatagcgccgtgtacttctgtgcccggtccatcacaacagtcgtgggctgcgctatggactattggggccagggaacaagcgtgaccgtgtctagtacgcgtcagagttttgggttgttggaccctaaattgtgctatctgttggacggaatcctgttcatttacggagtgatcctgaccgcattgttcctgcgggttaagttttccagatccgcagacgcacccgcttaccaacaagggcagaaccaactctacaatgaacttaatttggggcggagggaagagtacgacgttctggacaaaaggaggggacgagatcccgagatgggcggaaagcctcagcgaaggaagaatccgcaagaggggctttataacgaactccagaaagataaaatggcagaagcctatagtgagattgggatgaagggagaaaggaggaggggtaaaggtcacgatgggttgtaccaaggattgagcacagccactaaagatacctatgatgcgctccacatgcaggccctgccgccaagacgcgccaagagaagcggatctggcgtgaagcagaccctgaatttcgacctgctgaagctggctggcgacgtggaatccaacccaggcccttctagaggccatatgaccgagtacaagcccacggtgcgcctcgccacccgcgacgacgtccccagggccgtacgcaccctcgccgccgcgttcgccgactaccccgccacgcgccacaccgtcgatccggaccgccacatcgagcgggtcaccgagctgcaagaactcttcctcacgcgcgtcgggctcgacatcggcaaggtgtgggtcgcggacgacggcgccgcggtggcggtctggaccacgccggagagcgtcgaagcgggggcggtgttcgccgagatcggcccgcgcatggccgagttgagcggttcccggctggccgcgcagcaacagatggaaggcctcctggcgccgcaccggcccaaggagcccgcgtggttcctggccaccgtcggcgtctcgcccgaccaccagggcaagggtctgggcagcgccgtcgtgctccccggagtggaggcggccgagcgcgccggggtgcccgccttcctggagacctccgcgccccgcaacctccccttctacgagcggctcggcttcaccgtcaccgccgacgtcgaggtgcccgaaggaccgcgcacctggtgcatgacccgcaagcccggtgcctga

SEQ ID NO: 5175 - DNA, 2736 bp, Artificial Sequence
  Synthetic Polynucloetide
atggccttaccagtgaccgccttgctcctgccgctggccttgctgctccacgccgccaggccggacatccagatgacacagagccctagcagcctgtctgccagcgtgggagacagagtgaccatcacatgcaaggccagcgaccacatcaacaactggctggcctggtatcagcagaagcctggacaggcccctaagctgctgatctacggcgctaccacactggaaacaggcgtgcccagcagattttctggcagcggctctggcaccgactacaccctgacaatatccagcctccagcctgaggacttcgccacctactactgtcagcagagctggaacaccccttggacattcggccagggcaccaagctggaaatcaagagactcgagggacagcctaaggccaatcctaccgtgacactgttccctccaagcagcgaagaactccaggccaacaaggccacacttgtgtgcctgatctccgacttctaccctggggctgtgacagtggcttggaaggccgatggatctcctgtgaaagccggcgtggaaaccaccaagccatccaagcagagcaacaacaaatacgccgccagctcctacctgagcctgacacctgagcagtggaagtcccacagatcctacagctgccaagtgacccacgaaggcagcaccgtggaaaagacagtggcccctacagagtgcagccccatcaagaccgatgtgattacaatggaccccaaggacaactgctccaaggacgccaacgataccctgctgctccagctgaccaacaccagcgcctactacatgtacttgttgctgctgctgaagtccgtggtgtacttcgccatcatcacatgctgcctgctgcggagaaccgccttctgctgcaacggcgagaagtctagggccaagcgatctggatctggagcaacaaacttctcactactcaaacaagcaggtgacgtggaggagaatcccgggcctactagtatggactggatttggcgcatccttttccttgtcggcgctgctaccggcgcccattcccagctccagttgcaagagagcggccctggcttggtaaaaccttccgagacccttagcctcacatgcacggttagtgggggcagcatttcctcaggtgattactattggggatggattcggcaacccccgggtaaaggattggagtggattggtcatatttattatagtggagcgacgtactacaacccaagtctcaaatccagggttacaatatccgtcgatacgagcaggaaccaattcagcttgaaactttctagtgtcaccgcagcagacacagccgtctattactgtacgcgggatgactccagtaattggcggtcccgagggcaagggacactggtcacggtctcctcatctggaggcggtggaagcggtggaggaggatctcaggttcagctgcaagagtctggcggaggacttgctcaagctggcggaagcctgagactgtcttgtgccgcctctggcagaaccttcagcatgggctggtttagacaggcccctggcaaagagagagagttcgtcgccgccatcacatacagcggcggcagcccttactacgcctcttctgtcagaggccggttcaccatcagccgggacaacgccaagaacaccgtgtacctccagatgaacagcctgaagccagaggacaccgccgtgtactactgtgccgccaatccaacctacggcagcgactggaatgccgagaattggggccagggcacccaagtgacagtgtctagtggatccggcggcggaggatctggcggaggcggatctgggggcggaggctctttcgaacaagttcagcttcaacagcctggcgctgagctggtcaaacctggcgcttctgtgaagatgagctgcaaagccagcggctacgccttcagcagctactggatcaactggatgaagcagaaacccggccagggactcgaatggatcggccaaatctatcccggcgacggcgacaccaactacaacggcaagttcaagggcagagccacactgaccgccgatacctctagcagcacagcctacatgcagctgagcagcctgaccagcgaagatagcgccgtgtacttctgtgcccggtccatcacaacagtcgtgggctgcgctatggactattggggccagggaacaagcgtgaccgtgtctagtacgcgtgcctctacaaagggaccctccgtgtttcctctggctcccagcagcaagtctacaagcggaggaacagccgctctgggctgcctggtcaaggattactttcccgagcctgtgaccgtgtcctggaatagcggagcactgacaagcggcgtgcacacctttccagccgtgctgcaaagcagcggcctgtactctctgagcagcgtggtcacagtgcctagctctagcctgggcacccagacctacatctgcaatgtgaaccacaagcctagcaacaccaaggtggacaagagagtggaacccaagagctgtgaagtgaaaaccgactccaccgaccacgtgaagcccaaagagacagagaacaccaagcagcccagcaagagctgccacaagcccaaggccatcgtgcacaccgagaaagtgaacatgatgagcctgaccgtgctgggcctgcggatgctgttcgccaaaaccgtggccgtgaacttcctgctgaccgccaagctgttcttcctc

SEQ ID NO: 5176 - DNA, 2670 bp, Artificial Sequence
  Synthetic Polynucloetide
atggccttaccagtgaccgccttgctcctgccgctggccttgctgctccacgccgccaggccggacatccagatgacacagagccctagcagcctgtctgccagcgtgggagacagagtgaccatcacatgcaaggccagcgaccacatcaacaactggctggcctggtatcagcagaagcctggacaggcccctaagctgctgatctacggcgctaccacactggaaacaggcgtgcccagcagattttctggcagcggctctggcaccgactacaccctgacaatatccagcctccagcctgaggacttcgccacctactactgtcagcagagctggaacaccccttggacattcggccagggcaccaagctggaaatcaagagactcgagggacagcctaaggccaatcctaccgtgacactgttccctccaagcagcgaagaactccaggccaacaaggccacacttgtgtgcctgatctccgacttctaccctggggctgtgacagtggcttggaaggccgatggatctcctgtgaaagccggcgtggaaaccaccaagccatccaagcagagcaacaacaaatacgccgccagctcctacctgagcctgacacctgagcagtggaagtcccacagatcctacagctgccaagtgacccacgaaggcagcaccgtggaaaagacagtggcccctacagagtgcagcggcagagccgattgcggcatcaccagcgccagctaccaccagggcgtgctgagcgccaccatcctgtacgagatcctgctgggcaaggccaccctgtacgccgtgctggtgtctgccctggtgctgatggctatggtcaagcggaaggacagccggggaagggccaagcgatctggatctggagcaacaaacttctcactactcaaacaagcaggtgacgtggaggagaatcccgggcctactagtatggactggatttggcgcatccttttccttgtcggcgctgctaccggcgcccattcccagctccagttgcaagagagcggccctggcttggtaaaaccttccgagacccttagcctcacatgcacggttagtgggggcagcatttcctcaggtgattactattggggatggattcggcaacccccgggtaaaggattggagtggattggtcatatttattatagtggagcgacgtactacaacccaagtctcaaatccagggttacaatatccgtcgatacgagcaggaaccaattcagcttgaaactttctagtgtcaccgcagcagacacagccgtctattactgtacgcgggatgactccagtaattggcggtcccgagggcaagggacactggtcacggtctcctcatctggaggcggtggaagcggtggaggaggatctcaggttcagctgcaagagtctggcggaggacttgctcaagctggcggaagcctgagactgtcttgtgccgcctctggcagaaccttcagcatgggctggtttagacaggcccctggcaaagagagagagttcgtcgccgccatcacatacagcggcggcagcccttactacgcctcttctgtcagaggccggttcaccatcagccgggacaacgccaagaacaccgtgtacctccagatgaacagcctgaagccagaggacaccgccgtgtactactgtgccgccaatccaacctacggcagcgactggaatgccgagaattggggccagggcacccaagtgacagtgtctagtggatccggcggcggaggatctggcggaggcggatctgggggcggaggctctttcgaacaagttcagcttcaacagcctggcgctgagctggtcaaacctggcgcttctgtgaagatgagctgcaaagccagcggctacgccttcagcagctactggatcaactggatgaagcagaaacccggccagggactcgaatggatcggccaaatctatcccggcgacggcgacaccaactacaacggcaagttcaagggcagagccacactgaccgccgatacctctagcagcacagcctacatgcagctgagcagcctgaccagcgaagatagcgccgtgtacttctgtgcccggtccatcacaacagtcgtgggctgcgctatggactattggggccagggaacaagcgtgaccgtgtctagtacgcgtgcctctacaaagggaccctccgtgtttcctctggctcccagcagcaagtctacaagcggaggaacagccgctctgggctgcctggtcaaggattactttcccgagcctgtgaccgtgtcctggaatagcggagcactgacaagcggcgtgcacacctttccagccgtgctgcaaagcagcggcctgtactctctgagcagcgtggtcacagtgcctagctctagcctgggcacccagacctacatctgcaatgtgaaccacaagcctagcaacaccaaggtggacaagagagtggaacccaagagctgtatccccgaggacacattcttcccaagcagcgacgtgccctgcgacgtgaagctggtggaaaagagcttcgagacagacaccaacctgaacttccagaacctgagcgtgatcggcttcagaatcctgctgctgaaagtggccggctttaacctgctgatgaccctgcggctgtggtccagc

SEQ ID NO: 5177 - DNA, 2670 bp, Artificial Sequence
  Synthetic Polynucloetide
atggccttaccagtgaccgccttgctcctgccgctggccttgctgctccacgccgccaggccggacatccagatgacacagagccctagcagcctgtctgccagcgtgggagacagagtgaccatcacatgcaaggccagcgaccacatcaacaactggctggcctggtatcagcagaagcctggacaggcccctaagctgctgatctacggcgctaccacactggaaacaggcgtgcccagcagattttctggcagcggctctggcaccgactacaccctgacaatatccagcctccagcctgaggacttcgccacctactactgtcagcagagctggaacaccccttggacattcggccagggcaccaagctggaaatcaagagactcgagggacagcctaaggccaatcctaccgtgacactgttccctccaagcagcgaagaactccaggccaacaaggccacacttgtgtgcctgatctccgacttctaccctggggctgtgacagtggcttggaaggccgatggatctcctgtgaaagccggcgtggaaaccaccaagccatccaagcagagcaacaacaaatacgccgccagctcctacctgagcctgacacctgagcagtggaagtcccacagatcctacagctgccaagtgacccacgaaggcagcaccgtggaaaagacagtggcccctacagagtgcagcggcagagccgattgcggctttaccagcgagagctaccagcagggcgtgctgagcgccaccatcctgtacgagatcctgctgggcaaggccaccctgtacgccgtgctggtgtctgccctggtgctgatggctatggtcaagcggaaggacagccggggaagggccaagcgatctggatctggagcaacaaacttctcactactcaaacaagcaggtgacgtggaggagaatcccgggcctactagtatggactggatttggcgcatccttttccttgtcggcgctgctaccggcgcccattcccagctccagttgcaagagagcggccctggcttggtaaaaccttccgagacccttagcctcacatgcacggttagtgggggcagcatttcctcaggtgattactattggggatggattcggcaacccccgggtaaaggattggagtggattggtcatatttattatagtggagcgacgtactacaacccaagtctcaaatccagggttacaatatccgtcgatacgagcaggaaccaattcagcttgaaactttctagtgtcaccgcagcagacacagccgtctattactgtacgcgggatgactccagtaattggcggtcccgagggcaagggacactggtcacggtctcctcatctggaggcggtggaagcggtggaggaggatctcaggttcagctgcaagagtctggcggaggacttgctcaagctggcggaagcctgagactgtcttgtgccgcctctggcagaaccttcagcatgggctggtttagacaggcccctggcaaagagagagagttcgtcgccgccatcacatacagcggcggcagcccttactacgcctcttctgtcagaggccggttcaccatcagccgggacaacgccaagaacaccgtgtacctccagatgaacagcctgaagccagaggacaccgccgtgtactactgtgccgccaatccaacctacggcagcgactggaatgccgagaattggggccagggcacccaagtgacagtgtctagtggatccggcggcggaggatctggcggaggcggatctgggggcggaggctctttcgaacaagttcagcttcaacagcctggcgctgagctggtcaaacctggcgcttctgtgaagatgagctgcaaagccagcggctacgccttcagcagctactggatcaactggatgaagcagaaacccggccagggactcgaatggatcggccaaatctatcccggcgacggcgacaccaactacaacggcaagttcaagggcagagccacactgaccgccgatacctctagcagcacagcctacatgcagctgagcagcctgaccagcgaagatagcgccgtgtacttctgtgcccggtccatcacaacagtcgtgggctgcgctatggactattggggccagggaacaagcgtgaccgtgtctagtacgcgtgcctctacaaagggaccctccgtgtttcctctggctcccagcagcaagtctacaagcggaggaacagccgctctgggctgcctggtcaaggattactttcccgagcctgtgaccgtgtcctggaatagcggagcactgacaagcggcgtgcacacctttccagccgtgctgcaaagcagcggcctgtactctctgagcagcgtggtcacagtgcctagctctagcctgggcacccagacctacatctgcaatgtgaaccacaagcctagcaacaccaaggtggacaagagagtggaacccaagagctgtatccccgaggacacattcttcccaagccccgagagcagctgcgacgtgaagctggtggaaaagagcttcgagacagacaccaacctgaacttccagaacctgagcgtgatcggcttcagaatcctgctgctgaaagtggccggctttaacctgctgatgaccctgcggctgtggtccagc

SEQ ID NO: 5178 - DNA, 2160 bp, Artificial Sequence
  Synthetic Polynucloetide
atggactggatttggcgcatccttttccttgtcggcgctgctaccggcgcccattcccagctccagttgcaagagagcggccctggcttggtaaaaccttccgagacccttagcctcacatgcacggttagtgggggcagcatttcctcaggtgattactattggggatggattcggcaacccccgggtaaaggattggagtggattggtcatatttattatagtggagcgacgtactacaacccaagtctcaaatccagggttacaatatccgtcgatacgagcaggaaccaattcagcttgaaactttctagtgtcaccgcagcagacacagccgtctattactgtacgcgggatgactccagtaattggcggtcccgagggcaagggacactggtcacggtctcctcatctggaggcggtggaagcggtggaggaggatctcaggttcagctgcaagagtctggcggaggacttgctcaagctggcggaagcctgagactgtcttgtgccgcctctggcagaaccttcagcatgggctggtttagacaggcccctggcaaagagagagagttcgtcgccgccatcacatacagcggcggcagcccttactacgcctcttctgtcagaggccggttcaccatcagccgggacaacgccaagaacaccgtgtacctccagatgaacagcctgaagccagaggacaccgccgtgtactactgtgccgccaatccaacctacggcagcgactggaatgccgagaattggggccagggcacccaagtgacagtgtctagtggatccggcggcggaggatctggcggaggcggatctgggggcggaggctctttcgaacaagttcagcttcaacagcctggcgctgagctggtcaaacctggcgcttctgtgaagatgagctgcaaagccagcggctacgccttcagcagctactggatcaactggatgaagcagaaacccggccagggactcgaatggatcggccaaatctatcccggcgacggcgacaccaactacaacggcaagttcaagggcagagccacactgaccgccgatacctctagcagcacagcctacatgcagctgagcagcctgaccagcgaagatagcgccgtgtacttctgtgcccggtccatcacaacagtcgtgggctgcgctatggactattggggccagggaacaagcgtgaccgtgtctagtggcggaggcggaagtggaggcggaggatctggcggcggaggctctgacatccagatgacacagagccctagcagcctgtctgccagcgtgggagacagagtgaccatcacatgcaaggccagcgaccacatcaacaactggctggcctggtatcagcagaagcctggacaggcccctaagctgctgatctacggcgctaccacactggaaacaggcgtgcccagcagattttctggcagcggctctggcaccgactacaccctgacaatatccagcctccagcctgaggacttcgccacctactactgtcagcagagctggaacaccccttggacattcggccagggcaccaagctggaaatcaagagaacgcgtggcggaggcagcgacggtaacgaggagatgggaggaatcactcaaaccccttacaaagtctcaatttcaggaacaactgttatccttacatgtccccagtatcctggcagcgagatcctttggcagcataacgacaagaatatagggggagatgaagacgataagaatatcggatctgacgaggatcacttgagcctgaaagagttctccgagcttgaacaaagcggatattatgtgtgctatccgcgcgggtcaaagccggaagacgctaacttttacctttatctccgagccagagtgtgcgaaaattgcatggaaatggacgttatgtccgttgctacaatagttatcgtagatatatgcatcacgggtggactgcttctgctggtttattattggtccaagaatagaaaggccaaagctaaacccgtgaccagaggcgctggcgcaggcggaaggcaaaggggacaaaacaaagaacggccaccaccagtgccaaatccagattatgagcctattcggaaaggacagagggacctgtactctggcctgaatcagagaagaatc

SEQ ID NO: 5179 - DNA, 2055 bp, Artificial Sequence
  Synthetic Polynucloetide
atggactggatttggcgcatccttttccttgtcggcgctgctaccggcgcccattcccagctccagttgcaagagagcggccctggcttggtaaaaccttccgagacccttagcctcacatgcacggttagtgggggcagcatttcctcaggtgattactattggggatggattcggcaacccccgggtaaaggattggagtggattggtcatatttattatagtggagcgacgtactacaacccaagtctcaaatccagggttacaatatccgtcgatacgagcaggaaccaattcagcttgaaactttctagtgtcaccgcagcagacacagccgtctattactgtacgcgggatgactccagtaattggcggtcccgagggcaagggacactggtcacggtctcctcatctggaggcggtggaagcggtggaggaggatctcaggttcagctgcaagagtctggcggaggacttgctcaagctggcggaagcctgagactgtcttgtgccgcctctggcagaaccttcagcatgggctggtttagacaggcccctggcaaagagagagagttcgtcgccgccatcacatacagcggcggcagcccttactacgcctcttctgtcagaggccggttcaccatcagccgggacaacgccaagaacaccgtgtacctccagatgaacagcctgaagccagaggacaccgccgtgtactactgtgccgccaatccaacctacggcagcgactggaatgccgagaattggggccagggcacccaagtgacagtgtctagtggatccggcggcggaggatctggcggaggcggatctgggggcggaggctctttcgaacaagttcagcttcaacagcctggcgctgagctggtcaaacctggcgcttctgtgaagatgagctgcaaagccagcggctacgccttcagcagctactggatcaactggatgaagcagaaacccggccagggactcgaatggatcggccaaatctatcccggcgacggcgacaccaactacaacggcaagttcaagggcagagccacactgaccgccgatacctctagcagcacagcctacatgcagctgagcagcctgaccagcgaagatagcgccgtgtacttctgtgcccggtccatcacaacagtcgtgggctgcgctatggactattggggccagggaacaagcgtgaccgtgtctagtggcggaggcggaagtggaggcggaggatctggcggcggaggctctgacatccagatgacacagagccctagcagcctgtctgccagcgtgggagacagagtgaccatcacatgcaaggccagcgaccacatcaacaactggctggcctggtatcagcagaagcctggacaggcccctaagctgctgatctacggcgctaccacactggaaacaggcgtgcccagcagattttctggcagcggctctggcaccgactacaccctgacaatatccagcctccagcctgaggacttcgccacctactactgtcagcagagctggaacaccccttggacattcggccagggcaccaagctggaaatcaagagaacgcgtggcggaggcagcttcaagatccccatcgaggaactggaagatcgggtgttcgtgaactgcaacacctctatcacctgggtggaaggcaccgtgggaacactgctgagcgacatcaccagactggacctcggcaagcggattctggaccctcggggcatctacagatgcaacggcaccgacatctacaaggacaaagaaagcaccgtgcaggtccactacagaatgtgccagtcctgcgtggaactggaccctgctacagtggccggcatcatcgtgaccgatgtgatcgctactctgctgctggctctgggagtgttctgcttcgccggacacgaaacaggcagactgtctggcgctgccgatacacaggccctgctgagaaacgaccaagtgtatcagcccctgcgcgacagagatgatgcccagtattctcacctcggcggcaactgggctagaaacaag

SEQ ID NO: 5180 - DNA, 2085 bp, Artificial Sequence
  Synthetic Polynucloetide
atggactggatttggcgcatccttttccttgtcggcgctgctaccggcgcccattcccagctccagttgcaagagagcggccctggcttggtaaaaccttccgagacccttagcctcacatgcacggttagtgggggcagcatttcctcaggtgattactattggggatggattcggcaacccccgggtaaaggattggagtggattggtcatatttattatagtggagcgacgtactacaacccaagtctcaaatccagggttacaatatccgtcgatacgagcaggaaccaattcagcttgaaactttctagtgtcaccgcagcagacacagccgtctattactgtacgcgggatgactccagtaattggcggtcccgagggcaagggacactggtcacggtctcctcatctggaggcggtggaagcggtggaggaggatctcaggttcagctgcaagagtctggcggaggacttgctcaagctggcggaagcctgagactgtcttgtgccgcctctggcagaaccttcagcatgggctggtttagacaggcccctggcaaagagagagagttcgtcgccgccatcacatacagcggcggcagcccttactacgcctcttctgtcagaggccggttcaccatcagccgggacaacgccaagaacaccgtgtacctccagatgaacagcctgaagccagaggacaccgccgtgtactactgtgccgccaatccaacctacggcagcgactggaatgccgagaattggggccagggcacccaagtgacagtgtctagtggatccggcggcggaggatctggcggaggcggatctgggggcggaggctctttcgaacaagttcagcttcaacagcctggcgctgagctggtcaaacctggcgcttctgtgaagatgagctgcaaagccagcggctacgccttcagcagctactggatcaactggatgaagcagaaacccggccagggactcgaatggatcggccaaatctatcccggcgacggcgacaccaactacaacggcaagttcaagggcagagccacactgaccgccgatacctctagcagcacagcctacatgcagctgagcagcctgaccagcgaagatagcgccgtgtacttctgtgcccggtccatcacaacagtcgtgggctgcgctatggactattggggccagggaacaagcgtgaccgtgtctagtggcggaggcggaagtggaggcggaggatctggcggcggaggctctgacatccagatgacacagagccctagcagcctgtctgccagcgtgggagacagagtgaccatcacatgcaaggccagcgaccacatcaacaactggctggcctggtatcagcagaagcctggacaggcccctaagctgctgatctacggcgctaccacactggaaacaggcgtgcccagcagattttctggcagcggctctggcaccgactacaccctgacaatatccagcctccagcctgaggacttcgccacctactactgtcagcagagctggaacaccccttggacattcggccagggcaccaagctggaaatcaagagaacgcgtggcggaggcagccagagcatcaagggcaaccacctggtcaaggtgtacgactaccaagaggacggcagcgtgctgctgacatgtgatgccgaggccaagaacatcacctggtttaaggacggcaagatgatcggcttcctgaccgaggacaagaagaagtggaacctgggcagcaacgctaaggaccccagaggcatgtatcagtgcaagggcagccagaacaagagcaagcccctccaggtgtactaccggatgtgccagaactgcatcgagctgaacgccgctaccatcagcggctttctgttcgccgagatcgtgtccatcttcgtgctggccgtgggcgtgtactttatcgctggacaggatggcgtgcggcagagcagagcttccgataagcaaaccctgctgcctaacgaccagctgtaccagcctctgaaggacagagaggacgaccagtacagccacctccagggcaatcagctgagaagaaac

SEQ ID NO: 5181 - DNA, 2034 bp, Artificial Sequence
  Synthetic Polynucloetide
atggactggatttggcgcatccttttccttgtcggcgctgctaccggcgcccattcccagctccagttgcaagagagcggccctggcttggtaaaaccttccgagacccttagcctcacatgcacggttagtgggggcagcatttcctcaggtgattactattggggatggattcggcaacccccgggtaaaggattggagtggattggtcatatttattatagtggagcgacgtactacaacccaagtctcaaatccagggttacaatatccgtcgatacgagcaggaaccaattcagcttgaaactttctagtgtcaccgcagcagacacagccgtctattactgtacgcgggatgactccagtaattggcggtcccgagggcaagggacactggtcacggtctcctcatctggaggcggtggaagcggtggaggaggatctcaggttcagctgcaagagtctggcggaggacttgctcaagctggcggaagcctgagactgtcttgtgccgcctctggcagaaccttcagcatgggctggtttagacaggcccctggcaaagagagagagttcgtcgccgccatcacatacagcggcggcagcccttactacgcctcttctgtcagaggccggttcaccatcagccgggacaacgccaagaacaccgtgtacctccagatgaacagcctgaagccagaggacaccgccgtgtactactgtgccgccaatccaacctacggcagcgactggaatgccgagaattggggccagggcacccaagtgacagtgtctagtggatccggcggcggaggatctggcggaggcggatctgggggcggaggctctttcgaacaagttcagcttcaacagcctggcgctgagctggtcaaacctggcgcttctgtgaagatgagctgcaaagccagcggctacgccttcagcagctactggatcaactggatgaagcagaaacccggccagggactcgaatggatcggccaaatctatcccggcgacggcgacaccaactacaacggcaagttcaagggcagagccacactgaccgccgatacctctagcagcacagcctacatgcagctgagcagcctgaccagcgaagatagcgccgtgtacttctgtgcccggtccatcacaacagtcgtgggctgcgctatggactattggggccagggaacaagcgtgaccgtgtctagtggcggaggcggaagtggaggcggaggatctggcggcggaggctctgacatccagatgacacagagccctagcagcctgtctgccagcgtgggagacagagtgaccatcacatgcaaggccagcgaccacatcaacaactggctggcctggtatcagcagaagcctggacaggcccctaagctgctgatctacggcgctaccacactggaaacaggcgtgcccagcagattttctggcagcggctctggcaccgactacaccctgacaatatccagcctccagcctgaggacttcgccacctactactgtcagcagagctggaacaccccttggacattcggccagggcaccaagctggaaatcaagagaacgcgtggcggaggcagccagagttttgggttgttggaccctaaattgtgctatctgttggacggaatcctgttcatttacggagtgatcctgaccgcattgttcctgcgggttaagttttccagatccgcagacgcacccgcttaccaacaagggcagaaccaactctacaatgaacttaatttggggcggagggaagagtacgacgttctggacaaaaggaggggacgagatcccgagatgggcggaaagcctcagcgaaggaagaatccgcaagaggggctttataacgaactccagaaagataaaatggcagaagcctatagtgagattgggatgaagggagaaaggaggaggggtaaaggtcacgatgggttgtaccaaggattgagcacagccactaaagatacctatgatgcgctccacatgcaggccctgccgccaaga

SEQ ID NO: 5182 - DNA, 2145 bp, Artificial Sequence
  Synthetic Polynucloetide
atggactggatttggcgcatccttttccttgtcggcgctgctaccggcgcccattcccagctccagttgcaagagagcggccctggcttggtaaaaccttccgagacccttagcctcacatgcacggttagtgggggcagcatttcctcaggtgattactattggggatggattcggcaacccccgggtaaaggattggagtggattggtcatatttattatagtggagcgacgtactacaacccaagtctcaaatccagggttacaatatccgtcgatacgagcaggaaccaattcagcttgaaactttctagtgtcaccgcagcagacacagccgtctattactgtacgcgggatgactccagtaattggcggtcccgagggcaagggacactggtcacggtctcctcatctggaggcggtggaagcggtggaggaggatctcaggttcagctgcaagagtctggcggaggacttgctcaagctggcggaagcctgagactgtcttgtgccgcctctggcagaaccttcagcatgggctggtttagacaggcccctggcaaagagagagagttcgtcgccgccatcacatacagcggcggcagcccttactacgcctcttctgtcagaggccggttcaccatcagccgggacaacgccaagaacaccgtgtacctccagatgaacagcctgaagccagaggacaccgccgtgtactactgtgccgccaatccaacctacggcagcgactggaatgccgagaattggggccagggcacccaagtgacagtgtctagtggatccggcggcggaggatctggcggaggcggatctgggggcggaggctctttcgaacaagttcagcttcaacagcctggcgctgagctggtcaaacctggcgcttctgtgaagatgagctgcaaagccagcggctacgccttcagcagctactggatcaactggatgaagcagaaacccggccagggactcgaatggatcggccaaatctatcccggcgacggcgacaccaactacaacggcaagttcaagggcagagccacactgaccgccgatacctctagcagcacagcctacatgcagctgagcagcctgaccagcgaagatagcgccgtgtacttctgtgcccggtccatcacaacagtcgtgggctgcgctatggactattggggccagggaacaagcgtgaccgtgtctagtacgcgtatccagaaccctgatcctgccgtgtaccagctgcgggatagcaagagcagcgacaagagcgtgtgtctgttcaccgacttcgacagccagaccaacgtgtcccagagcaaggactccgacgtgtacatcaccgataagaccgtgctggacatgcggagcatggacttcaagagcaactccgccgtggcctggtccaacaagtccgatttcgcctgcgccaacgccttcaacaacagcattatccccgaggacacattcttcccaagccccgagagcagctgcgacgtgaagctggtggaaaagagcttcgagacagacaccaacctgaacttccagaacctgagcgtgatcggcttcagaatcctgctgctgaaagtggccggctttaacctgctgatgaccctgcggctgtggtccagccgcgccaagagaagcggatctggcgtgaagcagaccctgaatttcgacctgctgaagctggctggcgacgtggaatccaacccaggcccttctagaggccatatggccaagcctttgtctcaagaagaatccaccctcattgaaagagcaacggctacaatcaacagcatccccatctctgaagactacagcgtcgccagcgcagctctctctagcgacggccgcatcttcactggtgtcaatgtatatcattttactgggggaccttgtgcagaactcgtggtgctgggcactgctgctgctgcggcagctggcaacctgacttgtatcgtcgcgatcggaaatgagaacaggggcatcttgagcccctgcggacggtgccgacaggtgcttctcgatctgcatcctgggatcaaagccatagtgaaggacagtgatggacagccgacggcagttgggattcgtgaattgctgccctctggttatgtgtgggagggctga

SEQ ID NO: 5183 - DNA, 1644 bp, Artificial Sequence
  Synthetic Polynucloetide
atggactggatttggcgcatccttttccttgtcggcgctgctaccggcgcccattcccagctccagttgcaagagagcggccctggcttggtaaaaccttccgagacccttagcctcacatgcacggttagtgggggcagcatttcctcaggtgattactattggggatggattcggcaacccccgggtaaaggattggagtggattggtcatatttattatagtggagcgacgtactacaacccaagtctcaaatccagggttacaatatccgtcgatacgagcaggaaccaattcagcttgaaactttctagtgtcaccgcagcagacacagccgtctattactgtacgcgggatgactccagtaattggcggtcccgagggcaagggacactggtcacggtctcctcatctggaggcggtggaagcggtggaggaggatctcaggttcagctgcaagagtctggcggaggacttgctcaagctggcggaagcctgagactgtcttgtgccgcctctggcagaaccttcagcatgggctggtttagacaggcccctggcaaagagagagagttcgtcgccgccatcacatacagcggcggcagcccttactacgcctcttctgtcagaggccggttcaccatcagccgggacaacgccaagaacaccgtgtacctccagatgaacagcctgaagccagaggacaccgccgtgtactactgtgccgccaatccaacctacggcagcgactggaatgccgagaattggggccagggcacccaagtgacagtgtctagtggatccggcggcggaggatctggcggaggcggatctgggggcggaggctctttcgaacaagttcagcttcaacagcctggcgctgagctggtcaaacctggcgcttctgtgaagatgagctgcaaagccagcggctacgccttcagcagctactggatcaactggatgaagcagaaacccggccagggactcgaatggatcggccaaatctatcccggcgacggcgacaccaactacaacggcaagttcaagggcagagccacactgaccgccgatacctctagcagcacagcctacatgcagctgagcagcctgaccagcgaagatagcgccgtgtacttctgtgcccggtccatcacaacagtcgtgggctgcgctatggactattggggccagggaacaagcgtgaccgtgtctagtacgcgtatccagaaccctgatcctgccgtgtaccagctgcgggatagcaagagcagcgacaagagcgtgtgtctgttcaccgacttcgacagccagaccaacgtgtcccagagcaaggactccgacgtgtacatcaccgataagaccgtgctggacatgcggagcatggacttcaagagcaactccgccgtggcctggtccaacaagtccgatttcgcctgcgccaacgccttcaacaacagcattatccccgaggacacattcttcccaagccccgagagcagctgcgacgtgaagctggtggaaaagagcttcgagacagacaccaacctgaacttccagaacctgagcgtgatcggcttcagaatcctgctgctgaaagtggccggctttaacctgctgatgaccctgcggctgtggtccagc

SEQ ID NO: 5184 - DNA, 2181 bp, Artificial Sequence
  Synthetic Polynucloetide
atggactggatttggcgcatccttttccttgtcggcgctgctaccggcgcccattcccagctccagttgcaagagagcggccctggcttggtaaaaccttccgagacccttagcctcacatgcacggttagtgggggcagcatttcctcaggtgattactattggggatggattcggcaacccccgggtaaaggattggagtggattggtcatatttattatagtggagcgacgtactacaacccaagtctcaaatccagggttacaatatccgtcgatacgagcaggaaccaattcagcttgaaactttctagtgtcaccgcagcagacacagccgtctattactgtacgcgggatgactccagtaattggcggtcccgagggcaagggacactggtcacggtctcctcatctggaggcggtggaagcggtggaggaggatctcaggttcagctgcaagagtctggcggaggacttgctcaagctggcggaagcctgagactgtcttgtgccgcctctggcagaaccttcagcatgggctggtttagacaggcccctggcaaagagagagagttcgtcgccgccatcacatacagcggcggcagcccttactacgcctcttctgtcagaggccggttcaccatcagccgggacaacgccaagaacaccgtgtacctccagatgaacagcctgaagccagaggacaccgccgtgtactactgtgccgccaatccaacctacggcagcgactggaatgccgagaattggggccagggcacccaagtgacagtgtctagtggatccggcggcggaggatctggcggaggcggatctgggggcggaggctctttcgaacaagttcagcttcaacagcctggcgctgagctggtcaaacctggcgcttctgtgaagatgagctgcaaagccagcggctacgccttcagcagctactggatcaactggatgaagcagaaacccggccagggactcgaatggatcggccaaatctatcccggcgacggcgacaccaactacaacggcaagttcaagggcagagccacactgaccgccgatacctctagcagcacagcctacatgcagctgagcagcctgaccagcgaagatagcgccgtgtacttctgtgcccggtccatcacaacagtcgtgggctgcgctatggactattggggccagggaacaagcgtgaccgtgtctagtacgcgtgagcagaaactgatctcggaagaggatgggagcggcatccagaaccctgatcctgccgtgtaccagctgcgggatagcaagagcagcgacaagagcgtgtgtctgttcaccgacttcgacagccagaccaacgtgtcccagagcaaggactccgacgtgtacatcaccgataagtgcgtgctggacatgcggagcatggacttcaagagcaactccgccgtggcctggtccaacaagtccgatttcgcctgcgccaacgccttcaacaacagcattatccccgaggacacattcttcccaagccccgagagcagctgcgacgtgaagctggtggaaaagagcttcgagacagacaccaacctgaacttccagaacctgagcgtgatcggcttcagaatcctgctgctgaaagtggccggctttaacctgctgatgaccctgcggctgtggtccagccgcgccaagagaagcggatctggcgtgaagcagaccctgaatttcgacctgctgaagctggctggcgacgtggaatccaacccaggcccttctagaggccatatggccaagcctttgtctcaagaagaatccaccctcattgaaagagcaacggctacaatcaacagcatccccatctctgaagactacagcgtcgccagcgcagctctctctagcgacggccgcatcttcactggtgtcaatgtatatcattttactgggggaccttgtgcagaactcgtggtgctgggcactgctgctgctgcggcagctggcaacctgacttgtatcgtcgcgatcggaaatgagaacaggggcatcttgagcccctgcggacggtgccgacaggtgcttctcgatctgcatcctgggatcaaagccatagtgaaggacagtgatggacagccgacggcagttgggattcgtgaattgctgccctctggttatgtgtgggagggctga

SEQ ID NO: 5185 - DNA, 1683 bp, Artificial Sequence
  Synthetic Polynucloetide
atggactggatttggcgcatccttttccttgtcggcgctgctaccggcgcccattcccagctccagttgcaagagagcggccctggcttggtaaaaccttccgagacccttagcctcacatgcacggttagtgggggcagcatttcctcaggtgattactattggggatggattcggcaacccccgggtaaaggattggagtggattggtcatatttattatagtggagcgacgtactacaacccaagtctcaaatccagggttacaatatccgtcgatacgagcaggaaccaattcagcttgaaactttctagtgtcaccgcagcagacacagccgtctattactgtacgcgggatgactccagtaattggcggtcccgagggcaagggacactggtcacggtctcctcatctggaggcggtggaagcggtggaggaggatctcaggttcagctgcaagagtctggcggaggacttgctcaagctggcggaagcctgagactgtcttgtgccgcctctggcagaaccttcagcatgggctggtttagacaggcccctggcaaagagagagagttcgtcgccgccatcacatacagcggcggcagcccttactacgcctcttctgtcagaggccggttcaccatcagccgggacaacgccaagaacaccgtgtacctccagatgaacagcctgaagccagaggacaccgccgtgtactactgtgccgccaatccaacctacggcagcgactggaatgccgagaattggggccagggcacccaagtgacagtgtctagtggatccggcggcggaggatctggcggaggcggatctgggggcggaggctctttcgaacaagttcagcttcaacagcctggcgctgagctggtcaaacctggcgcttctgtgaagatgagctgcaaagccagcggctacgccttcagcagctactggatcaactggatgaagcagaaacccggccagggactcgaatggatcggccaaatctatcccggcgacggcgacaccaactacaacggcaagttcaagggcagagccacactgaccgccgatacctctagcagcacagcctacatgcagctgagcagcctgaccagcgaagatagcgccgtgtacttctgtgcccggtccatcacaacagtcgtgggctgcgctatggactattggggccagggaacaagcgtgaccgtgtctagtacgcgtgagcagaaactgatctcggaagaggatgggagcggcatccagaaccctgatcctgccgtgtaccagctgcgggatagcaagagcagcgacaagagcgtgtgtctgttcaccgacttcgacagccagaccaacgtgtcccagagcaaggactccgacgtgtacatcaccgataagtgcgtgctggacatgcggagcatggacttcaagagcaactccgccgtggcctggtccaacaagtccgatttcgcctgcgccaacgccttcaacaacagcattatccccgaggacacattcttcccaagccccgagagcagctgcgacgtgaagctggtggaaaagagcttcgagacagacaccaacctgaacttccagaacctgagcgtgatcggcttcagaatcctgctgctgaaagtggccggctttaacctgctgatgaccctgcggctgtggtccagctga

SEQ ID NO: 5186 - DNA, 4176 bp, Artificial Sequence
  Synthetic Polynucloetide
atggccttaccagtgaccgccttgctcctgccgctggccttgctgctccacgccgccaggccggaggttcagctgcttgagtctggcggaggactggttcaacctggcggaagcctgagactgtcttgtgccgccagcggcttcacctttagcagctacgccatgagctgggtccgacaggctcctggcaaaggactggaatgggtgtccagcatcagcggcagcggcgactacatctactacgccgatagcgtgaagggcagattcaccatcagccgggacatcagcaagaacaccctgtacctccagatgaacagcctgagagccgaggacaccgccgtgtactactgtgccaaagaaggcaccggcgctaacagcagcctggccgattatagaggccagggcacactggtcaccgtgtctagtggcggaggaagcggcggaggatctcaggtccagctcgtcgagtccggcggcggcctcgtccaggccggcgactccgtcaccctctcctgcaccgcctccggccgcaccttctcctcctacgccctcgcctggttccgccagcgccccggcaaggagcgcgagttcgtcgccggcctccgctggggcggccccaccaactacgccgactccgtcaaggaccgcttcaccatctccggcgactccgccaagcacaccatgtacctccagatgaactccctcaagcccgaggacaccgccgtctactactgcggctacaaccccggcggctgggccgtcccctcccagtacgagtacgactcctggggccagggcacccaggtcaccgtctcctccggtaccggcggaggcggatctggcggcggaggtagcggtggcggaggatctgaattcgacatccagatgacacagagccctagcagcctgtctgccagcgtgggagacagagtgaccatcacatgcaaggccagcgaccacatcaacaactggctggcctggtatcagcagaagcctggacaggcccctaagctgctgatctacggcgctaccacactggaaacaggcgtgcccagcagattttctggcagcggctctggcaccgactacaccctgacaatatccagcctccagcctgaggacttcgccacctactactgtcagcagagctggaacaccccttggacattcggccagggcaccaagctggaaatcaagagactcgagatccagaaccctgatcctgccgtgtaccagctgcgggatagcaagagcagcgacaagagcgtgtgtctgttcaccgacttcgacagccagaccaacgtgtcccagagcaaggactccgacgtgtacatcaccgataagtgcgtgctggacatgcggagcatggacttcaagagcaactccgccgtggcctggtccaacaagtccgatttcgcctgcgccaacgccttcaacaacagcattatccccgaggacacattcttcccaagcagcgacgtgccctgcgacgtgaagctggtggaaaagagcttcgagacagacaccaacctgaacttccagaacctgagcgtgatcggcttcagaatcctgctgctgaaagtggccggctttaacctgctgatgaccctgcggctgtggtccagccgcgccaagagaagcggatctggcgtgaagcagaccctgaatttcgacctgctgaagctggctggcgacgtggaatccaacccaggccctactagtatggactggatttggcgcatccttttccttgtcggcgctgctaccggcgcccattcccagctccagttgcaagagagcggccctggcttggtaaaaccttccgagacccttagcctcacatgcacggttagtgggggcagcatttcctcaggtgattactattggggatggattcggcaacccccgggtaaaggattggagtggattggtcatatttattatagtggagcgacgtactacaacccaagtctcaaatccagggttacaatatccgtcgatacgagcaggaaccaattcagcttgaaactttctagtgtcaccgcagcagacacagccgtctattactgtacgcgggatgactccagtaattggcggtcccgagggcaagggacactggtcacggtctcctcatctggaggcggtggaagcggtggaggaggatctcaggttcagctgcaagagtctggcggaggacttgctcaagctggcggaagcctgagactgtcttgtgccgcctctggcagaaccttcagcatgggctggtttagacaggcccctggcaaagagagagagttcgtcgccgccatcacatacagcggcggcagcccttactacgcctcttctgtcagaggccggttcaccatcagccgggacaacgccaagaacaccgtgtacctccagatgaacagcctgaagccagaggacaccgccgtgtactactgtgccgccaatccaacctacggcagcgactggaatgccgagaattggggccagggcacccaagtgacagtgtctagtggatccggcggcggaggatctggcggaggcggatctgggggcggaggctctttcgaacaagttcagcttcaacagcctggcgctgagctggtcaaacctggcgcttctgtgaagatgagctgcaaagccagcggctacgccttcagcagctactggatcaactggatgaagcagaaacccggccagggactcgaatggatcggccaaatctatcccggcgacggcgacaccaactacaacggcaagttcaagggcagagccacactgaccgccgatacctctagcagcacagcctacatgcagctgagcagcctgaccagcgaagatagcgccgtgtacttctgtgcccggtccatcacaacagtcgtgggctgcgctatggactattggggccagggaacaagcgtgaccgtgtctagtacgcgtgaggacctgaagaacgtgttcccacctgaggtggccgtgttcgagcctagcaaggccgagatcgcccacacccagaaagccaccctcgtgtgcctggctaccggcttctaccccgaccatgtggaactgtcttggtgggtcaacggcaaagaggtgcacagcggcgtgtgtaccgacccccagccactgaaagaacagcccgccctgaacgacagccggtactgcctgagcagcagactgagagtgtccgccaccttctggcagaacccccggaaccacttcagatgccaggtgcagttctacggcctgagcgagaacgacgagtggacccaggacagagccaagcccgtgacccagatcgtgtctgccgaagcctggggcagagccgattgcggcatcaccagcgccagctaccaccagggcgtgctgagcgccaccatcctgtacgagatcctgctgggcaaggccaccctgtacgccgtgctggtgtctgccctggtgctgatggctatggtcaagcggaaggacagccggggaagggccaagcgatctggatctggagcaacaaacttctcactactcaaacaagcaggtgacgtggaggagaatcccgggccttctagaggccatatgaccgagtacaagcccacggtgcgcctcgccacccgcgacgacgtccccagggccgtacgcaccctcgccgccgcgttcgccgactaccccgccacgcgccacaccgtcgatccggaccgccacatcgagcgggtcaccgagctgcaagaactcttcctcacgcgcgtcgggctcgacatcggcaaggtgtgggtcgcggacgacggcgccgcggtggcggtctggaccacgccggagagcgtcgaagcgggggcggtgttcgccgagatcggcccgcgcatggccgagttgagcggttcccggctggccgcgcagcaacagatggaaggcctcctggcgccgcaccggcccaaggagcccgcgtggttcctggccaccgtcggcgtctcgcccgaccaccagggcaagggtctgggcagcgccgtcgtgctccccggagtggaggcggccgagcgcgccggggtgcccgccttcctggagacctccgcgccccgcaacctccccttctacgagcggctcggcttcaccgtcaccgccgacgtcgaggtgcccgaaggaccgcgcacctggtgcatgacccgcaagcccggtgcctga

SEQ ID NO: 5187 - DNA, 4173 bp, Artificial Sequence
  Synthetic Polynucloetide
atggccttaccagtgaccgccttgctcctgccgctggccttgctgctccacgccgccaggccggaggttcagctgcttgagtctggcggaggactggttcaacctggcggaagcctgagactgtcttgtgccgccagcggcttcacctttagcagctacgccatgagctgggtccgacaggctcctggcaaaggactggaatgggtgtccagcatcagcggcagcggcgactacatctactacgccgatagcgtgaagggcagattcaccatcagccgggacatcagcaagaacaccctgtacctccagatgaacagcctgagagccgaggacaccgccgtgtactactgtgccaaagaaggcaccggcgctaacagcagcctggccgattatagaggccagggcacactggtcaccgtgtctagtggcggaggaagcggcggaggatctcaggtccagctcgtcgagtccggcggcggcctcgtccaggccggcgactccgtcaccctctcctgcaccgcctccggccgcaccttctcctcctacgccctcgcctggttccgccagcgccccggcaaggagcgcgagttcgtcgccggcctccgctggggcggccccaccaactacgccgactccgtcaaggaccgcttcaccatctccggcgactccgccaagcacaccatgtacctccagatgaactccctcaagcccgaggacaccgccgtctactactgcggctacaaccccggcggctgggccgtcccctcccagtacgagtacgactcctggggccagggcacccaggtcaccgtctcctccggtaccggcggaggcggatctggcggcggaggtagcggtggcggaggatctgaattcgacatccagatgacacagagccctagcagcctgtctgccagcgtgggagacagagtgaccatcacatgcaaggccagcgaccacatcaacaactggctggcctggtatcagcagaagcctggacaggcccctaagctgctgatctacggcgctaccacactggaaacaggcgtgcccagcagattttctggcagcggctctggcaccgactacaccctgacaatatccagcctccagcctgaggacttcgccacctactactgtcagcagagctggaacaccccttggacattcggccagggcaccaagctggaaatcaagagactcgaggacctgaagaacgtgttcccacctgaggtggccgtgttcgagcctagcaaggccgagatcgcccacacccagaaagccaccctcgtgtgcctggctaccggcttctaccccgaccatgtggaactgtcttggtgggtcaacggcaaagaggtgcacagcggcgtgtgtaccgacccccagccactgaaagaacagcccgccctgaacgacagccggtactgcctgagcagcagactgagagtgtccgccaccttctggcagaacccccggaaccacttcagatgccaggtgcagttctacggcctgagcgagaacgacgagtggacccaggacagagccaagcccgtgacccagatcgtgtctgccgaagcctggggcagagccgattgcggcatcaccagcgccagctaccaccagggcgtgctgagcgccaccatcctgtacgagatcctgctgggcaaggccaccctgtacgccgtgctggtgtctgccctggtgctgatggctatggtcaagcggaaggacagccggggaagggccaagcgatctggatctggagcaacaaacttctcactactcaaacaagcaggtgacgtggaggagaatcccgggcctactagtatggactggatttggcgcatccttttccttgtcggcgctgctaccggcgcccattcccagctccagttgcaagagagcggccctggcttggtaaaaccttccgagacccttagcctcacatgcacggttagtgggggcagcatttcctcaggtgattactattggggatggattcggcaacccccgggtaaaggattggagtggattggtcatatttattatagtggagcgacgtactacaacccaagtctcaaatccagggttacaatatccgtcgatacgagcaggaaccaattcagcttgaaactttctagtgtcaccgcagcagacacagccgtctattactgtacgcgggatgactccagtaattggcggtcccgagggcaagggacactggtcacggtctcctcatctggaggcggtggaagcggtggaggaggatctcaggttcagctgcaagagtctggcggaggacttgctcaagctggcggaagcctgagactgtcttgtgccgcctctggcagaaccttcagcatgggctggtttagacaggcccctggcaaagagagagagttcgtcgccgccatcacatacagcggcggcagcccttactacgcctcttctgtcagaggccggttcaccatcagccgggacaacgccaagaacaccgtgtacctccagatgaacagcctgaagccagaggacaccgccgtgtactactgtgccgccaatccaacctacggcagcgactggaatgccgagaattggggccagggcacccaagtgacagtgtctagtggatccggcggcggaggatctggcggaggcggatctgggggcggaggctctttcgaacaagttcagcttcaacagcctggcgctgagctggtcaaacctggcgcttctgtgaagatgagctgcaaagccagcggctacgccttcagcagctactggatcaactggatgaagcagaaacccggccagggactcgaatggatcggccaaatctatcccggcgacggcgacaccaactacaacggcaagttcaagggcagagccacactgaccgccgatacctctagcagcacagcctacatgcagctgagcagcctgaccagcgaagatagcgccgtgtacttctgtgcccggtccatcacaacagtcgtgggctgcgctatggactattggggccagggaacaagcgtgaccgtgtctagtacgcgtatccagaaccctgatcctgccgtgtaccagctgcgggatagcaagagcagcgacaagagcgtgtgtctgttcaccgacttcgacagccagaccaacgtgtcccagagcaaggactccgacgtgtacatcaccgataagtgcgtgctggacatgcggagcatggacttcaagagcaactccgccgtggcctggtccaacaagtccgatttcgcctgcgccaacgccttcaacaacagcattatccccgaggacacattcttcccaagcagcgacgtgccctgcgacgtgaagctggtggaaaagagcttcgagacagacaccaacctgaacttccagaacctgagcgtgatcggcttcagaatcctgctgctgaaagtggccggctttaacctgctgatgaccctgcggctgtggtccagccgcgccaagagaagcggatctggcgtgaagcagaccctgaatttcgacctgctgaagctggctggcgacgtggaatccaacccaggcccttctagaggccatatgaccgagtacaagcccacggtgcgcctcgccacccgcgacgacgtccccagggccgtacgcaccctcgccgccgcgttcgccgactaccccgccacgcgccacaccgtcgatccggaccgccacatcgagcgggtcaccgagctgcaagaactcttcctcacgcgcgtcgggctcgacatcggcaaggtgtgggtcgcggacgacggcgccgcggtggcggtctggaccacgccggagagcgtcgaagcgggggcggtgttcgccgagatcggcccgcgcatggccgagttgagcggttcccggctggccgcgcagcaacagatggaaggcctcctggcgccgcaccggcccaaggagcccgcgtggttcctggccaccgtcggcgtctcgcccgaccaccagggcaagggtctgggcagcgccgtcgtgctccccggagtggaggcggccgagcgcgccggggtgcccgccttcctggagacctccgcgccccgcaacctccccttctacgagcggctcggcttcaccgtcaccgccgacgtcgaggtgcccgaaggaccgcgcacctggtgcatgacccgcaagcccggtgcctga

SEQ ID NO: 5188 - DNA, 4173 bp, Artificial Sequence
  Synthetic Polynucloetide
atggccttaccagtgaccgccttgctcctgccgctggccttgctgctccacgccgccaggccggaggttcagctgcttgagtctggcggaggactggttcaacctggcggaagcctgagactgtcttgtgccgccagcggcttcacctttagcagctacgccatgagctgggtccgacaggctcctggcaaaggactggaatgggtgtccagcatcagcggcagcggcgactacatctactacgccgatagcgtgaagggcagattcaccatcagccgggacatcagcaagaacaccctgtacctccagatgaacagcctgagagccgaggacaccgccgtgtactactgtgccaaagaaggcaccggcgctaacagcagcctggccgattatagaggccagggcacactggtcaccgtgtctagtggcggaggaagcggcggaggatctcaggtccagctcgtcgagtccggcggcggcctcgtccaggccggcgactccgtcaccctctcctgcaccgcctccggccgcaccttctcctcctacgccctcgcctggttccgccagcgccccggcaaggagcgcgagttcgtcgccggcctccgctggggcggccccaccaactacgccgactccgtcaaggaccgcttcaccatctccggcgactccgccaagcacaccatgtacctccagatgaactccctcaagcccgaggacaccgccgtctactactgcggctacaaccccggcggctgggccgtcccctcccagtacgagtacgactcctggggccagggcacccaggtcaccgtctcctccggtaccggcggaggcggatctggcggcggaggtagcggtggcggaggatctgaattcgacatccagatgacacagagccctagcagcctgtctgccagcgtgggagacagagtgaccatcacatgcaaggccagcgaccacatcaacaactggctggcctggtatcagcagaagcctggacaggcccctaagctgctgatctacggcgctaccacactggaaacaggcgtgcccagcagattttctggcagcggctctggcaccgactacaccctgacaatatccagcctccagcctgaggacttcgccacctactactgtcagcagagctggaacaccccttggacattcggccagggcaccaagctggaaatcaagagactcgaggacctgaagaacgtgttcccacctgaggtggccgtgttcgagcctagcgaggccgagatcagccacacccagaaagccaccctcgtgtgcctggctaccggcttctaccccgaccatgtggaactgtcttggtgggtcaacggcaaagaggtgcacagcggcgtgtgtaccgacccccagccactgaaagaacagcccgccctgaacgacagccggtactgcctgagcagcagactgagagtgtccgccaccttctggcagaacccccggaaccacttcagatgccaggtgcagttctacggcctgagcgagaacgacgagtggacccaggacagagccaagcccgtgacccagatcgtgtctgccgaagcctggggcagagccgattgcggctttaccagcgagagctaccagcagggcgtgctgagcgccaccatcctgtacgagatcctgctgggcaaggccaccctgtacgccgtgctggtgtctgccctggtgctgatggctatggtcaagcggaaggacagccggggaagggccaagcgatctggatctggagcaacaaacttctcactactcaaacaagcaggtgacgtggaggagaatcccgggcctactagtatggactggatttggcgcatccttttccttgtcggcgctgctaccggcgcccattcccagctccagttgcaagagagcggccctggcttggtaaaaccttccgagacccttagcctcacatgcacggttagtgggggcagcatttcctcaggtgattactattggggatggattcggcaacccccgggtaaaggattggagtggattggtcatatttattatagtggagcgacgtactacaacccaagtctcaaatccagggttacaatatccgtcgatacgagcaggaaccaattcagcttgaaactttctagtgtcaccgcagcagacacagccgtctattactgtacgcgggatgactccagtaattggcggtcccgagggcaagggacactggtcacggtctcctcatctggaggcggtggaagcggtggaggaggatctcaggttcagctgcaagagtctggcggaggacttgctcaagctggcggaagcctgagactgtcttgtgccgcctctggcagaaccttcagcatgggctggtttagacaggcccctggcaaagagagagagttcgtcgccgccatcacatacagcggcggcagcccttactacgcctcttctgtcagaggccggttcaccatcagccgggacaacgccaagaacaccgtgtacctccagatgaacagcctgaagccagaggacaccgccgtgtactactgtgccgccaatccaacctacggcagcgactggaatgccgagaattggggccagggcacccaagtgacagtgtctagtggatccggcggcggaggatctggcggaggcggatctgggggcggaggctctttcgaacaagttcagcttcaacagcctggcgctgagctggtcaaacctggcgcttctgtgaagatgagctgcaaagccagcggctacgccttcagcagctactggatcaactggatgaagcagaaacccggccagggactcgaatggatcggccaaatctatcccggcgacggcgacaccaactacaacggcaagttcaagggcagagccacactgaccgccgatacctctagcagcacagcctacatgcagctgagcagcctgaccagcgaagatagcgccgtgtacttctgtgcccggtccatcacaacagtcgtgggctgcgctatggactattggggccagggaacaagcgtgaccgtgtctagtacgcgtatccagaaccctgatcctgccgtgtaccagctgcgggatagcaagagcagcgacaagagcgtgtgtctgttcaccgacttcgacagccagaccaacgtgtcccagagcaaggactccgacgtgtacatcaccgataagtgcgtgctggacatgcggagcatggacttcaagagcaactccgccgtggcctggtccaacaagtccgatttcgcctgcgccaacgccttcaacaacagcattatccccgaggacacattcttcccaagccccgagagcagctgcgacgtgaagctggtggaaaagagcttcgagacagacaccaacctgaacttccagaacctgagcgtgatcggcttcagaatcctgctgctgaaagtggccggctttaacctgctgatgaccctgcggctgtggtccagccgcgccaagagaagcggatctggcgtgaagcagaccctgaatttcgacctgctgaagctggctggcgacgtggaatccaacccaggcccttctagaggccatatgaccgagtacaagcccacggtgcgcctcgccacccgcgacgacgtccccagggccgtacgcaccctcgccgccgcgttcgccgactaccccgccacgcgccacaccgtcgatccggaccgccacatcgagcgggtcaccgagctgcaagaactcttcctcacgcgcgtcgggctcgacatcggcaaggtgtgggtcgcggacgacggcgccgcggtggcggtctggaccacgccggagagcgtcgaagcgggggcggtgttcgccgagatcggcccgcgcatggccgagttgagcggttcccggctggccgcgcagcaacagatggaaggcctcctggcgccgcaccggcccaaggagcccgcgtggttcctggccaccgtcggcgtctcgcccgaccaccagggcaagggtctgggcagcgccgtcgtgctccccggagtggaggcggccgagcgcgccggggtgcccgccttcctggagacctccgcgccccgcaacctccccttctacgagcggctcggcttcaccgtcaccgccgacgtcgaggtgcccgaaggaccgcgcacctggtgcatgacccgcaagcccggtgcctga

SEQ ID NO: 5189 - DNA, 3471 bp, Artificial Sequence
  Synthetic Polynucloetide
atggccttaccagtgaccgccttgctcctgccgctggccttgctgctccacgccgccaggccggaggttcagctgcttgagtctggcggaggactggttcaacctggcggaagcctgagactgtcttgtgccgccagcggcttcacctttagcagctacgccatgagctgggtccgacaggctcctggcaaaggactggaatgggtgtccagcatcagcggcagcggcgactacatctactacgccgatagcgtgaagggcagattcaccatcagccgggacatcagcaagaacaccctgtacctccagatgaacagcctgagagccgaggacaccgccgtgtactactgtgccaaagaaggcaccggcgctaacagcagcctggccgattatagaggccagggcacactggtcaccgtgtctagtggcggaggaagcggcggaggatctcaggtccagctcgtcgagtccggcggcggcctcgtccaggccggcgactccgtcaccctctcctgcaccgcctccggccgcaccttctcctcctacgccctcgcctggttccgccagcgccccggcaaggagcgcgagttcgtcgccggcctccgctggggcggccccaccaactacgccgactccgtcaaggaccgcttcaccatctccggcgactccgccaagcacaccatgtacctccagatgaactccctcaagcccgaggacaccgccgtctactactgcggctacaaccccggcggctgggccgtcccctcccagtacgagtacgactcctggggccagggcacccaggtcaccgtctcctccggtaccggcggaggcggatctggcggcggaggtagcggtggcggaggatctgaattcgacatccagatgacacagagccctagcagcctgtctgccagcgtgggagacagagtgaccatcacatgcaaggccagcgaccacatcaacaactggctggcctggtatcagcagaagcctggacaggcccctaagctgctgatctacggcgctaccacactggaaacaggcgtgcccagcagattttctggcagcggctctggcaccgactacaccctgacaatatccagcctccagcctgaggacttcgccacctactactgtcagcagagctggaacaccccttggacattcggccagggcaccaagctggaaatcaagagactcgaggacctgaagaacgtgttcccacctgaggtggccgtgttcgagcctagcgaggccgagatcagccacacccagaaagccaccctcgtgtgcctggctaccggcttctaccccgaccatgtggaactgtcttggtgggtcaacggcaaagaggtgcacagcggcgtgtgtaccgacccccagccactgaaagaacagcccgccctgaacgacagccggtactgcctgagcagcagactgagagtgtccgccaccttctggcagaacccccggaaccacttcagatgccaggtgcagttctacggcctgagcgagaacgacgagtggacccaggacagagccaagcccgtgacccagatcgtgtctgccgaagcctggggcagagccgattgcggctttaccagcgagagctaccagcagggcgtgctgagcgccaccatcctgtacgagatcctgctgggcaaggccaccctgtacgccgtgctggtgtctgccctggtgctgatggctatggtcaagcggaaggacagccggggaagggccaagcgatctggatctggagcaacaaacttctcactactcaaacaagcaggtgacgtggaggagaatcccgggcctactagtatggactggatttggcgcatccttttccttgtcggcgctgctaccggcgcccattcccagctccagttgcaagagagcggccctggcttggtaaaaccttccgagacccttagcctcacatgcacggttagtgggggcagcatttcctcaggtgattactattggggatggattcggcaacccccgggtaaaggattggagtggattggtcatatttattatagtggagcgacgtactacaacccaagtctcaaatccagggttacaatatccgtcgatacgagcaggaaccaattcagcttgaaactttctagtgtcaccgcagcagacacagccgtctattactgtacgcgggatgactccagtaattggcggtcccgagggcaagggacactggtcacggtctcctcatctggaggcggtggaagcggtggaggaggatctcaggttcagctgcaagagtctggcggaggacttgctcaagctggcggaagcctgagactgtcttgtgccgcctctggcagaaccttcagcatgggctggtttagacaggcccctggcaaagagagagagttcgtcgccgccatcacatacagcggcggcagcccttactacgcctcttctgtcagaggccggttcaccatcagccgggacaacgccaagaacaccgtgtacctccagatgaacagcctgaagccagaggacaccgccgtgtactactgtgccgccaatccaacctacggcagcgactggaatgccgagaattggggccagggcacccaagtgacagtgtctagtggatccggcggcggaggatctggcggaggcggatctgggggcggaggctctttcgaacaagttcagcttcaacagcctggcgctgagctggtcaaacctggcgcttctgtgaagatgagctgcaaagccagcggctacgccttcagcagctactggatcaactggatgaagcagaaacccggccagggactcgaatggatcggccaaatctatcccggcgacggcgacaccaactacaacggcaagttcaagggcagagccacactgaccgccgatacctctagcagcacagcctacatgcagctgagcagcctgaccagcgaagatagcgccgtgtacttctgtgcccggtccatcacaacagtcgtgggctgcgctatggactattggggccagggaacaagcgtgaccgtgtctagtacgcgtatccagaaccctgatcctgccgtgtaccagctgcgggatagcaagagcagcgacaagagcgtgtgtctgttcaccgacttcgacagccagaccaacgtgtcccagagcaaggactccgacgtgtacatcaccgataagtgcgtgctggacatgcggagcatggacttcaagagcaactccgccgtggcctggtccaacaagtccgatttcgcctgcgccaacgccttcaacaacagcattatccccgaggacacattcttcccaagccccgagagcagctgcgacgtgaagctggtggaaaagagcttcgagacagacaccaacctgaacttccagaacctgagcgtgatcggcttcagaatcctgctgctgaaagtggccggctttaacctgctgatgaccctgcggctgtggtccagc

SEQ ID NO: 5190 - DNA, 4146 bp, Artificial Sequence
  Synthetic Polynucloetide
atggccttaccagtgaccgccttgctcctgccgctggccttgctgctccacgccgccaggccggaggttcagctgcttgagtctggcggaggactggttcaacctggcggaagcctgagactgtcttgtgccgccagcggcttcacctttagcagctacgccatgagctgggtccgacaggctcctggcaaaggactggaatgggtgtccagcatcagcggcagcggcgactacatctactacgccgatagcgtgaagggcagattcaccatcagccgggacatcagcaagaacaccctgtacctccagatgaacagcctgagagccgaggacaccgccgtgtactactgtgccaaagaaggcaccggcgctaacagcagcctggccgattatagaggccagggcacactggtcaccgtgtctagtggcggaggaagcggcggaggatctcaggtccagctcgtcgagtccggcggcggcctcgtccaggccggcgactccgtcaccctctcctgcaccgcctccggccgcaccttctcctcctacgccctcgcctggttccgccagcgccccggcaaggagcgcgagttcgtcgccggcctccgctggggcggccccaccaactacgccgactccgtcaaggaccgcttcaccatctccggcgactccgccaagcacaccatgtacctccagatgaactccctcaagcccgaggacaccgccgtctactactgcggctacaaccccggcggctgggccgtcccctcccagtacgagtacgactcctggggccagggcacccaggtcaccgtctcctccggtaccggcggaggcggatctggcggcggaggtagcggtggcggaggatctgaattcgacatccagatgacacagagccctagcagcctgtctgccagcgtgggagacagagtgaccatcacatgcaaggccagcgaccacatcaacaactggctggcctggtatcagcagaagcctggacaggcccctaagctgctgatctacggcgctaccacactggaaacaggcgtgcccagcagattttctggcagcggctctggcaccgactacaccctgacaatatccagcctccagcctgaggacttcgccacctactactgtcagcagagctggaacaccccttggacattcggccagggcaccaagctggaaatcaagagactcgaggacctgaagaacgtgttcccacctgaggtggccgtgttcgagcctagcgaggccgagatcagccacacccagaaagccaccctcgtgtgcctggctaccggcttctaccccgaccatgtggaactgtcttggtgggtcaacggcaaagaggtgcacagcggcgtgtgtaccgacccccagccactgaaagaacagcccgccctgaacgacagccggtactgcctgagcagcagactgagagtgtccgccaccttctggcagaacccccggaaccacttcagatgccaggtgcagttctacggcctgagcgagaacgacgagtggacccaggacagagccaagcccgtgacccagatcgtgtctgccgaagcctggggcagagccgattgcggctttaccagcgagagctaccagcagggcgtgctgagcgccaccatcctgtacgagatcctgctgggcaaggccaccctgtacgccgtgctggtgtctgccctggtgctgatggctatggtcaagcggaaggacagccggggaagggccaagcgatctggatctggagcaacaaacttctcactactcaaacaagcaggtgacgtggaggagaatcccgggcctactagtatggactggatttggcgcatccttttccttgtcggcgctgctaccggcgcccattcccagctccagttgcaagagagcggccctggcttggtaaaaccttccgagacccttagcctcacatgcacggttagtgggggcagcatttcctcaggtgattactattggggatggattcggcaacccccgggtaaaggattggagtggattggtcatatttattatagtggagcgacgtactacaacccaagtctcaaatccagggttacaatatccgtcgatacgagcaggaaccaattcagcttgaaactttctagtgtcaccgcagcagacacagccgtctattactgtacgcgggatgactccagtaattggcggtcccgagggcaagggacactggtcacggtctcctcatctggaggcggtggaagcggtggaggaggatctcaggttcagctgcaagagtctggcggaggacttgctcaagctggcggaagcctgagactgtcttgtgccgcctctggcagaaccttcagcatgggctggtttagacaggcccctggcaaagagagagagttcgtcgccgccatcacatacagcggcggcagcccttactacgcctcttctgtcagaggccggttcaccatcagccgggacaacgccaagaacaccgtgtacctccagatgaacagcctgaagccagaggacaccgccgtgtactactgtgccgccaatccaacctacggcagcgactggaatgccgagaattggggccagggcacccaagtgacagtgtctagtggatccggcggcggaggatctggcggaggcggatctgggggcggaggctctttcgaacaagttcagcttcaacagcctggcgctgagctggtcaaacctggcgcttctgtgaagatgagctgcaaagccagcggctacgccttcagcagctactggatcaactggatgaagcagaaacccggccagggactcgaatggatcggccaaatctatcccggcgacggcgacaccaactacaacggcaagttcaagggcagagccacactgaccgccgatacctctagcagcacagcctacatgcagctgagcagcctgaccagcgaagatagcgccgtgtacttctgtgcccggtccatcacaacagtcgtgggctgcgctatggactattggggccagggaacaagcgtgaccgtgtctagtacgcgtatccagaaccctgatcctgccgtgtaccagctgcgggatagcaagagcagcgacaagagcgtgtgtctgttcaccgacttcgacagccagaccaacgtgtcccagagcaaggactccgacgtgtacatcaccgataagtgcgtgctggacatgcggagcatggacttcaagagcaactccgccgtggcctggtccaacaagtccgatttcgcctgcgccaacgccttcaacaacagcattatccccgaggacacattcttcccaagccccgagagcagctgcgacgtgaagctggtggaaaagagcttcgagacagacaccaacctgaacttccagaacctgagcgtgatcggcttcagaatcctgctgctgaaagtggccggctttaacctgctgatgaccctgcggctgtggtccagccgcgccaagagaagcggatctggcgtgaagcagaccctgaatttcgacctgctgaagctggctggcgacgtggaatccaacccaggcccttctagaggcgggatccacaccatggctacctacgaggtgctgtgcgaggtggcaagaaagctgggcaccgacgacagagaagtggtgctgttcctgctgaacgtgttcatccctcagcctacactggcccagctgatcggtgcactgagagccctgaaagaggaaggccggctgacctttcctctgctggccgaatgcctgttcagagccggaagaagggatctgctgcgggacctgctgcatctggaccccagatttctggaaagacacctggccggcaccatgagctacttcagcccttaccagctgaccgtgctgcacgttgacggcgaactgtgcgccagagatattcggagcctgatcttcctgagcaaggacaccatcggcagccggtctacccctcagacatttctgcactgggtgtactgcatggaaaacctggacctgctcggccccacagatgtggatgccctgatgtccatgctgagaagcctgagcagagtggacctccagagacaggtgcagacactgatgggactgcacctgagcggacctagccacagccagcactacagacacacccct

SEQ ID NO: 5191 - DNA, 3483 bp, Artificial Sequence
  Synthetic Polynucloetide
atggccttaccagtgaccgccttgctcctgccgctggccttgctgctccacgccgccaggccggaggttcagctgcttgagtctggcggaggactggttcaacctggcggaagcctgagactgtcttgtgccgccagcggcttcacctttagcagctacgccatgagctgggtccgacaggctcctggcaaaggactggaatgggtgtccagcatcagcggcagcggcgactacatctactacgccgatagcgtgaagggcagattcaccatcagccgggacatcagcaagaacaccctgtacctccagatgaacagcctgagagccgaggacaccgccgtgtactactgtgccaaagaaggcaccggcgctaacagcagcctggccgattatagaggccagggcacactggtcaccgtgtctagtggcggaggaagcggcggaggatctcaggtccagctcgtcgagtccggcggcggcctcgtccaggccggcgactccgtcaccctctcctgcaccgcctccggccgcaccttctcctcctacgccctcgcctggttccgccagcgccccggcaaggagcgcgagttcgtcgccggcctccgctggggcggccccaccaactacgccgactccgtcaaggaccgcttcaccatctccggcgactccgccaagcacaccatgtacctccagatgaactccctcaagcccgaggacaccgccgtctactactgcggctacaaccccggcggctgggccgtcccctcccagtacgagtacgactcctggggccagggcacccaggtcaccgtctcctccggtaccggcggaggcggatctggcggcggaggtagcggtggcggaggatctgaattcgacatccagatgacacagagccctagcagcctgtctgccagcgtgggagacagagtgaccatcacatgcaaggccagcgaccacatcaacaactggctggcctggtatcagcagaagcctggacaggcccctaagctgctgatctacggcgctaccacactggaaacaggcgtgcccagcagattttctggcagcggctctggcaccgactacaccctgacaatatccagcctccagcctgaggacttcgccacctactactgtcagcagagctggaacaccccttggacattcggccagggcaccaagctggaaatcaagagactcgagatccagaaccctgatcctgccgtgtaccagctgcgggatagcaagagcagcgacaagagcgtgtgtctgttcaccgacttcgacagccagaccaacgtgtcccagagcaaggactccgacgtgtacatcaccgataagtgcgtgctggacatgcggagcatggacttcaagagcaactccgccgtggcctggtccaacaagtccgatttcgcctgcgccaacgccttcaacaacagcattatccccgaggacacattcttcccaagccccgagagcagctgcgacgtgaagctggtggaaaagagcttcgagacagacaccaacctgaacttccagaacctgagcgtgatcggcttcagaatcctgctgctgaaagtggccggctttaacctgctgatgaccctgcggctgtggtccagccgcgccaagagaagcggatctggcgtgaagcagaccctgaatttcgacctgctgaagctggctggcgacgtggaatccaacccaggccctactagtatggactggatttggcgcatccttttccttgtcggcgctgctaccggcgcccattcccagctccagttgcaagagagcggccctggcttggtaaaaccttccgagacccttagcctcacatgcacggttagtgggggcagcatttcctcaggtgattactattggggatggattcggcaacccccgggtaaaggattggagtggattggtcatatttattatagtggagcgacgtactacaacccaagtctcaaatccagggttacaatatccgtcgatacgagcaggaaccaattcagcttgaaactttctagtgtcaccgcagcagacacagccgtctattactgtacgcgggatgactccagtaattggcggtcccgagggcaagggacactggtcacggtctcctcatctggaggcggtggaagcggtggaggaggatctcaggttcagctgcaagagtctggcggaggacttgctcaagctggcggaagcctgagactgtcttgtgccgcctctggcagaaccttcagcatgggctggtttagacaggcccctggcaaagagagagagttcgtcgccgccatcacatacagcggcggcagcccttactacgcctcttctgtcagaggccggttcaccatcagccgggacaacgccaagaacaccgtgtacctccagatgaacagcctgaagccagaggacaccgccgtgtactactgtgccgccaatccaacctacggcagcgactggaatgccgagaattggggccagggcacccaagtgacagtgtctagtggatccggcggcggaggatctggcggaggcggatctgggggcggaggctctttcgaacaagttcagcttcaacagcctggcgctgagctggtcaaacctggcgcttctgtgaagatgagctgcaaagccagcggctacgccttcagcagctactggatcaactggatgaagcagaaacccggccagggactcgaatggatcggccaaatctatcccggcgacggcgacaccaactacaacggcaagttcaagggcagagccacactgaccgccgatacctctagcagcacagcctacatgcagctgagcagcctgaccagcgaagatagcgccgtgtacttctgtgcccggtccatcacaacagtcgtgggctgcgctatggactattggggccagggaacaagcgtgaccgtgtctagtacgcgtgaggacctgaagaacgtgttcccacctgaggtggccgtgttcgagcctagcgaggccgagatcagccacacccagaaagccaccctcgtgtgcctggctaccggcttctaccccgaccatgtggaactgtcttggtgggtcaacggcaaagaggtgcacagcggcgtgtgtaccgacccccagccactgaaagaacagcccgccctgaacgacagccggtactgcctgagcagcagactgagagtgtccgccaccttctggcagaacccccggaaccacttcagatgccaggtgcagttctacggcctgagcgagaacgacgagtggacccaggacagagccaagcccgtgacccagatcgtgtctgccgaagcctggggcagagccgattgcggctttaccagcgagagctaccagcagggcgtgctgagcgccaccatcctgtacgagatcctgctgggcaaggccaccctgtacgccgtgctggtgtctgccctggtgctgatggctatggtcaagcggaaggacagccgggga

SEQ ID NO: 5192 - DNA, 4149 bp, Artificial Sequence
  Synthetic Polynucloetide
atggccttaccagtgaccgccttgctcctgccgctggccttgctgctccacgccgccaggccggaggttcagctgcttgagtctggcggaggactggttcaacctggcggaagcctgagactgtcttgtgccgccagcggcttcacctttagcagctacgccatgagctgggtccgacaggctcctggcaaaggactggaatgggtgtccagcatcagcggcagcggcgactacatctactacgccgatagcgtgaagggcagattcaccatcagccgggacatcagcaagaacaccctgtacctccagatgaacagcctgagagccgaggacaccgccgtgtactactgtgccaaagaaggcaccggcgctaacagcagcctggccgattatagaggccagggcacactggtcaccgtgtctagtggcggaggaagcggcggaggatctcaggtccagctcgtcgagtccggcggcggcctcgtccaggccggcgactccgtcaccctctcctgcaccgcctccggccgcaccttctcctcctacgccctcgcctggttccgccagcgccccggcaaggagcgcgagttcgtcgccggcctccgctggggcggccccaccaactacgccgactccgtcaaggaccgcttcaccatctccggcgactccgccaagcacaccatgtacctccagatgaactccctcaagcccgaggacaccgccgtctactactgcggctacaaccccggcggctgggccgtcccctcccagtacgagtacgactcctggggccagggcacccaggtcaccgtctcctccggtaccggcggaggcggatctggcggcggaggtagcggtggcggaggatctgaattcgacatccagatgacacagagccctagcagcctgtctgccagcgtgggagacagagtgaccatcacatgcaaggccagcgaccacatcaacaactggctggcctggtatcagcagaagcctggacaggcccctaagctgctgatctacggcgctaccacactggaaacaggcgtgcccagcagattttctggcagcggctctggcaccgactacaccctgacaatatccagcctccagcctgaggacttcgccacctactactgtcagcagagctggaacaccccttggacattcggccagggcaccaagctggaaatcaagagactcgagatccagaaccctgatcctgccgtgtaccagctgcgggatagcaagagcagcgacaagagcgtgtgtctgttcaccgacttcgacagccagaccaacgtgtcccagagcaaggactccgacgtgtacatcaccgataagtgcgtgctggacatgcggagcatggacttcaagagcaactccgccgtggcctggtccaacaagtccgatttcgcctgcgccaacgccttcaacaacagcattatccccgaggacacattcttcccaagccccgagagcagctgcgacgtgaagctggtggaaaagagcttcgagacagacaccaacctgaacttccagaacctgagcgtgatcggcttcagaatcctgctgctgaaagtggccggctttaacctgctgatgaccctgcggctgtggtccagccgcgccaagagaagcggatctggcgtgaagcagaccctgaatttcgacctgctgaagctggctggcgacgtggaatccaacccaggccctactagtatggactggatttggcgcatccttttccttgtcggcgctgctaccggcgcccattcccagctccagttgcaagagagcggccctggcttggtaaaaccttccgagacccttagcctcacatgcacggttagtgggggcagcatttcctcaggtgattactattggggatggattcggcaacccccgggtaaaggattggagtggattggtcatatttattatagtggagcgacgtactacaacccaagtctcaaatccagggttacaatatccgtcgatacgagcaggaaccaattcagcttgaaactttctagtgtcaccgcagcagacacagccgtctattactgtacgcgggatgactccagtaattggcggtcccgagggcaagggacactggtcacggtctcctcatctggaggcggtggaagcggtggaggaggatctcaggttcagctgcaagagtctggcggaggacttgctcaagctggcggaagcctgagactgtcttgtgccgcctctggcagaaccttcagcatgggctggtttagacaggcccctggcaaagagagagagttcgtcgccgccatcacatacagcggcggcagcccttactacgcctcttctgtcagaggccggttcaccatcagccgggacaacgccaagaacaccgtgtacctccagatgaacagcctgaagccagaggacaccgccgtgtactactgtgccgccaatccaacctacggcagcgactggaatgccgagaattggggccagggcacccaagtgacagtgtctagtggatccggcggcggaggatctggcggaggcggatctgggggcggaggctctttcgaacaagttcagcttcaacagcctggcgctgagctggtcaaacctggcgcttctgtgaagatgagctgcaaagccagcggctacgccttcagcagctactggatcaactggatgaagcagaaacccggccagggactcgaatggatcggccaaatctatcccggcgacggcgacaccaactacaacggcaagttcaagggcagagccacactgaccgccgatacctctagcagcacagcctacatgcagctgagcagcctgaccagcgaagatagcgccgtgtacttctgtgcccggtccatcacaacagtcgtgggctgcgctatggactattggggccagggaacaagcgtgaccgtgtctagtacgcgtgaggacctgaagaacgtgttcccacctgaggtggccgtgttcgagcctagcgaggccgagatcagccacacccagaaagccaccctcgtgtgcctggctaccggcttctaccccgaccatgtggaactgtcttggtgggtcaacggcaaagaggtgcacagcggcgtgtgtaccgacccccagccactgaaagaacagcccgccctgaacgacagccggtactgcctgagcagcagactgagagtgtccgccaccttctggcagaacccccggaaccacttcagatgccaggtgcagttctacggcctgagcgagaacgacgagtggacccaggacagagccaagcccgtgacccagatcgtgtctgccgaagcctggggcagagccgattgcggctttaccagcgagagctaccagcagggcgtgctgagcgccaccatcctgtacgagatcctgctgggcaaggccaccctgtacgccgtgctggtgtctgccctggtgctgatggctatggtcaagcggaaggacagccggggaagggccaagcgatctggatctggagcaacaaacttctcactactcaaacaagcaggtgacgtggaggagaatcccgggccttctagaggcgggatccacaccatggctacctacgaggtgctgtgcgaggtggcaagaaagctgggcaccgacgacagagaagtggtgctgttcctgctgaacgtgttcatccctcagcctacactggcccagctgatcggtgcactgagagccctgaaagaggaaggccggctgacctttcctctgctggccgaatgcctgttcagagccggaagaagggatctgctgcgggacctgctgcatctggaccccagatttctggaaagacacctggccggcaccatgagctacttcagcccttaccagctgaccgtgctgcacgttgacggcgaactgtgcgccagagatattcggagcctgatcttcctgagcaaggacaccatcggcagccggtctacccctcagacatttctgcactgggtgtactgcatggaaaacctggacctgctcggccccacagatgtggatgccctgatgtccatgctgagaagcctgagcagagtggacctccagagacaggtgcagacactgatgggactgcacctgagcggacctagccacagccagcactacagacacacccct

SEQ ID NO: 5193 - DNA, 4173 bp, Artificial Sequence
  Synthetic Polynucloetide
atggccttaccagtgaccgccttgctcctgccgctggccttgctgctccacgccgccaggccggaggttcagctgcttgagtctggcggaggactggttcaacctggcggaagcctgagactgtcttgtgccgccagcggcttcacctttagcagctacgccatgagctgggtccgacaggctcctggcaaaggactggaatgggtgtccagcatcagcggcagcggcgactacatctactacgccgatagcgtgaagggcagattcaccatcagccgggacatcagcaagaacaccctgtacctccagatgaacagcctgagagccgaggacaccgccgtgtactactgtgccaaagaaggcaccggcgctaacagcagcctggccgattatagaggccagggcacactggtcaccgtgtctagtggcggaggaagcggcggaggatctcaggtccagctcgtcgagtccggcggcggcctcgtccaggccggcgactccgtcaccctctcctgcaccgcctccggccgcaccttctcctcctacgccctcgcctggttccgccagcgccccggcaaggagcgcgagttcgtcgccggcctccgctggggcggccccaccaactacgccgactccgtcaaggaccgcttcaccatctccggcgactccgccaagcacaccatgtacctccagatgaactccctcaagcccgaggacaccgccgtctactactgcggctacaaccccggcggctgggccgtcccctcccagtacgagtacgactcctggggccagggcacccaggtcaccgtctcctccggtaccggcggaggcggatctggcggcggaggtagcggtggcggaggatctgaattcgacatccagatgacacagagccctagcagcctgtctgccagcgtgggagacagagtgaccatcacatgcaaggccagcgaccacatcaacaactggctggcctggtatcagcagaagcctggacaggcccctaagctgctgatctacggcgctaccacactggaaacaggcgtgcccagcagattttctggcagcggctctggcaccgactacaccctgacaatatccagcctccagcctgaggacttcgccacctactactgtcagcagagctggaacaccccttggacattcggccagggcaccaagctggaaatcaagagactcgaggacctgaagaacgtgttcccacctgaggtggccgtgttcgagcctagcgaggccgagatcagccacacccagaaagccaccctcgtgtgcctggctaccggcttctaccccgaccatgtggaactgtcttggtgggtcaacggcaaagaggtgcacagcggcgtgtctaccgacccccagccactgaaagaacagcccgccctgaacgacagccggtactgcctgagcagcagactgagagtgtccgccaccttctggcagaacccccggaaccacttcagatgccaggtgcagttctacggcctgagcgagaacgacgagtggacccaggacagagccaagcccgtgacccagatcgtgtctgccgaagcctggggcagagccgattgcggctttaccagcgagagctaccagcagggcgtgctgagcgccaccatcctgtacgagatcctgctgggcaaggccaccctgtacgccgtgctggtgtctgccctggtgctgatggctatggtcaagcggaaggacagccggggaagggccaagcgatctggatctggagcaacaaacttctcactactcaaacaagcaggtgacgtggaggagaatcccgggcctactagtatggactggatttggcgcatccttttccttgtcggcgctgctaccggcgcccattcccagctccagttgcaagagagcggccctggcttggtaaaaccttccgagacccttagcctcacatgcacggttagtgggggcagcatttcctcaggtgattactattggggatggattcggcaacccccgggtaaaggattggagtggattggtcatatttattatagtggagcgacgtactacaacccaagtctcaaatccagggttacaatatccgtcgatacgagcaggaaccaattcagcttgaaactttctagtgtcaccgcagcagacacagccgtctattactgtacgcgggatgactccagtaattggcggtcccgagggcaagggacactggtcacggtctcctcatctggaggcggtggaagcggtggaggaggatctcaggttcagctgcaagagtctggcggaggacttgctcaagctggcggaagcctgagactgtcttgtgccgcctctggcagaaccttcagcatgggctggtttagacaggcccctggcaaagagagagagttcgtcgccgccatcacatacagcggcggcagcccttactacgcctcttctgtcagaggccggttcaccatcagccgggacaacgccaagaacaccgtgtacctccagatgaacagcctgaagccagaggacaccgccgtgtactactgtgccgccaatccaacctacggcagcgactggaatgccgagaattggggccagggcacccaagtgacagtgtctagtggatccggcggcggaggatctggcggaggcggatctgggggcggaggctctttcgaacaagttcagcttcaacagcctggcgctgagctggtcaaacctggcgcttctgtgaagatgagctgcaaagccagcggctacgccttcagcagctactggatcaactggatgaagcagaaacccggccagggactcgaatggatcggccaaatctatcccggcgacggcgacaccaactacaacggcaagttcaagggcagagccacactgaccgccgatacctctagcagcacagcctacatgcagctgagcagcctgaccagcgaagatagcgccgtgtacttctgtgcccggtccatcacaacagtcgtgggctgcgctatggactattggggccagggaacaagcgtgaccgtgtctagtacgcgtatccagaaccctgatcctgccgtgtaccagctgcgggatagcaagagcagcgacaagagcgtgtgtctgttcaccgacttcgacagccagaccaacgtgtcccagagcaaggactccgacgtgtacatcaccgataagaccgtgctggacatgcggagcatggacttcaagagcaactccgccgtggcctggtccaacaagtccgatttcgcctgcgccaacgccttcaacaacagcattatccccgaggacacattcttcccaagccccgagagcagctgcgacgtgaagctggtggaaaagagcttcgagacagacaccaacctgaacttccagaacctgagcgtgatcggcttcagaatcctgctgctgaaagtggccggctttaacctgctgatgaccctgcggctgtggtccagccgcgccaagagaagcggatctggcgtgaagcagaccctgaatttcgacctgctgaagctggctggcgacgtggaatccaacccaggcccttctagaggccatatgaccgagtacaagcccacggtgcgcctcgccacccgcgacgacgtccccagggccgtacgcaccctcgccgccgcgttcgccgactaccccgccacgcgccacaccgtcgatccggaccgccacatcgagcgggtcaccgagctgcaagaactcttcctcacgcgcgtcgggctcgacatcggcaaggtgtgggtcgcggacgacggcgccgcggtggcggtctggaccacgccggagagcgtcgaagcgggggcggtgttcgccgagatcggcccgcgcatggccgagttgagcggttcccggctggccgcgcagcaacagatggaaggcctcctggcgccgcaccggcccaaggagcccgcgtggttcctggccaccgtcggcgtctcgcccgaccaccagggcaagggtctgggcagcgccgtcgtgctccccggagtggaggcggccgagcgcgccggggtgcccgccttcctggagacctccgcgccccgcaacctccccttctacgagcggctcggcttcaccgtcaccgccgacgtcgaggtgcccgaaggaccgcgcacctggtgcatgacccgcaagcccggtgcctga

SEQ ID NO: 5194 - DNA, 4419 bp, Artificial Sequence
  Synthetic Polynucloetide
atggccttaccagtgaccgccttgctcctgccgctggccttgctgctccacgccgccaggccggaggttcagctgcttgagtctggcggaggactggttcaacctggcggaagcctgagactgtcttgtgccgccagcggcttcacctttagcagctacgccatgagctgggtccgacaggctcctggcaaaggactggaatgggtgtccagcatcagcggcagcggcgactacatctactacgccgatagcgtgaagggcagattcaccatcagccgggacatcagcaagaacaccctgtacctccagatgaacagcctgagagccgaggacaccgccgtgtactactgtgccaaagaaggcaccggcgctaacagcagcctggccgattatagaggccagggcacactggtcaccgtgtctagtggcggaggaagcggcggaggatctcaggtccagctcgtcgagtccggcggcggcctcgtccaggccggcgactccgtcaccctctcctgcaccgcctccggccgcaccttctcctcctacgccctcgcctggttccgccagcgccccggcaaggagcgcgagttcgtcgccggcctccgctggggcggccccaccaactacgccgactccgtcaaggaccgcttcaccatctccggcgactccgccaagcacaccatgtacctccagatgaactccctcaagcccgaggacaccgccgtctactactgcggctacaaccccggcggctgggccgtcccctcccagtacgagtacgactcctggggccagggcacccaggtcaccgtctcctccggtaccggcggaggcggatctggcggcggaggtagcggtggcggaggatctgaattcgacatccagatgacacagagccctagcagcctgtctgccagcgtgggagacagagtgaccatcacatgcaaggccagcgaccacatcaacaactggctggcctggtatcagcagaagcctggacaggcccctaagctgctgatctacggcgctaccacactggaaacaggcgtgcccagcagattttctggcagcggctctggcaccgactacaccctgacaatatccagcctccagcctgaggacttcgccacctactactgtcagcagagctggaacaccccttggacattcggccagggcaccaagctggaaatcaagagactcgaggacctgaagaacgtgttcccacctgaggtggccgtgttcgagcctagcgaggccgagatcagccacacccagaaagccaccctcgtgtgcctggctaccggcttctaccccgaccatgtggaactgtcttggtgggtcaacggcaaagaggtgcacagcggcgtgtctaccgacccccagccactgaaagaacagcccgccctgaacgacagccggtactgcctgagcagcagactgagagtgtccgccaccttctggcagaacccccggaaccacttcagatgccaggtgcagttctacggcctgagcgagaacgacgagtggacccaggacagagccaagcccgtgacccagatcgtgtctgccgaagcctggggcagagccgattgcggctttaccagcgagagctaccagcagggcgtgctgagcgccaccatcctgtacgagatcctgctgggcaaggccaccctgtacgccgtgctggtgtctgccctggtgctgatggctatggtcaagcggaaggacagccggggaagggccaagcgatctggatctggagcaacaaacttctcactactcaaacaagcaggtgacgtggaggagaatcccgggcctactagtatggactggatttggcgcatccttttccttgtcggcgctgctaccggcgcccattcccagctccagttgcaagagagcggccctggcttggtaaaaccttccgagacccttagcctcacatgcacggttagtgggggcagcatttcctcaggtgattactattggggatggattcggcaacccccgggtaaaggattggagtggattggtcatatttattatagtggagcgacgtactacaacccaagtctcaaatccagggttacaatatccgtcgatacgagcaggaaccaattcagcttgaaactttctagtgtcaccgcagcagacacagccgtctattactgtacgcgggatgactccagtaattggcggtcccgagggcaagggacactggtcacggtctcctcatctggaggcggtggaagcggtggaggaggatctcaggttcagctgcaagagtctggcggaggacttgctcaagctggcggaagcctgagactgtcttgtgccgcctctggcagaaccttcagcatgggctggtttagacaggcccctggcaaagagagagagttcgtcgccgccatcacatacagcggcggcagcccttactacgcctcttctgtcagaggccggttcaccatcagccgggacaacgccaagaacaccgtgtacctccagatgaacagcctgaagccagaggacaccgccgtgtactactgtgccgccaatccaacctacggcagcgactggaatgccgagaattggggccagggcacccaagtgacagtgtctagtggatccggcggcggaggatctggcggaggcggatctgggggcggaggctctttcgaacaagttcagcttcaacagcctggcgctgagctggtcaaacctggcgcttctgtgaagatgagctgcaaagccagcggctacgccttcagcagctactggatcaactggatgaagcagaaacccggccagggactcgaatggatcggccaaatctatcccggcgacggcgacaccaactacaacggcaagttcaagggcagagccacactgaccgccgatacctctagcagcacagcctacatgcagctgagcagcctgaccagcgaagatagcgccgtgtacttctgtgcccggtccatcacaacagtcgtgggctgcgctatggactattggggccagggaacaagcgtgaccgtgtctagtacgcgtgagcagaaactgatctcggaagaggatgggagcggcaccccattcccttctctggcccctcccatcatgctgctggtggacggcaagcagcagatggtggtcgtgtgcctggtgctggatgtggccccacctggactggacagccccatctggtttagcgccggcaatggctctgccctggacgcctttacctacggcccaagccctgccaccgatggcacctggacaaatctggcccacctgagcctgcccagcgaggaactggcttcttgggagcctctcgtgtgccacacaggacctggcgctgagggacacagcagatccacccagcctatgcacctgtctggcgaggccagcaccgccagaacctgtcctcaggaacctctgagaggcacccctggcggagcactgtggctgggagtgctgagactgctgctgttcaagctgctgctgtttgacctgctgctgacctgctcctgtctgtgcgatcctgccggccctctgccttctcctgccaccaccacaagactgagagccctgggcagccacagactgcaccctgccacagagacaggcggcagagaggccacaagcagccctagaccccagcccagagacagaagatggggcgataccccccctggcagaaagcctggatctccagtccgcgccaagagaagcggatctggcgtgaagcagaccctgaatttcgacctgctgaagctggctggcgacgtggaatccaacccaggcccttctagaggccatatgaccgagtacaagcccacggtgcgcctcgccacccgcgacgacgtccccagggccgtacgcaccctcgccgccgcgttcgccgactaccccgccacgcgccacaccgtcgatccggaccgccacatcgagcgggtcaccgagctgcaagaactcttcctcacgcgcgtcgggctcgacatcggcaaggtgtgggtcgcggacgacggcgccgcggtggcggtctggaccacgccggagagcgtcgaagcgggggcggtgttcgccgagatcggcccgcgcatggccgagttgagcggttcccggctggccgcgcagcaacagatggaaggcctcctggcgccgcaccggcccaaggagcccgcgtggttcctggccaccgtcggcgtctcgcccgaccaccagggcaagggtctgggcagcgccgtcgtgctccccggagtggaggcggccgagcgcgccggggtgcccgccttcctggagacctccgcgccccgcaacctccccttctacgagcggctcggcttcaccgtcaccgccgacgtcgaggtgcccgaaggaccgcgcacctggtgcatgacccgcaagcccggtgcctga

SEQ ID NO: 5195 - DNA, 4284 bp, Artificial Sequence
  Synthetic Polynucloetide
atggccttaccagtgaccgccttgctcctgccgctggccttgctgctccacgccgccaggccggaggttcagctgcttgagtctggcggaggactggttcaacctggcggaagcctgagactgtcttgtgccgccagcggcttcacctttagcagctacgccatgagctgggtccgacaggctcctggcaaaggactggaatgggtgtccagcatcagcggcagcggcgactacatctactacgccgatagcgtgaagggcagattcaccatcagccgggacatcagcaagaacaccctgtacctccagatgaacagcctgagagccgaggacaccgccgtgtactactgtgccaaagaaggcaccggcgctaacagcagcctggccgattatagaggccagggcacactggtcaccgtgtctagtggcggaggaagcggcggaggatctcaggtccagctcgtcgagtccggcggcggcctcgtccaggccggcgactccgtcaccctctcctgcaccgcctccggccgcaccttctcctcctacgccctcgcctggttccgccagcgccccggcaaggagcgcgagttcgtcgccggcctccgctggggcggccccaccaactacgccgactccgtcaaggaccgcttcaccatctccggcgactccgccaagcacaccatgtacctccagatgaactccctcaagcccgaggacaccgccgtctactactgcggctacaaccccggcggctgggccgtcccctcccagtacgagtacgactcctggggccagggcacccaggtcaccgtctcctccggtaccggcggaggcggatctggcggcggaggtagcggtggcggaggatctgaattcgacatccagatgacacagagccctagcagcctgtctgccagcgtgggagacagagtgaccatcacatgcaaggccagcgaccacatcaacaactggctggcctggtatcagcagaagcctggacaggcccctaagctgctgatctacggcgctaccacactggaaacaggcgtgcccagcagattttctggcagcggctctggcaccgactacaccctgacaatatccagcctccagcctgaggacttcgccacctactactgtcagcagagctggaacaccccttggacattcggccagggcaccaagctggaaatcaagagactcgaggggaaaccaattcccaaccctcttctgggactggattcaaccggcagcggcgacaagcagctggacgccgacgtgtcccccaagcctaccatcttcctgccctctatcgccgagacaaagctccagaaggccggcacctacctgtgcctgctggaaaagttcttcccagatgtgattaagatccactggcaggaaaagaagtccaacaccatcctgggcagccaggaaggcaacaccatgaagaccaacgacacctacatgaagttcagctggctgaccgtgcccgagaagtccctggacaaagaacacagatgcatcgtgcggcacgaaaacaacaagaacggcgtggaccaggaaatcatcttcccacccatcaagaccgatgtgattacaatggaccccaaggacaactgctccaaggacgccaacgataccctgctgctccagctgaccaacaccagcgcctactacatgtacttgttgctgctgctgaagtccgtggtgtacttcgccatcatcacatgctgcctgctgcggagaaccgccttctgctgcaacggcgagaagtctagggccaagcgatctggatctggagcaacaaacttctcactactcaaacaagcaggtgacgtggaggagaatcccgggcctactagtatggactggatttggcgcatccttttccttgtcggcgctgctaccggcgcccattcccagctccagttgcaagagagcggccctggcttggtaaaaccttccgagacccttagcctcacatgcacggttagtgggggcagcatttcctcaggtgattactattggggatggattcggcaacccccgggtaaaggattggagtggattggtcatatttattatagtggagcgacgtactacaacccaagtctcaaatccagggttacaatatccgtcgatacgagcaggaaccaattcagcttgaaactttctagtgtcaccgcagcagacacagccgtctattactgtacgcgggatgactccagtaattggcggtcccgagggcaagggacactggtcacggtctcctcatctggaggcggtggaagcggtggaggaggatctcaggttcagctgcaagagtctggcggaggacttgctcaagctggcggaagcctgagactgtcttgtgccgcctctggcagaaccttcagcatgggctggtttagacaggcccctggcaaagagagagagttcgtcgccgccatcacatacagcggcggcagcccttactacgcctcttctgtcagaggccggttcaccatcagccgggacaacgccaagaacaccgtgtacctccagatgaacagcctgaagccagaggacaccgccgtgtactactgtgccgccaatccaacctacggcagcgactggaatgccgagaattggggccagggcacccaagtgacagtgtctagtggatccggcggcggaggatctggcggaggcggatctgggggcggaggctctttcgaacaagttcagcttcaacagcctggcgctgagctggtcaaacctggcgcttctgtgaagatgagctgcaaagccagcggctacgccttcagcagctactggatcaactggatgaagcagaaacccggccagggactcgaatggatcggccaaatctatcccggcgacggcgacaccaactacaacggcaagttcaagggcagagccacactgaccgccgatacctctagcagcacagcctacatgcagctgagcagcctgaccagcgaagatagcgccgtgtacttctgtgcccggtccatcacaacagtcgtgggctgcgctatggactattggggccagggaacaagcgtgaccgtgtctagtacgcgtgagcagaaactgatctcggaagaggatgggagcggcagccagcctcacaccaagcccagcgtgttcgtgatgaagaacggcaccaacgtggcctgcctcgtgaaagagttctaccccaaggacatcaggatcaacctggtgtccagcaagaagatcaccgagttcgaccccgccatcgtgatctcccccagcggcaagtacaacgccgtgaagctggggaagtacgaggacagcaacagcgtgacctgctccgtgcagcacgacaacaagaccgtgcacagcaccgactttgaagtgaaaaccgactccaccgaccacgtgaagcccaaagagacagagaacaccaagcagcccagcaagagctgccacaagcccaaggccatcgtgcacaccgagaaagtgaacatgatgagcctgaccgtgctgggcctgcggatgctgttcgccaaaaccgtggccgtgaacttcctgctgaccgccaagctgttcttcctccgcgccaagagaagcggatctggcgtgaagcagaccctgaatttcgacctgctgaagctggctggcgacgtggaatccaacccaggcccttctagaggccatatgaccgagtacaagcccacggtgcgcctcgccacccgcgacgacgtccccagggccgtacgcaccctcgccgccgcgttcgccgactaccccgccacgcgccacaccgtcgatccggaccgccacatcgagcgggtcaccgagctgcaagaactcttcctcacgcgcgtcgggctcgacatcggcaaggtgtgggtcgcggacgacggcgccgcggtggcggtctggaccacgccggagagcgtcgaagcgggggcggtgttcgccgagatcggcccgcgcatggccgagttgagcggttcccggctggccgcgcagcaacagatggaaggcctcctggcgccgcaccggcccaaggagcccgcgtggttcctggccaccgtcggcgtctcgcccgaccaccagggcaagggtctgggcagcgccgtcgtgctccccggagtggaggcggccgagcgcgccggggtgcccgccttcctggagacctccgcgccccgcaacctccccttctacgagcggctcggcttcaccgtcaccgccgacgtcgaggtgcccgaaggaccgcgcacctggtgcatgacccgcaagcccggtgcctga

SEQ ID NO: 5196 - DNA, 3495 bp, Artificial Sequence
  Synthetic Polynucloetide
atggccttaccagtgaccgccttgctcctgccgctggccttgctgctccacgccgccaggccggaggttcagctgcttgagtctggcggaggactggttcaacctggcggaagcctgagactgtcttgtgccgccagcggcttcacctttagcagctacgccatgagctgggtccgacaggctcctggcaaaggactggaatgggtgtccagcatcagcggcagcggcgactacatctactacgccgatagcgtgaagggcagattcaccatcagccgggacatcagcaagaacaccctgtacctccagatgaacagcctgagagccgaggacaccgccgtgtactactgtgccaaagaaggcaccggcgctaacagcagcctggccgattatagaggccagggcacactggtcaccgtgtctagtggcggaggaagcggcggaggatctcaggtccagctcgtcgagtccggcggcggcctcgtccaggccggcgactccgtcaccctctcctgcaccgcctccggccgcaccttctcctcctacgccctcgcctggttccgccagcgccccggcaaggagcgcgagttcgtcgccggcctccgctggggcggccccaccaactacgccgactccgtcaaggaccgcttcaccatctccggcgactccgccaagcacaccatgtacctccagatgaactccctcaagcccgaggacaccgccgtctactactgcggctacaaccccggcggctgggccgtcccctcccagtacgagtacgactcctggggccagggcacccaggtcaccgtctcctccggtaccggcggaggcggatctggcggcggaggtagcggtggcggaggatctgaattcgacatccagatgacacagagccctagcagcctgtctgccagcgtgggagacagagtgaccatcacatgcaaggccagcgaccacatcaacaactggctggcctggtatcagcagaagcctggacaggcccctaagctgctgatctacggcgctaccacactggaaacaggcgtgcccagcagattttctggcagcggctctggcaccgactacaccctgacaatatccagcctccagcctgaggacttcgccacctactactgtcagcagagctggaacaccccttggacattcggccagggcaccaagctggaaatcaagagactcgagagccagcctcacaccaagcccagcgtgttcgtgatgaagaacggcaccaacgtggcctgcctcgtgaaagagttctaccccaaggacatcaggatcaacctggtgtccagcaagaagatcaccgagttcgaccccgccatcgtgatctcccccagcggcaagtacaacgccgtgaagctggggaagtacgaggacagcaacagcgtgacctgctccgtgcagcacgacaacaagaccgtgcacagcaccgactttgaagtgaaaaccgactccaccgaccacgtgaagcccaaagagacagagaacaccaagcagcccagcaagagctgccacaagcccaaggccatcgtgcacaccgagaaagtgaacatgatgagcctgaccgtgctgggcctgcggatgctgttcgccaaaaccgtggccgtgaacttcctgctgaccgccaagctgttcttcctcagggccaagcgatctggatctggagcaacaaacttctcactactcaaacaagcaggtgacgtggaggagaatcccgggcctactagtatggactggatttggcgcatccttttccttgtcggcgctgctaccggcgcccattcccagctccagttgcaagagagcggccctggcttggtaaaaccttccgagacccttagcctcacatgcacggttagtgggggcagcatttcctcaggtgattactattggggatggattcggcaacccccgggtaaaggattggagtggattggtcatatttattatagtggagcgacgtactacaacccaagtctcaaatccagggttacaatatccgtcgatacgagcaggaaccaattcagcttgaaactttctagtgtcaccgcagcagacacagccgtctattactgtacgcgggatgactccagtaattggcggtcccgagggcaagggacactggtcacggtctcctcatctggaggcggtggaagcggtggaggaggatctcaggttcagctgcaagagtctggcggaggacttgctcaagctggcggaagcctgagactgtcttgtgccgcctctggcagaaccttcagcatgggctggtttagacaggcccctggcaaagagagagagttcgtcgccgccatcacatacagcggcggcagcccttactacgcctcttctgtcagaggccggttcaccatcagccgggacaacgccaagaacaccgtgtacctccagatgaacagcctgaagccagaggacaccgccgtgtactactgtgccgccaatccaacctacggcagcgactggaatgccgagaattggggccagggcacccaagtgacagtgtctagtggatccggcggcggaggatctggcggaggcggatctgggggcggaggctctttcgaacaagttcagcttcaacagcctggcgctgagctggtcaaacctggcgcttctgtgaagatgagctgcaaagccagcggctacgccttcagcagctactggatcaactggatgaagcagaaacccggccagggactcgaatggatcggccaaatctatcccggcgacggcgacaccaactacaacggcaagttcaagggcagagccacactgaccgccgatacctctagcagcacagcctacatgcagctgagcagcctgaccagcgaagatagcgccgtgtacttctgtgcccggtccatcacaacagtcgtgggctgcgctatggactattggggccagggaacaagcgtgaccgtgtctagtacgcgtgacaagcagctggacgccgacgtgtcccccaagcctaccatcttcctgccctctatcgccgagacaaagctccagaaggccggcacctacctgtgcctgctggaaaagttcttcccagatgtgattaagatccactggcaggaaaagaagtccaacaccatcctgggcagccaggaaggcaacaccatgaagaccaacgacacctacatgaagttcagctggctgaccgtgcccgagaagtccctggacaaagaacacagatgcatcgtgcggcacgaaaacaacaagaacggcgtggaccaggaaatcatcttcccacccatcaagaccgatgtgattacaatggaccccaaggacaactgctccaaggacgccaacgataccctgctgctccagctgaccaacaccagcgcctactacatgtacttgttgctgctgctgaagtccgtggtgtacttcgccatcatcacatgctgcctgctgcggagaaccgccttctgctgcaacggcgagaagtct

SEQ ID NO: 5197 - DNA, 4704 bp, Artificial Sequence
  Synthetic Polynucloetide
atggccttaccagtgaccgccttgctcctgccgctggccttgctgctccacgccgccaggccggaggttcagctgcttgagtctggcggaggactggttcaacctggcggaagcctgagactgtcttgtgccgccagcggcttcacctttagcagctacgccatgagctgggtccgacaggctcctggcaaaggactggaatgggtgtccagcatcagcggcagcggcgactacatctactacgccgatagcgtgaagggcagattcaccatcagccgggacatcagcaagaacaccctgtacctccagatgaacagcctgagagccgaggacaccgccgtgtactactgtgccaaagaaggcaccggcgctaacagcagcctggccgattatagaggccagggcacactggtcaccgtgtctagtggcggaggaagcggcggaggatctcaggtccagctcgtcgagtccggcggcggcctcgtccaggccggcgactccgtcaccctctcctgcaccgcctccggccgcaccttctcctcctacgccctcgcctggttccgccagcgccccggcaaggagcgcgagttcgtcgccggcctccgctggggcggccccaccaactacgccgactccgtcaaggaccgcttcaccatctccggcgactccgccaagcacaccatgtacctccagatgaactccctcaagcccgaggacaccgccgtctactactgcggctacaaccccggcggctgggccgtcccctcccagtacgagtacgactcctggggccagggcacccaggtcaccgtctcctccggtaccggcggaggcggatctggcggcggaggtagcggtggcggaggatctgaattcgacatccagatgacacagagccctagcagcctgtctgccagcgtgggagacagagtgaccatcacatgcaaggccagcgaccacatcaacaactggctggcctggtatcagcagaagcctggacaggcccctaagctgctgatctacggcgctaccacactggaaacaggcgtgcccagcagattttctggcagcggctctggcaccgactacaccctgacaatatccagcctccagcctgaggacttcgccacctactactgtcagcagagctggaacaccccttggacattcggccagggcaccaagctggaaatcaagagaggacagcctaaggccaatcctaccgtgacactgttccctccaagcagcgaagaactccaggccaacaaggccacacttgtgtgcctgatctccgacttctaccctggggctgtgacagtggcttggaaggccgatggatctcctgtgaaagccggcgtggaaaccaccaagccatccaagcagagcaacaacaaatacgccgccagctcctacctgagcctgacacctgagcagtggaagtcccacagatcctacagctgccaagtgacccacgaaggcagcaccgtggaaaagacagtggcccctacagagtgcagcggatcccagagcttcggcctgctggaccccaagctgtgctacctgctggatggcatcctgttcatctacggcgtgatcctgaccgccctgttcctgagagtgaagttcagcagaagcgccgacgcccctgcctaccagcagggacagaaccaactgtacaacgagctgaacctgggcagacgggaagagtacgacgtgctggacaagcggagaggcagggaccctgagatgggcggaaagccccagcggagaaagaacccccaggaaggactgtataacgaactccagaaagacaagatggccgaagcctacagcgagatcggcatgaagggcgagcggagaagaggcaagggccacgatggcctgtaccagggcctgagcaccgccaccaaggacacctatgacgccctgcacatgcaggccctgcctccaagaagggccaagcgatctggatctggagcaacaaacttctcactactcaaacaagcaggtgacgtggaggagaatcccgggcctactagtatggactggatttggcgcatccttttccttgtcggcgctgctaccggcgcccattcccagctccagttgcaagagagcggccctggcttggtaaaaccttccgagacccttagcctcacatgcacggttagtgggggcagcatttcctcaggtgattactattggggatggattcggcaacccccgggtaaaggattggagtggattggtcatatttattatagtggagcgacgtactacaacccaagtctcaaatccagggttacaatatccgtcgatacgagcaggaaccaattcagcttgaaactttctagtgtcaccgcagcagacacagccgtctattactgtacgcgggatgactccagtaattggcggtcccgagggcaagggacactggtcacggtctcctcatctggaggcggtggaagcggtggaggaggatctcaggttcagctgcaagagtctggcggaggacttgctcaagctggcggaagcctgagactgtcttgtgccgcctctggcagaaccttcagcatgggctggtttagacaggcccctggcaaagagagagagttcgtcgccgccatcacatacagcggcggcagcccttactacgcctcttctgtcagaggccggttcaccatcagccgggacaacgccaagaacaccgtgtacctccagatgaacagcctgaagccagaggacaccgccgtgtactactgtgccgccaatccaacctacggcagcgactggaatgccgagaattggggccagggcacccaagtgacagtgtctagtggatccggcggcggaggatctggcggaggcggatctgggggcggaggctctttcgaacaagttcagcttcaacagcctggcgctgagctggtcaaacctggcgcttctgtgaagatgagctgcaaagccagcggctacgccttcagcagctactggatcaactggatgaagcagaaacccggccagggactcgaatggatcggccaaatctatcccggcgacggcgacaccaactacaacggcaagttcaagggcagagccacactgaccgccgatacctctagcagcacagcctacatgcagctgagcagcctgaccagcgaagatagcgccgtgtacttctgtgcccggtccatcacaacagtcgtgggctgcgctatggactattggggccagggaacaagcgtgaccgtgtctagtgcctctacaaagggaccctccgtgtttcctctggctcccagcagcaagtctacaagcggaggaacagccgctctgggctgcctggtcaaggattactttcccgagcctgtgaccgtgtcctggaatagcggagcactgacaagcggcgtgcacacctttccagccgtgctgcaaagcagcggcctgtactctctgagcagcgtggtcacagtgcctagctctagcctgggcacccagacctacatctgcaatgtgaaccacaagcctagcaacaccaaggtggacaagagagtggaacccaagagctgtggtacccagagttttgggttgttggaccctaaattgtgctatctgttggacggaatcctgttcatttacggagtgatcctgaccgcattgttcctgcgggttaagttttccagatccgcagacgcacccgcttaccaacaagggcagaaccaactctacaatgaacttaatttggggcggagggaagagtacgacgttctggacaaaaggaggggacgagatcccgagatgggcggaaagcctcagcgaaggaagaatccgcaagaggggctttataacgaactccagaaagataaaatggcagaagcctatagtgagattgggatgaagggagaaaggaggaggggtaaaggtcacgatgggttgtaccaaggattgagcacagccactaaagatacctatgatgcgctccacatgcaggccctgccgccaagacgcgccaagagaagcggatctggcgtgaagcagaccctgaatttcgacctgctgaagctggctggcgacgtggaatccaacccaggcccttctagaggccatatgaccgagtacaagcccacggtgcgcctcgccacccgcgacgacgtccccagggccgtacgcaccctcgccgccgcgttcgccgactaccccgccacgcgccacaccgtcgatccggaccgccacatcgagcgggtcaccgagctgcaagaactcttcctcacgcgcgtcgggctcgacatcggcaaggtgtgggtcgcggacgacggcgccgcggtggcggtctggaccacgccggagagcgtcgaagcgggggcggtgttcgccgagatcggcccgcgcatggccgagttgagcggttcccggctggccgcgcagcaacagatggaaggcctcctggcgccgcaccggcccaaggagcccgcgtggttcctggccaccgtcggcgtctcgcccgaccaccagggcaagggtctgggcagcgccgtcgtgctccccggagtggaggcggccgagcgcgccggggtgcccgccttcctggagacctccgcgccccgcaacctccccttctacgagcggctcggcttcaccgtcaccgccgacgtcgaggtgcccgaaggaccgcgcacctggtgcatgacccgcaagcccggtgcctga

SEQ ID NO: 5198 - DNA, 4059 bp, Artificial Sequence
  Synthetic Polynucloetide
atggccttaccagtgaccgccttgctcctgccgctggccttgctgctccacgccgccaggccggaggttcagctgcttgagtctggcggaggactggttcaacctggcggaagcctgagactgtcttgtgccgccagcggcttcacctttagcagctacgccatgagctgggtccgacaggctcctggcaaaggactggaatgggtgtccagcatcagcggcagcggcgactacatctactacgccgatagcgtgaagggcagattcaccatcagccgggacatcagcaagaacaccctgtacctccagatgaacagcctgagagccgaggacaccgccgtgtactactgtgccaaagaaggcaccggcgctaacagcagcctggccgattatagaggccagggcacactggtcaccgtgtctagtggcggaggaagcggcggaggatctcaggtccagctcgtcgagtccggcggcggcctcgtccaggccggcgactccgtcaccctctcctgcaccgcctccggccgcaccttctcctcctacgccctcgcctggttccgccagcgccccggcaaggagcgcgagttcgtcgccggcctccgctggggcggccccaccaactacgccgactccgtcaaggaccgcttcaccatctccggcgactccgccaagcacaccatgtacctccagatgaactccctcaagcccgaggacaccgccgtctactactgcggctacaaccccggcggctgggccgtcccctcccagtacgagtacgactcctggggccagggcacccaggtcaccgtctcctccggtaccggcggaggcggatctggcggcggaggtagcggtggcggaggatctgaattcgacatccagatgacacagagccctagcagcctgtctgccagcgtgggagacagagtgaccatcacatgcaaggccagcgaccacatcaacaactggctggcctggtatcagcagaagcctggacaggcccctaagctgctgatctacggcgctaccacactggaaacaggcgtgcccagcagattttctggcagcggctctggcaccgactacaccctgacaatatccagcctccagcctgaggacttcgccacctactactgtcagcagagctggaacaccccttggacattcggccagggcaccaagctggaaatcaagagactcgaggacctgaagaacgtgttcccacctgaggtggccgtgttcgagcctagcgaggccgagatcagccacacccagaaagccaccctcgtgtgcctggctaccggcttctaccccgaccatgtggaactgtcttggtgggtcaacggcaaagaggtgcacagcggcgtgtctaccgacccccagccactgaaagaacagcccgccctgaacgacagccggtactgcctgagcagcagactgagagtgtccgccaccttctggcagaacccccggaaccacttcagatgccaggtgcagttctacggcctgagcgagaacgacgagtggacccaggacagagccaagcccgtgacccagatcgtgtctgccgaagcctggggcagagccgattgcggatcccagagcttcggcctgctggaccccaagctgtgctacctgctggatggcatcctgttcatctacggcgtgatcctgaccgccctgttcctgagagtgaagttcagcagaagcgccgacgcccctgcctaccagcagggacagaaccaactgtacaacgagctgaacctgggcagacgggaagagtacgacgtgctggacaagcggagaggcagggaccctgagatgggcggaaagccccagcggagaaagaacccccaggaaggactgtataacgaactccagaaagacaagatggccgaagcctacagcgagatcggcatgaagggcgagcggagaagaggcaagggccacgatggcctgtaccagggcctgagcaccgccaccaaggacacctatgacgccctgcacatgcaggccctgcctccaagaagggccaagcgatctggatctggagcaacaaacttctcactactcaaacaagcaggtgacgtggaggagaatcccgggcctactagtatggactggatttggcgcatccttttccttgtcggcgctgctaccggcgcccattcccagctccagttgcaagagagcggccctggcttggtaaaaccttccgagacccttagcctcacatgcacggttagtgggggcagcatttcctcaggtgattactattggggatggattcggcaacccccgggtaaaggattggagtggattggtcatatttattatagtggagcgacgtactacaacccaagtctcaaatccagggttacaatatccgtcgatacgagcaggaaccaattcagcttgaaactttctagtgtcaccgcagcagacacagccgtctattactgtacgcgggatgactccagtaattggcggtcccgagggcaagggacactggtcacggtctcctcatctggaggcggtggaagcggtggaggaggatctcaggttcagctgcaagagtctggcggaggacttgctcaagctggcggaagcctgagactgtcttgtgccgcctctggcagaaccttcagcatgggctggtttagacaggcccctggcaaagagagagagttcgtcgccgccatcacatacagcggcggcagcccttactacgcctcttctgtcagaggccggttcaccatcagccgggacaacgccaagaacaccgtgtacctccagatgaacagcctgaagccagaggacaccgccgtgtactactgtgccgccaatccaacctacggcagcgactggaatgccgagaattggggccagggcacccaagtgacagtgtctagtggatccggcggcggaggatctggcggaggcggatctgggggcggaggctctttcgaacaagttcagcttcaacagcctggcgctgagctggtcaaacctggcgcttctgtgaagatgagctgcaaagccagcggctacgccttcagcagctactggatcaactggatgaagcagaaacccggccagggactcgaatggatcggccaaatctatcccggcgacggcgacaccaactacaacggcaagttcaagggcagagccacactgaccgccgatacctctagcagcacagcctacatgcagctgagcagcctgaccagcgaagatagcgccgtgtacttctgtgcccggtccatcacaacagtcgtgggctgcgctatggactattggggccagggaacaagcgtgaccgtgtctagtacgcgtatccagaaccctgatcctgccgtgtaccagctgcgggatagcaagagcagcgacaagagcgtgtgtctgttcaccgacttcgacagccagaccaacgtgtcccagagcaaggactccgacgtgtacatcaccgataagaccgtgctggacatgcggagcatggacttcaagagcaactccgccgtggcctggtccaacaagtccgatttcgcctgcgccaacgccttcaacaacagcattatccccgaggacacattcttcccaagccccgagagcagctgcggtacccagagttttgggttgttggaccctaaattgtgctatctgttggacggaatcctgttcatttacggagtgatcctgaccgcattgttcctgcgggttaagttttccagatccgcagacgcacccgcttaccaacaagggcagaaccaactctacaatgaacttaatttggggcggagggaagagtacgacgttctggacaaaaggaggggacgagatcccgagatgggcggaaagcctcagcgaaggaagaatccgcaagaggggctttataacgaactccagaaagataaaatggcagaagcctatagtgagattgggatgaagggagaaaggaggaggggtaaaggtcacgatgggttgtaccaaggattgagcacagccactaaagatacctatgatgcgctccacatgcaggccctgccgccaaga

SEQ ID NO: 5199 - DNA, 4059 bp, Artificial Sequence
  Synthetic Polynucloetide
atggccttaccagtgaccgccttgctcctgccgctggccttgctgctccacgccgccaggccggaggttcagctgcttgagtctggcggaggactggttcaacctggcggaagcctgagactgtcttgtgccgccagcggcttcacctttagcagctacgccatgagctgggtccgacaggctcctggcaaaggactggaatgggtgtccagcatcagcggcagcggcgactacatctactacgccgatagcgtgaagggcagattcaccatcagccgggacatcagcaagaacaccctgtacctccagatgaacagcctgagagccgaggacaccgccgtgtactactgtgccaaagaaggcaccggcgctaacagcagcctggccgattatagaggccagggcacactggtcaccgtgtctagtggcggaggaagcggcggaggatctcaggtccagctcgtcgagtccggcggcggcctcgtccaggccggcgactccgtcaccctctcctgcaccgcctccggccgcaccttctcctcctacgccctcgcctggttccgccagcgccccggcaaggagcgcgagttcgtcgccggcctccgctggggcggccccaccaactacgccgactccgtcaaggaccgcttcaccatctccggcgactccgccaagcacaccatgtacctccagatgaactccctcaagcccgaggacaccgccgtctactactgcggctacaaccccggcggctgggccgtcccctcccagtacgagtacgactcctggggccagggcacccaggtcaccgtctcctccggtaccggcggaggcggatctggcggcggaggtagcggtggcggaggatctgaattcgacatccagatgacacagagccctagcagcctgtctgccagcgtgggagacagagtgaccatcacatgcaaggccagcgaccacatcaacaactggctggcctggtatcagcagaagcctggacaggcccctaagctgctgatctacggcgctaccacactggaaacaggcgtgcccagcagattttctggcagcggctctggcaccgactacaccctgacaatatccagcctccagcctgaggacttcgccacctactactgtcagcagagctggaacaccccttggacattcggccagggcaccaagctggaaatcaagagactcgaggacctgaagaacgtgttcccacctgaggtggccgtgttcgagcctagcaaggccgagatcgcccacacccagaaagccaccctcgtgtgcctggctaccggcttctaccccgaccatgtggaactgtcttggtgggtcaacggcaaagaggtgcacagcggcgtgtgtaccgacccccagccactgaaagaacagcccgccctgaacgacagccggtactgcctgagcagcagactgagagtgtccgccaccttctggcagaacccccggaaccacttcagatgccaggtgcagttctacggcctgagcgagaacgacgagtggacccaggacagagccaagcccgtgacccagatcgtgtctgccgaagcctggggcagagccgattgcggatcccagagcttcggcctgctggaccccaagctgtgctacctgctggatggcatcctgttcatctacggcgtgatcctgaccgccctgttcctgagagtgaagttcagcagaagcgccgacgcccctgcctaccagcagggacagaaccaactgtacaacgagctgaacctgggcagacgggaagagtacgacgtgctggacaagcggagaggcagggaccctgagatgggcggaaagccccagcggagaaagaacccccaggaaggactgtataacgaactccagaaagacaagatggccgaagcctacagcgagatcggcatgaagggcgagcggagaagaggcaagggccacgatggcctgtaccagggcctgagcaccgccaccaaggacacctatgacgccctgcacatgcaggccctgcctccaagaagggccaagcgatctggatctggagcaacaaacttctcactactcaaacaagcaggtgacgtggaggagaatcccgggcctactagtatggactggatttggcgcatccttttccttgtcggcgctgctaccggcgcccattcccagctccagttgcaagagagcggccctggcttggtaaaaccttccgagacccttagcctcacatgcacggttagtgggggcagcatttcctcaggtgattactattggggatggattcggcaacccccgggtaaaggattggagtggattggtcatatttattatagtggagcgacgtactacaacccaagtctcaaatccagggttacaatatccgtcgatacgagcaggaaccaattcagcttgaaactttctagtgtcaccgcagcagacacagccgtctattactgtacgcgggatgactccagtaattggcggtcccgagggcaagggacactggtcacggtctcctcatctggaggcggtggaagcggtggaggaggatctcaggttcagctgcaagagtctggcggaggacttgctcaagctggcggaagcctgagactgtcttgtgccgcctctggcagaaccttcagcatgggctggtttagacaggcccctggcaaagagagagagttcgtcgccgccatcacatacagcggcggcagcccttactacgcctcttctgtcagaggccggttcaccatcagccgggacaacgccaagaacaccgtgtacctccagatgaacagcctgaagccagaggacaccgccgtgtactactgtgccgccaatccaacctacggcagcgactggaatgccgagaattggggccagggcacccaagtgacagtgtctagtggatccggcggcggaggatctggcggaggcggatctgggggcggaggctctttcgaacaagttcagcttcaacagcctggcgctgagctggtcaaacctggcgcttctgtgaagatgagctgcaaagccagcggctacgccttcagcagctactggatcaactggatgaagcagaaacccggccagggactcgaatggatcggccaaatctatcccggcgacggcgacaccaactacaacggcaagttcaagggcagagccacactgaccgccgatacctctagcagcacagcctacatgcagctgagcagcctgaccagcgaagatagcgccgtgtacttctgtgcccggtccatcacaacagtcgtgggctgcgctatggactattggggccagggaacaagcgtgaccgtgtctagtacgcgtatccagaaccctgatcctgccgtgtaccagctgcgggatagcaagagcagcgacaagagcgtgtgtctgttcaccgacttcgacagccagaccaacgtgtcccagagcaaggactccgacgtgtacatcaccgataagtgcgtgctggacatgcggagcatggacttcaagagcaactccgccgtggcctggtccaacaagtccgatttcgcctgcgccaacgccttcaacaacagcattatccccgaggacacattcttcccaagcagcgacgtgccctgcggtacccagagttttgggttgttggaccctaaattgtgctatctgttggacggaatcctgttcatttacggagtgatcctgaccgcattgttcctgcgggttaagttttccagatccgcagacgcacccgcttaccaacaagggcagaaccaactctacaatgaacttaatttggggcggagggaagagtacgacgttctggacaaaaggaggggacgagatcccgagatgggcggaaagcctcagcgaaggaagaatccgcaagaggggctttataacgaactccagaaagataaaatggcagaagcctatagtgagattgggatgaagggagaaaggaggaggggtaaaggtcacgatgggttgtaccaaggattgagcacagccactaaagatacctatgatgcgctccacatgcaggccctgccgccaaga

SEQ ID NO: 5200 - DNA, 4272 bp, Artificial Sequence
  Synthetic Polynucloetide
atggccttaccagtgaccgccttgctcctgccgctggccttgctgctccacgccgccaggccggaggttcagctgcttgagtctggcggaggactggttcaacctggcggaagcctgagactgtcttgtgccgccagcggcttcacctttagcagctacgccatgagctgggtccgacaggctcctggcaaaggactggaatgggtgtccagcatcagcggcagcggcgactacatctactacgccgatagcgtgaagggcagattcaccatcagccgggacatcagcaagaacaccctgtacctccagatgaacagcctgagagccgaggacaccgccgtgtactactgtgccaaagaaggcaccggcgctaacagcagcctggccgattatagaggccagggcacactggtcaccgtgtctagtggcggaggaagcggcggaggatctcaggtccagctcgtcgagtccggcggcggcctcgtccaggccggcgactccgtcaccctctcctgcaccgcctccggccgcaccttctcctcctacgccctcgcctggttccgccagcgccccggcaaggagcgcgagttcgtcgccggcctccgctggggcggccccaccaactacgccgactccgtcaaggaccgcttcaccatctccggcgactccgccaagcacaccatgtacctccagatgaactccctcaagcccgaggacaccgccgtctactactgcggctacaaccccggcggctgggccgtcccctcccagtacgagtacgactcctggggccagggcacccaggtcaccgtctcctccggtaccggcggaggcggatctggcggcggaggtagcggtggcggaggatctgaattcgacatccagatgacacagagccctagcagcctgtctgccagcgtgggagacagagtgaccatcacatgcaaggccagcgaccacatcaacaactggctggcctggtatcagcagaagcctggacaggcccctaagctgctgatctacggcgctaccacactggaaacaggcgtgcccagcagattttctggcagcggctctggcaccgactacaccctgacaatatccagcctccagcctgaggacttcgccacctactactgtcagcagagctggaacaccccttggacattcggccagggcaccaagctggaaatcaagagactcgaggggaaaccaattcccaaccctcttctgggactggattcaaccggcagcggcgaggacctgaagaacgtgttcccacctgaggtggccgtgttcgagcctagcgaggccgagatcagccacacccagaaagccaccctcgtgtgcctggctaccggcttctaccccgaccatgtggaactgtcttggtgggtcaacggcaaagaggtgcacagcggcgtgtctaccgacccccagccactgaaagaacagcccgccctgaacgacagccggtactgcctgagcagcagactgagagtgtccgccaccttctggcagaacccccggaaccacttcagatgccaggtgcagttctacggcctgagcgagaacgacgagtggacccaggacagagccaagcccgtgacccagatcgtgtctgccgaagcctggggcagagccgattgcggatcccagagcttcggcctgctggaccccaagctgtgctacctgctggatggcatcctgttcatctacggcgtgatcctgaccgccctgttcctgagagtgaagttcagcagaagcgccgacgcccctgcctaccagcagggacagaaccaactgtacaacgagctgaacctgggcagacgggaagagtacgacgtgctggacaagcggagaggcagggaccctgagatgggcggaaagccccagcggagaaagaacccccaggaaggactgtataacgaactccagaaagacaagatggccgaagcctacagcgagatcggcatgaagggcgagcggagaagaggcaagggccacgatggcctgtaccagggcctgagcaccgccaccaaggacacctatgacgccctgcacatgcaggccctgcctccaagaagggccaagcgatctggatctggagcaacaaacttctcactactcaaacaagcaggtgacgtggaggagaatcccgggcctactagtatggactggatttggcgcatccttttccttgtcggcgctgctaccggcgcccattcccagctccagttgcaagagagcggccctggcttggtaaaaccttccgagacccttagcctcacatgcacggttagtgggggcagcatttcctcaggtgattactattggggatggattcggcaacccccgggtaaaggattggagtggattggtcatatttattatagtggagcgacgtactacaacccaagtctcaaatccagggttacaatatccgtcgatacgagcaggaaccaattcagcttgaaactttctagtgtcaccgcagcagacacagccgtctattactgtacgcgggatgactccagtaattggcggtcccgagggcaagggacactggtcacggtctcctcatctggaggcggtggaagcggtggaggaggatctcaggttcagctgcaagagtctggcggaggacttgctcaagctggcggaagcctgagactgtcttgtgccgcctctggcagaaccttcagcatgggctggtttagacaggcccctggcaaagagagagagttcgtcgccgccatcacatacagcggcggcagcccttactacgcctcttctgtcagaggccggttcaccatcagccgggacaacgccaagaacaccgtgtacctccagatgaacagcctgaagccagaggacaccgccgtgtactactgtgccgccaatccaacctacggcagcgactggaatgccgagaattggggccagggcacccaagtgacagtgtctagtggatccggcggcggaggatctggcggaggcggatctgggggcggaggctctttcgaacaagttcagcttcaacagcctggcgctgagctggtcaaacctggcgcttctgtgaagatgagctgcaaagccagcggctacgccttcagcagctactggatcaactggatgaagcagaaacccggccagggactcgaatggatcggccaaatctatcccggcgacggcgacaccaactacaacggcaagttcaagggcagagccacactgaccgccgatacctctagcagcacagcctacatgcagctgagcagcctgaccagcgaagatagcgccgtgtacttctgtgcccggtccatcacaacagtcgtgggctgcgctatggactattggggccagggaacaagcgtgaccgtgtctagtacgcgtgagcagaaactgatctcggaagaggatgggagcggcatccagaaccctgatcctgccgtgtaccagctgcgggatagcaagagcagcgacaagagcgtgtgtctgttcaccgacttcgacagccagaccaacgtgtcccagagcaaggactccgacgtgtacatcaccgataagaccgtgctggacatgcggagcatggacttcaagagcaactccgccgtggcctggtccaacaagtccgatttcgcctgcgccaacgccttcaacaacagcattatccccgaggacacattcttcccaagccccgagagcagctgcggtacccagagttttgggttgttggaccctaaattgtgctatctgttggacggaatcctgttcatttacggagtgatcctgaccgcattgttcctgaggagcaagcggtcacggctgctccacagcgattacatgaatatgacaccacgaagaccgggtcctactcgcaaacactaccaaccctacgcacctccccgcgactttgcagcgtaccgatctcgggttaagttttccagatccgcagacgcacccgcttaccaacaagggcagaaccaactctacaatgaacttaatttggggcggagggaagagtacgacgttctggacaaaaggaggggacgagatcccgagatgggcggaaagcctcagcgaaggaagaatccgcaagaggggctttataacgaactccagaaagataaaatggcagaagcctatagtgagattgggatgaagggagaaaggaggaggggtaaaggtcacgatgggttgtaccaaggattgagcacagccactaaagatacctatgatgcgctccacatgcaggccctgccgccaaga

SEQ ID NO: 5201 - DNA, 4395 bp, Artificial Sequence
  Synthetic Polynucloetide
atggccttaccagtgaccgccttgctcctgccgctggccttgctgctccacgccgccaggccggaggttcagctgcttgagtctggcggaggactggttcaacctggcggaagcctgagactgtcttgtgccgccagcggcttcacctttagcagctacgccatgagctgggtccgacaggctcctggcaaaggactggaatgggtgtccagcatcagcggcagcggcgactacatctactacgccgatagcgtgaagggcagattcaccatcagccgggacatcagcaagaacaccctgtacctccagatgaacagcctgagagccgaggacaccgccgtgtactactgtgccaaagaaggcaccggcgctaacagcagcctggccgattatagaggccagggcacactggtcaccgtgtctagtggcggaggaagcggcggaggatctcaggtccagctcgtcgagtccggcggcggcctcgtccaggccggcgactccgtcaccctctcctgcaccgcctccggccgcaccttctcctcctacgccctcgcctggttccgccagcgccccggcaaggagcgcgagttcgtcgccggcctccgctggggcggccccaccaactacgccgactccgtcaaggaccgcttcaccatctccggcgactccgccaagcacaccatgtacctccagatgaactccctcaagcccgaggacaccgccgtctactactgcggctacaaccccggcggctgggccgtcccctcccagtacgagtacgactcctggggccagggcacccaggtcaccgtctcctccggtaccggcggaggcggatctggcggcggaggtagcggtggcggaggatctgaattcgacatccagatgacacagagccctagcagcctgtctgccagcgtgggagacagagtgaccatcacatgcaaggccagcgaccacatcaacaactggctggcctggtatcagcagaagcctggacaggcccctaagctgctgatctacggcgctaccacactggaaacaggcgtgcccagcagattttctggcagcggctctggcaccgactacaccctgacaatatccagcctccagcctgaggacttcgccacctactactgtcagcagagctggaacaccccttggacattcggccagggcaccaagctggaaatcaagagactcgaggggaaaccaattcccaaccctcttctgggactggattcaaccggcagcggcgaggacctgaagaacgtgttcccacctgaggtggccgtgttcgagcctagcgaggccgagatcagccacacccagaaagccaccctcgtgtgcctggctaccggcttctaccccgaccatgtggaactgtcttggtgggtcaacggcaaagaggtgcacagcggcgtgtctaccgacccccagccactgaaagaacagcccgccctgaacgacagccggtactgcctgagcagcagactgagagtgtccgccaccttctggcagaacccccggaaccacttcagatgccaggtgcagttctacggcctgagcgagaacgacgagtggacccaggacagagccaagcccgtgacccagatcgtgtctgccgaagcctggggcagagccgattgcggatcccagagcttcggcctgctggaccccaagctgtgctacctgctggatggcatcctgttcatctacggcgtgatcctgaccgccctgttcctgaggagtaagaggagcaggctcctgcacagtgactacatgaacatgactccacgccgccccggacccacccgcaagcattaccagccctatgccccaccacgcgacttcgcagcctatcgctccagagtgaagttcagcagaagcgccgacgcccctgcctaccagcagggacagaaccaactgtacaacgagctgaacctgggcagacgggaagagtacgacgtgctggacaagcggagaggcagggaccctgagatgggcggaaagccccagcggagaaagaacccccaggaaggactgtataacgaactccagaaagacaagatggccgaagcctacagcgagatcggcatgaagggcgagcggagaagaggcaagggccacgatggcctgtaccagggcctgagcaccgccaccaaggacacctatgacgccctgcacatgcaggccctgcctccaagaagggccaagcgatctggatctggagcaacaaacttctcactactcaaacaagcaggtgacgtggaggagaatcccgggcctactagtatggactggatttggcgcatccttttccttgtcggcgctgctaccggcgcccattcccagctccagttgcaagagagcggccctggcttggtaaaaccttccgagacccttagcctcacatgcacggttagtgggggcagcatttcctcaggtgattactattggggatggattcggcaacccccgggtaaaggattggagtggattggtcatatttattatagtggagcgacgtactacaacccaagtctcaaatccagggttacaatatccgtcgatacgagcaggaaccaattcagcttgaaactttctagtgtcaccgcagcagacacagccgtctattactgtacgcgggatgactccagtaattggcggtcccgagggcaagggacactggtcacggtctcctcatctggaggcggtggaagcggtggaggaggatctcaggttcagctgcaagagtctggcggaggacttgctcaagctggcggaagcctgagactgtcttgtgccgcctctggcagaaccttcagcatgggctggtttagacaggcccctggcaaagagagagagttcgtcgccgccatcacatacagcggcggcagcccttactacgcctcttctgtcagaggccggttcaccatcagccgggacaacgccaagaacaccgtgtacctccagatgaacagcctgaagccagaggacaccgccgtgtactactgtgccgccaatccaacctacggcagcgactggaatgccgagaattggggccagggcacccaagtgacagtgtctagtggatccggcggcggaggatctggcggaggcggatctgggggcggaggctctttcgaacaagttcagcttcaacagcctggcgctgagctggtcaaacctggcgcttctgtgaagatgagctgcaaagccagcggctacgccttcagcagctactggatcaactggatgaagcagaaacccggccagggactcgaatggatcggccaaatctatcccggcgacggcgacaccaactacaacggcaagttcaagggcagagccacactgaccgccgatacctctagcagcacagcctacatgcagctgagcagcctgaccagcgaagatagcgccgtgtacttctgtgcccggtccatcacaacagtcgtgggctgcgctatggactattggggccagggaacaagcgtgaccgtgtctagtacgcgtgagcagaaactgatctcggaagaggatgggagcggcatccagaaccctgatcctgccgtgtaccagctgcgggatagcaagagcagcgacaagagcgtgtgtctgttcaccgacttcgacagccagaccaacgtgtcccagagcaaggactccgacgtgtacatcaccgataagaccgtgctggacatgcggagcatggacttcaagagcaactccgccgtggcctggtccaacaagtccgatttcgcctgcgccaacgccttcaacaacagcattatccccgaggacacattcttcccaagccccgagagcagctgcggtacccagagttttgggttgttggaccctaaattgtgctatctgttggacggaatcctgttcatttacggagtgatcctgaccgcattgttcctgaggagcaagcggtcacggctgctccacagcgattacatgaatatgacaccacgaagaccgggtcctactcgcaaacactaccaaccctacgcacctccccgcgactttgcagcgtaccgatctcgggttaagttttccagatccgcagacgcacccgcttaccaacaagggcagaaccaactctacaatgaacttaatttggggcggagggaagagtacgacgttctggacaaaaggaggggacgagatcccgagatgggcggaaagcctcagcgaaggaagaatccgcaagaggggctttataacgaactccagaaagataaaatggcagaagcctatagtgagattgggatgaagggagaaaggaggaggggtaaaggtcacgatgggttgtaccaaggattgagcacagccactaaagatacctatgatgcgctccacatgcaggccctgccgccaaga

SEQ ID NO: 5202 - DNA, 4278 bp, Artificial Sequence
  Synthetic Polynucloetide
atggccttaccagtgaccgccttgctcctgccgctggccttgctgctccacgccgccaggccggaggttcagctgcttgagtctggcggaggactggttcaacctggcggaagcctgagactgtcttgtgccgccagcggcttcacctttagcagctacgccatgagctgggtccgacaggctcctggcaaaggactggaatgggtgtccagcatcagcggcagcggcgactacatctactacgccgatagcgtgaagggcagattcaccatcagccgggacatcagcaagaacaccctgtacctccagatgaacagcctgagagccgaggacaccgccgtgtactactgtgccaaagaaggcaccggcgctaacagcagcctggccgattatagaggccagggcacactggtcaccgtgtctagtggcggaggaagcggcggaggatctcaggtccagctcgtcgagtccggcggcggcctcgtccaggccggcgactccgtcaccctctcctgcaccgcctccggccgcaccttctcctcctacgccctcgcctggttccgccagcgccccggcaaggagcgcgagttcgtcgccggcctccgctggggcggccccaccaactacgccgactccgtcaaggaccgcttcaccatctccggcgactccgccaagcacaccatgtacctccagatgaactccctcaagcccgaggacaccgccgtctactactgcggctacaaccccggcggctgggccgtcccctcccagtacgagtacgactcctggggccagggcacccaggtcaccgtctcctccggtaccggcggaggcggatctggcggcggaggtagcggtggcggaggatctgaattcgacatccagatgacacagagccctagcagcctgtctgccagcgtgggagacagagtgaccatcacatgcaaggccagcgaccacatcaacaactggctggcctggtatcagcagaagcctggacaggcccctaagctgctgatctacggcgctaccacactggaaacaggcgtgcccagcagattttctggcagcggctctggcaccgactacaccctgacaatatccagcctccagcctgaggacttcgccacctactactgtcagcagagctggaacaccccttggacattcggccagggcaccaagctggaaatcaagagactcgaggggaaaccaattcccaaccctcttctgggactggattcaaccggcagcggcgaggacctgaagaacgtgttcccacctgaggtggccgtgttcgagcctagcgaggccgagatcagccacacccagaaagccaccctcgtgtgcctggctaccggcttctaccccgaccatgtggaactgtcttggtgggtcaacggcaaagaggtgcacagcggcgtgtctaccgacccccagccactgaaagaacagcccgccctgaacgacagccggtactgcctgagcagcagactgagagtgtccgccaccttctggcagaacccccggaaccacttcagatgccaggtgcagttctacggcctgagcgagaacgacgagtggacccaggacagagccaagcccgtgacccagatcgtgtctgccgaagcctggggcagagccgattgcggatcccagagcttcggcctgctggaccccaagctgtgctacctgctggatggcatcctgttcatctacggcgtgatcctgaccgccctgttcctgagagtgaagttcagcagaagcgccgacgcccctgcctaccagcagggacagaaccaactgtacaacgagctgaacctgggcagacgggaagagtacgacgtgctggacaagcggagaggcagggaccctgagatgggcggaaagccccagcggagaaagaacccccaggaaggactgtataacgaactccagaaagacaagatggccgaagcctacagcgagatcggcatgaagggcgagcggagaagaggcaagggccacgatggcctgtaccagggcctgagcaccgccaccaaggacacctatgacgccctgcacatgcaggccctgcctccaagaagggccaagcgatctggatctggagcaacaaacttctcactactcaaacaagcaggtgacgtggaggagaatcccgggcctactagtatggactggatttggcgcatccttttccttgtcggcgctgctaccggcgcccattcccagctccagttgcaagagagcggccctggcttggtaaaaccttccgagacccttagcctcacatgcacggttagtgggggcagcatttcctcaggtgattactattggggatggattcggcaacccccgggtaaaggattggagtggattggtcatatttattatagtggagcgacgtactacaacccaagtctcaaatccagggttacaatatccgtcgatacgagcaggaaccaattcagcttgaaactttctagtgtcaccgcagcagacacagccgtctattactgtacgcgggatgactccagtaattggcggtcccgagggcaagggacactggtcacggtctcctcatctggaggcggtggaagcggtggaggaggatctcaggttcagctgcaagagtctggcggaggacttgctcaagctggcggaagcctgagactgtcttgtgccgcctctggcagaaccttcagcatgggctggtttagacaggcccctggcaaagagagagagttcgtcgccgccatcacatacagcggcggcagcccttactacgcctcttctgtcagaggccggttcaccatcagccgggacaacgccaagaacaccgtgtacctccagatgaacagcctgaagccagaggacaccgccgtgtactactgtgccgccaatccaacctacggcagcgactggaatgccgagaattggggccagggcacccaagtgacagtgtctagtggatccggcggcggaggatctggcggaggcggatctgggggcggaggctctttcgaacaagttcagcttcaacagcctggcgctgagctggtcaaacctggcgcttctgtgaagatgagctgcaaagccagcggctacgccttcagcagctactggatcaactggatgaagcagaaacccggccagggactcgaatggatcggccaaatctatcccggcgacggcgacaccaactacaacggcaagttcaagggcagagccacactgaccgccgatacctctagcagcacagcctacatgcagctgagcagcctgaccagcgaagatagcgccgtgtacttctgtgcccggtccatcacaacagtcgtgggctgcgctatggactattggggccagggaacaagcgtgaccgtgtctagtacgcgtgagcagaaactgatctcggaagaggatctggggagcggcatccagaaccctgatcctgccgtgtaccagctgcgggatagcaagagcagcgacaagagcgtgtgtctgttcaccgacttcgacagccagaccaacgtgtcccagagcaaggactccgacgtgtacatcaccgataagaccgtgctggacatgcggagcatggacttcaagagcaactccgccgtggcctggtccaacaagtccgatttcgcctgcgccaacgccttcaacaacagcattatccccgaggacacattcttcccaagccccgagagcagctgcggtacccagagttttgggttgttggaccctaaattgtgctatctgttggacggaatcctgttcatttacggagtgatcctgaccgcattgttcctgaagagaggccggaagaagctgctgtacatcttcaagcagcctttcatgcggcccgtgcagaccacccaggaagaggacggctgctcctgccggttccccgaggaagaagaaggcggctgcgagctgcgggttaagttttccagatccgcagacgcacccgcttaccaacaagggcagaaccaactctacaatgaacttaatttggggcggagggaagagtacgacgttctggacaaaaggaggggacgagatcccgagatgggcggaaagcctcagcgaaggaagaatccgcaagaggggctttataacgaactccagaaagataaaatggcagaagcctatagtgagattgggatgaagggagaaaggaggaggggtaaaggtcacgatgggttgtaccaaggattgagcacagccactaaagatacctatgatgcgctccacatgcaggccctgccgccaaga

SEQ ID NO: 5203 - DNA, 4404 bp, Artificial Sequence
  Synthetic Polynucloetide
atggccttaccagtgaccgccttgctcctgccgctggccttgctgctccacgccgccaggccggaggttcagctgcttgagtctggcggaggactggttcaacctggcggaagcctgagactgtcttgtgccgccagcggcttcacctttagcagctacgccatgagctgggtccgacaggctcctggcaaaggactggaatgggtgtccagcatcagcggcagcggcgactacatctactacgccgatagcgtgaagggcagattcaccatcagccgggacatcagcaagaacaccctgtacctccagatgaacagcctgagagccgaggacaccgccgtgtactactgtgccaaagaaggcaccggcgctaacagcagcctggccgattatagaggccagggcacactggtcaccgtgtctagtggcggaggaagcggcggaggatctcaggtccagctcgtcgagtccggcggcggcctcgtccaggccggcgactccgtcaccctctcctgcaccgcctccggccgcaccttctcctcctacgccctcgcctggttccgccagcgccccggcaaggagcgcgagttcgtcgccggcctccgctggggcggccccaccaactacgccgactccgtcaaggaccgcttcaccatctccggcgactccgccaagcacaccatgtacctccagatgaactccctcaagcccgaggacaccgccgtctactactgcggctacaaccccggcggctgggccgtcccctcccagtacgagtacgactcctggggccagggcacccaggtcaccgtctcctccggtaccggcggaggcggatctggcggcggaggtagcggtggcggaggatctgaattcgacatccagatgacacagagccctagcagcctgtctgccagcgtgggagacagagtgaccatcacatgcaaggccagcgaccacatcaacaactggctggcctggtatcagcagaagcctggacaggcccctaagctgctgatctacggcgctaccacactggaaacaggcgtgcccagcagattttctggcagcggctctggcaccgactacaccctgacaatatccagcctccagcctgaggacttcgccacctactactgtcagcagagctggaacaccccttggacattcggccagggcaccaagctggaaatcaagagactcgaggggaaaccaattcccaaccctcttctgggactggattcaaccggcagcggcgaggacctgaagaacgtgttcccacctgaggtggccgtgttcgagcctagcgaggccgagatcagccacacccagaaagccaccctcgtgtgcctggctaccggcttctaccccgaccatgtggaactgtcttggtgggtcaacggcaaagaggtgcacagcggcgtgtctaccgacccccagccactgaaagaacagcccgccctgaacgacagccggtactgcctgagcagcagactgagagtgtccgccaccttctggcagaacccccggaaccacttcagatgccaggtgcagttctacggcctgagcgagaacgacgagtggacccaggacagagccaagcccgtgacccagatcgtgtctgccgaagcctggggcagagccgattgcggatcccagagcttcggcctgctggaccccaagctgtgctacctgctggatggcatcctgttcatctacggcgtgatcctgaccgccctgttcctgaaacggggcagaaagaaactcctgtatatattcaaacaaccatttatgagaccagtacaaactactcaagaggaagatggctgtagctgccgatttccagaagaagaagaaggaggatgtgaactgagagtgaagttcagcagaagcgccgacgcccctgcctaccagcagggacagaaccaactgtacaacgagctgaacctgggcagacgggaagagtacgacgtgctggacaagcggagaggcagggaccctgagatgggcggaaagccccagcggagaaagaacccccaggaaggactgtataacgaactccagaaagacaagatggccgaagcctacagcgagatcggcatgaagggcgagcggagaagaggcaagggccacgatggcctgtaccagggcctgagcaccgccaccaaggacacctatgacgccctgcacatgcaggccctgcctccaagaagggccaagcgatctggatctggagcaacaaacttctcactactcaaacaagcaggtgacgtggaggagaatcccgggcctactagtatggactggatttggcgcatccttttccttgtcggcgctgctaccggcgcccattcccagctccagttgcaagagagcggccctggcttggtaaaaccttccgagacccttagcctcacatgcacggttagtgggggcagcatttcctcaggtgattactattggggatggattcggcaacccccgggtaaaggattggagtggattggtcatatttattatagtggagcgacgtactacaacccaagtctcaaatccagggttacaatatccgtcgatacgagcaggaaccaattcagcttgaaactttctagtgtcaccgcagcagacacagccgtctattactgtacgcgggatgactccagtaattggcggtcccgagggcaagggacactggtcacggtctcctcatctggaggcggtggaagcggtggaggaggatctcaggttcagctgcaagagtctggcggaggacttgctcaagctggcggaagcctgagactgtcttgtgccgcctctggcagaaccttcagcatgggctggtttagacaggcccctggcaaagagagagagttcgtcgccgccatcacatacagcggcggcagcccttactacgcctcttctgtcagaggccggttcaccatcagccgggacaacgccaagaacaccgtgtacctccagatgaacagcctgaagccagaggacaccgccgtgtactactgtgccgccaatccaacctacggcagcgactggaatgccgagaattggggccagggcacccaagtgacagtgtctagtggatccggcggcggaggatctggcggaggcggatctgggggcggaggctctttcgaacaagttcagcttcaacagcctggcgctgagctggtcaaacctggcgcttctgtgaagatgagctgcaaagccagcggctacgccttcagcagctactggatcaactggatgaagcagaaacccggccagggactcgaatggatcggccaaatctatcccggcgacggcgacaccaactacaacggcaagttcaagggcagagccacactgaccgccgatacctctagcagcacagcctacatgcagctgagcagcctgaccagcgaagatagcgccgtgtacttctgtgcccggtccatcacaacagtcgtgggctgcgctatggactattggggccagggaacaagcgtgaccgtgtctagtacgcgtgagcagaaactgatctcggaagaggatctggggagcggcatccagaaccctgatcctgccgtgtaccagctgcgggatagcaagagcagcgacaagagcgtgtgtctgttcaccgacttcgacagccagaccaacgtgtcccagagcaaggactccgacgtgtacatcaccgataagaccgtgctggacatgcggagcatggacttcaagagcaactccgccgtggcctggtccaacaagtccgatttcgcctgcgccaacgccttcaacaacagcattatccccgaggacacattcttcccaagccccgagagcagctgcggtacccagagttttgggttgttggaccctaaattgtgctatctgttggacggaatcctgttcatttacggagtgatcctgaccgcattgttcctgaagagaggccggaagaagctgctgtacatcttcaagcagcctttcatgcggcccgtgcagaccacccaggaagaggacggctgctcctgccggttccccgaggaagaagaaggcggctgcgagctgcgggttaagttttccagatccgcagacgcacccgcttaccaacaagggcagaaccaactctacaatgaacttaatttggggcggagggaagagtacgacgttctggacaaaaggaggggacgagatcccgagatgggcggaaagcctcagcgaaggaagaatccgcaagaggggctttataacgaactccagaaagataaaatggcagaagcctatagtgagattgggatgaagggagaaaggaggaggggtaaaggtcacgatgggttgtaccaaggattgagcacagccactaaagatacctatgatgcgctccacatgcaggccctgccgccaaga

SEQ ID NO: 5204 - DNA, 4077 bp, Artificial Sequence
  Synthetic Polynucloetide
atggccttaccagtgaccgccttgctcctgccgctggccttgctgctccacgccgccaggccggaggttcagctgcttgagtctggcggaggactggttcaacctggcggaagcctgagactgtcttgtgccgccagcggcttcacctttagcagctacgccatgagctgggtccgacaggctcctggcaaaggactggaatgggtgtccagcatcagcggcagcggcgactacatctactacgccgatagcgtgaagggcagattcaccatcagccgggacatcagcaagaacaccctgtacctccagatgaacagcctgagagccgaggacaccgccgtgtactactgtgccaaagaaggcaccggcgctaacagcagcctggccgattatagaggccagggcacactggtcaccgtgtctagtggcggaggaagcggcggaggatctcaggtccagctcgtcgagtccggcggcggcctcgtccaggccggcgactccgtcaccctctcctgcaccgcctccggccgcaccttctcctcctacgccctcgcctggttccgccagcgccccggcaaggagcgcgagttcgtcgccggcctccgctggggcggccccaccaactacgccgactccgtcaaggaccgcttcaccatctccggcgactccgccaagcacaccatgtacctccagatgaactccctcaagcccgaggacaccgccgtctactactgcggctacaaccccggcggctgggccgtcccctcccagtacgagtacgactcctggggccagggcacccaggtcaccgtctcctccggtaccggcggaggcggatctggcggcggaggtagcggtggcggaggatctgaattcgacatccagatgacacagagccctagcagcctgtctgccagcgtgggagacagagtgaccatcacatgcaaggccagcgaccacatcaacaactggctggcctggtatcagcagaagcctggacaggcccctaagctgctgatctacggcgctaccacactggaaacaggcgtgcccagcagattttctggcagcggctctggcaccgactacaccctgacaatatccagcctccagcctgaggacttcgccacctactactgtcagcagagctggaacaccccttggacattcggccagggcaccaagctggaaatcaagagactcgagcagagcttcggcctgctggaccccaagctgtgctacctgctggatggcatcctgttcatctacggcgtgatcctgaccgccctgttcctgagagtgaagttcagcagaagcgccgacgcccctgcctaccagcagggacagaaccaactgtacaacgagctgaacctgggcagacgggaagagtacgacgtgctggacaagcggagaggcagggaccctgagatgggcggaaagccccagcggagaaagaacccccaggaaggactgtataacgaactccagaaagacaagatggccgaagcctacagcgagatcggcatgaagggcgagcggagaagaggcaagggccacgatggcctgtaccagggcctgagcaccgccaccaaggacacctatgacgccctgcacatgcaggccctgcctccaagaagggccaagcgatctggatctggagcaacaaacttctcactactcaaacaagcaggtgacgtggaggagaatcccgggcctactagtatggactggatttggcgcatccttttccttgtcggcgctgctaccggcgcccattcccagctccagttgcaagagagcggccctggcttggtaaaaccttccgagacccttagcctcacatgcacggttagtgggggcagcatttcctcaggtgattactattggggatggattcggcaacccccgggtaaaggattggagtggattggtcatatttattatagtggagcgacgtactacaacccaagtctcaaatccagggttacaatatccgtcgatacgagcaggaaccaattcagcttgaaactttctagtgtcaccgcagcagacacagccgtctattactgtacgcgggatgactccagtaattggcggtcccgagggcaagggacactggtcacggtctcctcatctggaggcggtggaagcggtggaggaggatctcaggttcagctgcaagagtctggcggaggacttgctcaagctggcggaagcctgagactgtcttgtgccgcctctggcagaaccttcagcatgggctggtttagacaggcccctggcaaagagagagagttcgtcgccgccatcacatacagcggcggcagcccttactacgcctcttctgtcagaggccggttcaccatcagccgggacaacgccaagaacaccgtgtacctccagatgaacagcctgaagccagaggacaccgccgtgtactactgtgccgccaatccaacctacggcagcgactggaatgccgagaattggggccagggcacccaagtgacagtgtctagtggatccggcggcggaggatctggcggaggcggatctgggggcggaggctctttcgaacaagttcagcttcaacagcctggcgctgagctggtcaaacctggcgcttctgtgaagatgagctgcaaagccagcggctacgccttcagcagctactggatcaactggatgaagcagaaacccggccagggactcgaatggatcggccaaatctatcccggcgacggcgacaccaactacaacggcaagttcaagggcagagccacactgaccgccgatacctctagcagcacagcctacatgcagctgagcagcctgaccagcgaagatagcgccgtgtacttctgtgcccggtccatcacaacagtcgtgggctgcgctatggactattggggccagggaacaagcgtgaccgtgtctagtacgcgtcagagttttgggttgttggaccctaaattgtgctatctgttggacggaatcctgttcatttacggagtgatcctgaccgcattgttcctgcgggttaagttttccagatccgcagacgcacccgcttaccaacaagggcagaaccaactctacaatgaacttaatttggggcggagggaagagtacgacgttctggacaaaaggaggggacgagatcccgagatgggcggaaagcctcagcgaaggaagaatccgcaagaggggctttataacgaactccagaaagataaaatggcagaagcctatagtgagattgggatgaagggagaaaggaggaggggtaaaggtcacgatgggttgtaccaaggattgagcacagccactaaagatacctatgatgcgctccacatgcaggccctgccgccaagacgcgccaagagaagcggatctggcgtgaagcagaccctgaatttcgacctgctgaagctggctggcgacgtggaatccaacccaggcccttctagaggccatatgaccgagtacaagcccacggtgcgcctcgccacccgcgacgacgtccccagggccgtacgcaccctcgccgccgcgttcgccgactaccccgccacgcgccacaccgtcgatccggaccgccacatcgagcgggtcaccgagctgcaagaactcttcctcacgcgcgtcgggctcgacatcggcaaggtgtgggtcgcggacgacggcgccgcggtggcggtctggaccacgccggagagcgtcgaagcgggggcggtgttcgccgagatcggcccgcgcatggccgagttgagcggttcccggctggccgcgcagcaacagatggaaggcctcctggcgccgcaccggcccaaggagcccgcgtggttcctggccaccgtcggcgtctcgcccgaccaccagggcaagggtctgggcagcgccgtcgtgctccccggagtggaggcggccgagcgcgccggggtgcccgccttcctggagacctccgcgccccgcaacctccccttctacgagcggctcggcttcaccgtcaccgccgacgtcgaggtgcccgaaggaccgcgcacctggtgcatgacccgcaagcccggtgcctga

SEQ ID NO: 5205 - DNA, 3549 bp, Artificial Sequence
  Synthetic Polynucloetide
atggccttaccagtgaccgccttgctcctgccgctggccttgctgctccacgccgccaggccggaggttcagctgcttgagtctggcggaggactggttcaacctggcggaagcctgagactgtcttgtgccgccagcggcttcacctttagcagctacgccatgagctgggtccgacaggctcctggcaaaggactggaatgggtgtccagcatcagcggcagcggcgactacatctactacgccgatagcgtgaagggcagattcaccatcagccgggacatcagcaagaacaccctgtacctccagatgaacagcctgagagccgaggacaccgccgtgtactactgtgccaaagaaggcaccggcgctaacagcagcctggccgattatagaggccagggcacactggtcaccgtgtctagtggcggaggaagcggcggaggatctcaggtccagctcgtcgagtccggcggcggcctcgtccaggccggcgactccgtcaccctctcctgcaccgcctccggccgcaccttctcctcctacgccctcgcctggttccgccagcgccccggcaaggagcgcgagttcgtcgccggcctccgctggggcggccccaccaactacgccgactccgtcaaggaccgcttcaccatctccggcgactccgccaagcacaccatgtacctccagatgaactccctcaagcccgaggacaccgccgtctactactgcggctacaaccccggcggctgggccgtcccctcccagtacgagtacgactcctggggccagggcacccaggtcaccgtctcctccggtaccggcggaggcggatctggcggcggaggtagcggtggcggaggatctgaattcgacatccagatgacacagagccctagcagcctgtctgccagcgtgggagacagagtgaccatcacatgcaaggccagcgaccacatcaacaactggctggcctggtatcagcagaagcctggacaggcccctaagctgctgatctacggcgctaccacactggaaacaggcgtgcccagcagattttctggcagcggctctggcaccgactacaccctgacaatatccagcctccagcctgaggacttcgccacctactactgtcagcagagctggaacaccccttggacattcggccagggcaccaagctggaaatcaagagactcgagggacagcctaaggccaatcctaccgtgacactgttccctccaagcagcgaagaactccaggccaacaaggccacacttgtgtgcctgatctccgacttctaccctggggctgtgacagtggcttggaaggccgatggatctcctgtgaaagccggcgtggaaaccaccaagccatccaagcagagcaacaacaaatacgccgccagctcctacctgagcctgacacctgagcagtggaagtcccacagatcctacagctgccaagtgacccacgaaggcagcaccgtggaaaagacagtggcccctacagagtgcagccccatcaagaccgatgtgattacaatggaccccaaggacaactgctccaaggacgccaacgataccctgctgctccagctgaccaacaccagcgcctactacatgtacttgttgctgctgctgaagtccgtggtgtacttcgccatcatcacatgctgcctgctgcggagaaccgccttctgctgcaacggcgagaagtctagggccaagcgatctggatctggagcaacaaacttctcactactcaaacaagcaggtgacgtggaggagaatcccgggcctactagtatggactggatttggcgcatccttttccttgtcggcgctgctaccggcgcccattcccagctccagttgcaagagagcggccctggcttggtaaaaccttccgagacccttagcctcacatgcacggttagtgggggcagcatttcctcaggtgattactattggggatggattcggcaacccccgggtaaaggattggagtggattggtcatatttattatagtggagcgacgtactacaacccaagtctcaaatccagggttacaatatccgtcgatacgagcaggaaccaattcagcttgaaactttctagtgtcaccgcagcagacacagccgtctattactgtacgcgggatgactccagtaattggcggtcccgagggcaagggacactggtcacggtctcctcatctggaggcggtggaagcggtggaggaggatctcaggttcagctgcaagagtctggcggaggacttgctcaagctggcggaagcctgagactgtcttgtgccgcctctggcagaaccttcagcatgggctggtttagacaggcccctggcaaagagagagagttcgtcgccgccatcacatacagcggcggcagcccttactacgcctcttctgtcagaggccggttcaccatcagccgggacaacgccaagaacaccgtgtacctccagatgaacagcctgaagccagaggacaccgccgtgtactactgtgccgccaatccaacctacggcagcgactggaatgccgagaattggggccagggcacccaagtgacagtgtctagtggatccggcggcggaggatctggcggaggcggatctgggggcggaggctctttcgaacaagttcagcttcaacagcctggcgctgagctggtcaaacctggcgcttctgtgaagatgagctgcaaagccagcggctacgccttcagcagctactggatcaactggatgaagcagaaacccggccagggactcgaatggatcggccaaatctatcccggcgacggcgacaccaactacaacggcaagttcaagggcagagccacactgaccgccgatacctctagcagcacagcctacatgcagctgagcagcctgaccagcgaagatagcgccgtgtacttctgtgcccggtccatcacaacagtcgtgggctgcgctatggactattggggccagggaacaagcgtgaccgtgtctagtacgcgtgcctctacaaagggaccctccgtgtttcctctggctcccagcagcaagtctacaagcggaggaacagccgctctgggctgcctggtcaaggattactttcccgagcctgtgaccgtgtcctggaatagcggagcactgacaagcggcgtgcacacctttccagccgtgctgcaaagcagcggcctgtactctctgagcagcgtggtcacagtgcctagctctagcctgggcacccagacctacatctgcaatgtgaaccacaagcctagcaacaccaaggtggacaagagagtggaacccaagagctgtgaagtgaaaaccgactccaccgaccacgtgaagcccaaagagacagagaacaccaagcagcccagcaagagctgccacaagcccaaggccatcgtgcacaccgagaaagtgaacatgatgagcctgaccgtgctgggcctgcggatgctgttcgccaaaaccgtggccgtgaacttcctgctgaccgccaagctgttcttcctc

SEQ ID NO: 5206 - DNA, 3483 bp, Artificial Sequence
  Synthetic Polynucloetide
atggccttaccagtgaccgccttgctcctgccgctggccttgctgctccacgccgccaggccggaggttcagctgcttgagtctggcggaggactggttcaacctggcggaagcctgagactgtcttgtgccgccagcggcttcacctttagcagctacgccatgagctgggtccgacaggctcctggcaaaggactggaatgggtgtccagcatcagcggcagcggcgactacatctactacgccgatagcgtgaagggcagattcaccatcagccgggacatcagcaagaacaccctgtacctccagatgaacagcctgagagccgaggacaccgccgtgtactactgtgccaaagaaggcaccggcgctaacagcagcctggccgattatagaggccagggcacactggtcaccgtgtctagtggcggaggaagcggcggaggatctcaggtccagctcgtcgagtccggcggcggcctcgtccaggccggcgactccgtcaccctctcctgcaccgcctccggccgcaccttctcctcctacgccctcgcctggttccgccagcgccccggcaaggagcgcgagttcgtcgccggcctccgctggggcggccccaccaactacgccgactccgtcaaggaccgcttcaccatctccggcgactccgccaagcacaccatgtacctccagatgaactccctcaagcccgaggacaccgccgtctactactgcggctacaaccccggcggctgggccgtcccctcccagtacgagtacgactcctggggccagggcacccaggtcaccgtctcctccggtaccggcggaggcggatctggcggcggaggtagcggtggcggaggatctgaattcgacatccagatgacacagagccctagcagcctgtctgccagcgtgggagacagagtgaccatcacatgcaaggccagcgaccacatcaacaactggctggcctggtatcagcagaagcctggacaggcccctaagctgctgatctacggcgctaccacactggaaacaggcgtgcccagcagattttctggcagcggctctggcaccgactacaccctgacaatatccagcctccagcctgaggacttcgccacctactactgtcagcagagctggaacaccccttggacattcggccagggcaccaagctggaaatcaagagactcgagggacagcctaaggccaatcctaccgtgacactgttccctccaagcagcgaagaactccaggccaacaaggccacacttgtgtgcctgatctccgacttctaccctggggctgtgacagtggcttggaaggccgatggatctcctgtgaaagccggcgtggaaaccaccaagccatccaagcagagcaacaacaaatacgccgccagctcctacctgagcctgacacctgagcagtggaagtcccacagatcctacagctgccaagtgacccacgaaggcagcaccgtggaaaagacagtggcccctacagagtgcagcggcagagccgattgcggcatcaccagcgccagctaccaccagggcgtgctgagcgccaccatcctgtacgagatcctgctgggcaaggccaccctgtacgccgtgctggtgtctgccctggtgctgatggctatggtcaagcggaaggacagccggggaagggccaagcgatctggatctggagcaacaaacttctcactactcaaacaagcaggtgacgtggaggagaatcccgggcctactagtatggactggatttggcgcatccttttccttgtcggcgctgctaccggcgcccattcccagctccagttgcaagagagcggccctggcttggtaaaaccttccgagacccttagcctcacatgcacggttagtgggggcagcatttcctcaggtgattactattggggatggattcggcaacccccgggtaaaggattggagtggattggtcatatttattatagtggagcgacgtactacaacccaagtctcaaatccagggttacaatatccgtcgatacgagcaggaaccaattcagcttgaaactttctagtgtcaccgcagcagacacagccgtctattactgtacgcgggatgactccagtaattggcggtcccgagggcaagggacactggtcacggtctcctcatctggaggcggtggaagcggtggaggaggatctcaggttcagctgcaagagtctggcggaggacttgctcaagctggcggaagcctgagactgtcttgtgccgcctctggcagaaccttcagcatgggctggtttagacaggcccctggcaaagagagagagttcgtcgccgccatcacatacagcggcggcagcccttactacgcctcttctgtcagaggccggttcaccatcagccgggacaacgccaagaacaccgtgtacctccagatgaacagcctgaagccagaggacaccgccgtgtactactgtgccgccaatccaacctacggcagcgactggaatgccgagaattggggccagggcacccaagtgacagtgtctagtggatccggcggcggaggatctggcggaggcggatctgggggcggaggctctttcgaacaagttcagcttcaacagcctggcgctgagctggtcaaacctggcgcttctgtgaagatgagctgcaaagccagcggctacgccttcagcagctactggatcaactggatgaagcagaaacccggccagggactcgaatggatcggccaaatctatcccggcgacggcgacaccaactacaacggcaagttcaagggcagagccacactgaccgccgatacctctagcagcacagcctacatgcagctgagcagcctgaccagcgaagatagcgccgtgtacttctgtgcccggtccatcacaacagtcgtgggctgcgctatggactattggggccagggaacaagcgtgaccgtgtctagtacgcgtgcctctacaaagggaccctccgtgtttcctctggctcccagcagcaagtctacaagcggaggaacagccgctctgggctgcctggtcaaggattactttcccgagcctgtgaccgtgtcctggaatagcggagcactgacaagcggcgtgcacacctttccagccgtgctgcaaagcagcggcctgtactctctgagcagcgtggtcacagtgcctagctctagcctgggcacccagacctacatctgcaatgtgaaccacaagcctagcaacaccaaggtggacaagagagtggaacccaagagctgtatccccgaggacacattcttcccaagcagcgacgtgccctgcgacgtgaagctggtggaaaagagcttcgagacagacaccaacctgaacttccagaacctgagcgtgatcggcttcagaatcctgctgctgaaagtggccggctttaacctgctgatgaccctgcggctgtggtccagc

SEQ ID NO: 5207 - DNA, 3483 bp, Artificial Sequence
  Synthetic Polynucloetide
atggccttaccagtgaccgccttgctcctgccgctggccttgctgctccacgccgccaggccggaggttcagctgcttgagtctggcggaggactggttcaacctggcggaagcctgagactgtcttgtgccgccagcggcttcacctttagcagctacgccatgagctgggtccgacaggctcctggcaaaggactggaatgggtgtccagcatcagcggcagcggcgactacatctactacgccgatagcgtgaagggcagattcaccatcagccgggacatcagcaagaacaccctgtacctccagatgaacagcctgagagccgaggacaccgccgtgtactactgtgccaaagaaggcaccggcgctaacagcagcctggccgattatagaggccagggcacactggtcaccgtgtctagtggcggaggaagcggcggaggatctcaggtccagctcgtcgagtccggcggcggcctcgtccaggccggcgactccgtcaccctctcctgcaccgcctccggccgcaccttctcctcctacgccctcgcctggttccgccagcgccccggcaaggagcgcgagttcgtcgccggcctccgctggggcggccccaccaactacgccgactccgtcaaggaccgcttcaccatctccggcgactccgccaagcacaccatgtacctccagatgaactccctcaagcccgaggacaccgccgtctactactgcggctacaaccccggcggctgggccgtcccctcccagtacgagtacgactcctggggccagggcacccaggtcaccgtctcctccggtaccggcggaggcggatctggcggcggaggtagcggtggcggaggatctgaattcgacatccagatgacacagagccctagcagcctgtctgccagcgtgggagacagagtgaccatcacatgcaaggccagcgaccacatcaacaactggctggcctggtatcagcagaagcctggacaggcccctaagctgctgatctacggcgctaccacactggaaacaggcgtgcccagcagattttctggcagcggctctggcaccgactacaccctgacaatatccagcctccagcctgaggacttcgccacctactactgtcagcagagctggaacaccccttggacattcggccagggcaccaagctggaaatcaagagactcgagggacagcctaaggccaatcctaccgtgacactgttccctccaagcagcgaagaactccaggccaacaaggccacacttgtgtgcctgatctccgacttctaccctggggctgtgacagtggcttggaaggccgatggatctcctgtgaaagccggcgtggaaaccaccaagccatccaagcagagcaacaacaaatacgccgccagctcctacctgagcctgacacctgagcagtggaagtcccacagatcctacagctgccaagtgacccacgaaggcagcaccgtggaaaagacagtggcccctacagagtgcagcggcagagccgattgcggctttaccagcgagagctaccagcagggcgtgctgagcgccaccatcctgtacgagatcctgctgggcaaggccaccctgtacgccgtgctggtgtctgccctggtgctgatggctatggtcaagcggaaggacagccggggaagggccaagcgatctggatctggagcaacaaacttctcactactcaaacaagcaggtgacgtggaggagaatcccgggcctactagtatggactggatttggcgcatccttttccttgtcggcgctgctaccggcgcccattcccagctccagttgcaagagagcggccctggcttggtaaaaccttccgagacccttagcctcacatgcacggttagtgggggcagcatttcctcaggtgattactattggggatggattcggcaacccccgggtaaaggattggagtggattggtcatatttattatagtggagcgacgtactacaacccaagtctcaaatccagggttacaatatccgtcgatacgagcaggaaccaattcagcttgaaactttctagtgtcaccgcagcagacacagccgtctattactgtacgcgggatgactccagtaattggcggtcccgagggcaagggacactggtcacggtctcctcatctggaggcggtggaagcggtggaggaggatctcaggttcagctgcaagagtctggcggaggacttgctcaagctggcggaagcctgagactgtcttgtgccgcctctggcagaaccttcagcatgggctggtttagacaggcccctggcaaagagagagagttcgtcgccgccatcacatacagcggcggcagcccttactacgcctcttctgtcagaggccggttcaccatcagccgggacaacgccaagaacaccgtgtacctccagatgaacagcctgaagccagaggacaccgccgtgtactactgtgccgccaatccaacctacggcagcgactggaatgccgagaattggggccagggcacccaagtgacagtgtctagtggatccggcggcggaggatctggcggaggcggatctgggggcggaggctctttcgaacaagttcagcttcaacagcctggcgctgagctggtcaaacctggcgcttctgtgaagatgagctgcaaagccagcggctacgccttcagcagctactggatcaactggatgaagcagaaacccggccagggactcgaatggatcggccaaatctatcccggcgacggcgacaccaactacaacggcaagttcaagggcagagccacactgaccgccgatacctctagcagcacagcctacatgcagctgagcagcctgaccagcgaagatagcgccgtgtacttctgtgcccggtccatcacaacagtcgtgggctgcgctatggactattggggccagggaacaagcgtgaccgtgtctagtacgcgtgcctctacaaagggaccctccgtgtttcctctggctcccagcagcaagtctacaagcggaggaacagccgctctgggctgcctggtcaaggattactttcccgagcctgtgaccgtgtcctggaatagcggagcactgacaagcggcgtgcacacctttccagccgtgctgcaaagcagcggcctgtactctctgagcagcgtggtcacagtgcctagctctagcctgggcacccagacctacatctgcaatgtgaaccacaagcctagcaacaccaaggtggacaagagagtggaacccaagagctgtatccccgaggacacattcttcccaagccccgagagcagctgcgacgtgaagctggtggaaaagagcttcgagacagacaccaacctgaacttccagaacctgagcgtgatcggcttcagaatcctgctgctgaaagtggccggctttaacctgctgatgaccctgcggctgtggtccagc

SEQ ID NO: 5208 - DNA, 3384 bp, Artificial Sequence
  Synthetic Polynucloetide
atggccttaccagtgaccgccttgctcctgccgctggccttgctgctccacgccgccaggccggaggttcagctgcttgagtctggcggaggactggttcaacctggcggaagcctgagactgtcttgtgccgccagcggcttcacctttagcagctacgccatgagctgggtccgacaggctcctggcaaaggactggaatgggtgtccagcatcagcggcagcggcgactacatctactacgccgatagcgtgaagggcagattcaccatcagccgggacatcagcaagaacaccctgtacctccagatgaacagcctgagagccgaggacaccgccgtgtactactgtgccaaagaaggcaccggcgctaacagcagcctggccgattatagaggccagggcacactggtcaccgtgtctagtggcggaggaagcggcggaggatctcaggtccagctcgtcgagtccggcggcggcctcgtccaggccggcgactccgtcaccctctcctgcaccgcctccggccgcaccttctcctcctacgccctcgcctggttccgccagcgccccggcaaggagcgcgagttcgtcgccggcctccgctggggcggccccaccaactacgccgactccgtcaaggaccgcttcaccatctccggcgactccgccaagcacaccatgtacctccagatgaactccctcaagcccgaggacaccgccgtctactactgcggctacaaccccggcggctgggccgtcccctcccagtacgagtacgactcctggggccagggcacccaggtcaccgtctcctccctcgagggacagcctaaggccaatcctaccgtgacactgttccctccaagcagcgaagaactccaggccaacaaggccacacttgtgtgcctgatctccgacttctaccctggggctgtgacagtggcttggaaggccgatggatctcctgtgaaagccggcgtggaaaccaccaagccatccaagcagagcaacaacaaatacgccgccagctcctacctgagcctgacacctgagcagtggaagtcccacagatcctacagctgccaagtgacccacgaaggcagcaccgtggaaaagacagtggcccctacagagtgcagcggcagagccgattgcggctttaccagcgagagctaccagcagggcgtgctgagcgccaccatcctgtacgagatcctgctgggcaaggccaccctgtacgccgtgctggtgtctgccctggtgctgatggctatggtcaagcggaaggacagccggggaagggccaagcgatctggatctggagcaacaaacttctcactactcaaacaagcaggtgacgtggaggagaatcccgggcctactagtatggactggatttggcgcatccttttccttgtcggcgctgctaccggcgcgcattcccagctccagttgcaagagagcggccctggcttggtaaaaccttccgagacccttagcctcacatgcacggttagtgggggcagcatttcctcaggtgattactattggggatggattcggcaacccccgggtaaaggattggagtggattggtcatatttattatagtggagcgacgtactacaacccaagtctcaaatccagggttacaatatccgtcgatacgagcaggaaccaattcagcttgaaactttctagtgtcaccgcagcagacacagccgtctattactgtacgcgggatgactccagtaattggcggtcccgagggcaagggacactggtcacggtctcctcatctggaggcggtggaagcggtggaggaggatctcaggttcagctgcaagagtctggcggaggacttgctcaagctggcggaagcctgagactgtcttgtgccgcctctggcagaaccttcagcatgggctggtttagacaggcccctggcaaagagagagagttcgtcgccgccatcacatacagcggcggcagcccttactacgcctcttctgtcagaggccggttcaccatcagccgggacaacgccaagaacaccgtgtacctccagatgaacagcctgaagccagaggacaccgccgtgtactactgtgccgccaatccaacctacggcagcgactggaatgccgagaattggggccagggcacccaagtgacagtgtctagtacgcgtgcctctacaaagggaccctccgtgtttcctctggctcccagcagcaagtctacaagcggaggaacagccgctctgggctgcctggtcaaggattactttcccgagcctgtgaccgtgtcctggaatagcggagcactgacaagcggcgtgcacacctttccagccgtgctgcaaagcagcggcctgtactctctgagcagcgtggtcacagtgcctagctctagcctgggcacccagacctacatctgcaatgtgaaccacaagcctagcaacaccaaggtggacaagagagtggaacccaagagctgtatccccgaggacacattcttcccaagccccgagagcagctgcgacgtgaagctggtggaaaagagcttcgagacagacaccaacctgaacttccagaacctgagcgtgatcggcttcagaatcctgctgctgaaagtggccggctttaacctgctgatgaccctgcggctgtggtccagccgcgccaagagaagcggatctggcgtgaagcagaccctgaatttcgacctgctgaagctggctggcgacgtggaatccaacccaggcccttctagaggccatatgaccgagtacaagcccacggtgcgcctcgccacccgcgacgacgtccccagggccgtacgcaccctcgccgccgcgttcgccgactaccccgccacgcgccacaccgtcgatccggaccgccacatcgagcgggtcaccgagctgcaagaactcttcctcacgcgcgtcgggctcgacatcggcaaggtgtgggtcgcggacgacggcgccgcggtggcggtctggaccacgccggagagcgtcgaagcgggggcggtgttcgccgagatcggcccgcgcatggccgagttgagcggttcccggctggccgcgcagcaacagatggaaggcctcctggcgccgcaccggcccaaggagcccgcgtggttcctggccaccgtcggcgtctcgcccgaccaccagggcaagggtctgggcagcgccgtcgtgctccccggagtggaggcggccgagcgcgccggggtgcccgccttcctggagacctccgcgccccgcaacctccccttctacgagcggctcggcttcaccgtcaccgccgacgtcgaggtgcccgaaggaccgcgcacctggtgcatgacccgcaagcccggtgcctga

SEQ ID NO: 5209 - DNA, 2682 bp, Artificial Sequence
  Synthetic Polynucloetide
atggccttaccagtgaccgccttgctcctgccgctggccttgctgctccacgccgccaggccggaggttcagctgcttgagtctggcggaggactggttcaacctggcggaagcctgagactgtcttgtgccgccagcggcttcacctttagcagctacgccatgagctgggtccgacaggctcctggcaaaggactggaatgggtgtccagcatcagcggcagcggcgactacatctactacgccgatagcgtgaagggcagattcaccatcagccgggacatcagcaagaacaccctgtacctccagatgaacagcctgagagccgaggacaccgccgtgtactactgtgccaaagaaggcaccggcgctaacagcagcctggccgattatagaggccagggcacactggtcaccgtgtctagtggcggaggaagcggcggaggatctcaggtccagctcgtcgagtccggcggcggcctcgtccaggccggcgactccgtcaccctctcctgcaccgcctccggccgcaccttctcctcctacgccctcgcctggttccgccagcgccccggcaaggagcgcgagttcgtcgccggcctccgctggggcggccccaccaactacgccgactccgtcaaggaccgcttcaccatctccggcgactccgccaagcacaccatgtacctccagatgaactccctcaagcccgaggacaccgccgtctactactgcggctacaaccccggcggctgggccgtcccctcccagtacgagtacgactcctggggccagggcacccaggtcaccgtctcctccctcgagggacagcctaaggccaatcctaccgtgacactgttccctccaagcagcgaagaactccaggccaacaaggccacacttgtgtgcctgatctccgacttctaccctggggctgtgacagtggcttggaaggccgatggatctcctgtgaaagccggcgtggaaaccaccaagccatccaagcagagcaacaacaaatacgccgccagctcctacctgagcctgacacctgagcagtggaagtcccacagatcctacagctgccaagtgacccacgaaggcagcaccgtggaaaagacagtggcccctacagagtgcagcggcagagccgattgcggctttaccagcgagagctaccagcagggcgtgctgagcgccaccatcctgtacgagatcctgctgggcaaggccaccctgtacgccgtgctggtgtctgccctggtgctgatggctatggtcaagcggaaggacagccggggaagggccaagcgatctggatctggagcaacaaacttctcactactcaaacaagcaggtgacgtggaggagaatcccgggcctactagtatggactggatttggcgcatccttttccttgtcggcgctgctaccggcgcgcattcccagctccagttgcaagagagcggccctggcttggtaaaaccttccgagacccttagcctcacatgcacggttagtgggggcagcatttcctcaggtgattactattggggatggattcggcaacccccgggtaaaggattggagtggattggtcatatttattatagtggagcgacgtactacaacccaagtctcaaatccagggttacaatatccgtcgatacgagcaggaaccaattcagcttgaaactttctagtgtcaccgcagcagacacagccgtctattactgtacgcgggatgactccagtaattggcggtcccgagggcaagggacactggtcacggtctcctcatctggaggcggtggaagcggtggaggaggatctcaggttcagctgcaagagtctggcggaggacttgctcaagctggcggaagcctgagactgtcttgtgccgcctctggcagaaccttcagcatgggctggtttagacaggcccctggcaaagagagagagttcgtcgccgccatcacatacagcggcggcagcccttactacgcctcttctgtcagaggccggttcaccatcagccgggacaacgccaagaacaccgtgtacctccagatgaacagcctgaagccagaggacaccgccgtgtactactgtgccgccaatccaacctacggcagcgactggaatgccgagaattggggccagggcacccaagtgacagtgtctagtacgcgtgcctctacaaagggaccctccgtgtttcctctggctcccagcagcaagtctacaagcggaggaacagccgctctgggctgcctggtcaaggattactttcccgagcctgtgaccgtgtcctggaatagcggagcactgacaagcggcgtgcacacctttccagccgtgctgcaaagcagcggcctgtactctctgagcagcgtggtcacagtgcctagctctagcctgggcacccagacctacatctgcaatgtgaaccacaagcctagcaacaccaaggtggacaagagagtggaacccaagagctgtatccccgaggacacattcttcccaagccccgagagcagctgcgacgtgaagctggtggaaaagagcttcgagacagacaccaacctgaacttccagaacctgagcgtgatcggcttcagaatcctgctgctgaaagtggccggctttaacctgctgatgaccctgcggctgtggtccagc

SEQ ID NO: 5210 - DNA, 2769 bp, Artificial Sequence
  Synthetic Polynucloetide
atggccttaccagtgaccgccttgctcctgccgctggccttgctgctccacgccgccaggccggaggttcagctgcttgagtctggcggaggactggttcaacctggcggaagcctgagactgtcttgtgccgccagcggcttcacctttagcagctacgccatgagctgggtccgacaggctcctggcaaaggactggaatgggtgtccagcatcagcggcagcggcgactacatctactacgccgatagcgtgaagggcagattcaccatcagccgggacatcagcaagaacaccctgtacctccagatgaacagcctgagagccgaggacaccgccgtgtactactgtgccaaagaaggcaccggcgctaacagcagcctggccgattatagaggccagggcacactggtcaccgtgtctagtggcggaggaagcggcggaggatctcaggtccagctcgtcgagtccggcggcggcctcgtccaggccggcgactccgtcaccctctcctgcaccgcctccggccgcaccttctcctcctacgccctcgcctggttccgccagcgccccggcaaggagcgcgagttcgtcgccggcctccgctggggcggccccaccaactacgccgactccgtcaaggaccgcttcaccatctccggcgactccgccaagcacaccatgtacctccagatgaactccctcaagcccgaggacaccgccgtctactactgcggctacaaccccggcggctgggccgtcccctcccagtacgagtacgactcctggggccagggcacccaggtcaccgtctcctccctcgagggatctggcagagccgattgcggctttaccagcgagagctaccagcagggcgtgctgagcgccaccatcctgtacgagatcctgctgggcaaggccaccctgtacgccgtgctggtgtctgccctggtgctgatggctatggtcaagcggaaggacagccggggaagggccaagcgatctggatctggagcaacaaacttctcactactcaaacaagcaggtgacgtggaggagaatcccgggcctactagtatggactggatttggcgcatccttttccttgtcggcgctgctaccggcgcgcattcccagctccagttgcaagagagcggccctggcttggtaaaaccttccgagacccttagcctcacatgcacggttagtgggggcagcatttcctcaggtgattactattggggatggattcggcaacccccgggtaaaggattggagtggattggtcatatttattatagtggagcgacgtactacaacccaagtctcaaatccagggttacaatatccgtcgatacgagcaggaaccaattcagcttgaaactttctagtgtcaccgcagcagacacagccgtctattactgtacgcgggatgactccagtaattggcggtcccgagggcaagggacactggtcacggtctcctcatctggaggcggtggaagcggtggaggaggatctcaggttcagctgcaagagtctggcggaggacttgctcaagctggcggaagcctgagactgtcttgtgccgcctctggcagaaccttcagcatgggctggtttagacaggcccctggcaaagagagagagttcgtcgccgccatcacatacagcggcggcagcccttactacgcctcttctgtcagaggccggttcaccatcagccgggacaacgccaagaacaccgtgtacctccagatgaacagcctgaagccagaggacaccgccgtgtactactgtgccgccaatccaacctacggcagcgactggaatgccgagaattggggccagggcacccaagtgacagtgtctagtacgcgtggcagcatccccgaggacacattcttcccaagccccgagagcagctgcgacgtgaagctggtggaaaagagcttcgagacagacaccaacctgaacttccagaacctgagcgtgatcggcttcagaatcctgctgctgaaagtggccggctttaacctgctgatgaccctgcggctgtggtccagccgcgccaagagaagcggatctggcgtgaagcagaccctgaatttcgacctgctgaagctggctggcgacgtggaatccaacccaggcccttctagaggccatatgaccgagtacaagcccacggtgcgcctcgccacccgcgacgacgtccccagggccgtacgcaccctcgccgccgcgttcgccgactaccccgccacgcgccacaccgtcgatccggaccgccacatcgagcgggtcaccgagctgcaagaactcttcctcacgcgcgtcgggctcgacatcggcaaggtgtgggtcgcggacgacggcgccgcggtggcggtctggaccacgccggagagcgtcgaagcgggggcggtgttcgccgagatcggcccgcgcatggccgagttgagcggttcccggctggccgcgcagcaacagatggaaggcctcctggcgccgcaccggcccaaggagcccgcgtggttcctggccaccgtcggcgtctcgcccgaccaccagggcaagggtctgggcagcgccgtcgtgctccccggagtggaggcggccgagcgcgccggggtgcccgccttcctggagacctccgcgccccgcaacctccccttctacgagcggctcggcttcaccgtcaccgccgacgtcgaggtgcccgaaggaccgcgcacctggtgcatgacccgcaagcccggtgcctga

SEQ ID NO: 5211 - DNA, 2067 bp, Artificial Sequence
  Synthetic Polynucloetide
atggccttaccagtgaccgccttgctcctgccgctggccttgctgctccacgccgccaggccggaggttcagctgcttgagtctggcggaggactggttcaacctggcggaagcctgagactgtcttgtgccgccagcggcttcacctttagcagctacgccatgagctgggtccgacaggctcctggcaaaggactggaatgggtgtccagcatcagcggcagcggcgactacatctactacgccgatagcgtgaagggcagattcaccatcagccgggacatcagcaagaacaccctgtacctccagatgaacagcctgagagccgaggacaccgccgtgtactactgtgccaaagaaggcaccggcgctaacagcagcctggccgattatagaggccagggcacactggtcaccgtgtctagtggcggaggaagcggcggaggatctcaggtccagctcgtcgagtccggcggcggcctcgtccaggccggcgactccgtcaccctctcctgcaccgcctccggccgcaccttctcctcctacgccctcgcctggttccgccagcgccccggcaaggagcgcgagttcgtcgccggcctccgctggggcggccccaccaactacgccgactccgtcaaggaccgcttcaccatctccggcgactccgccaagcacaccatgtacctccagatgaactccctcaagcccgaggacaccgccgtctactactgcggctacaaccccggcggctgggccgtcccctcccagtacgagtacgactcctggggccagggcacccaggtcaccgtctcctccctcgagggatctggcagagccgattgcggctttaccagcgagagctaccagcagggcgtgctgagcgccaccatcctgtacgagatcctgctgggcaaggccaccctgtacgccgtgctggtgtctgccctggtgctgatggctatggtcaagcggaaggacagccggggaagggccaagcgatctggatctggagcaacaaacttctcactactcaaacaagcaggtgacgtggaggagaatcccgggcctactagtatggactggatttggcgcatccttttccttgtcggcgctgctaccggcgcgcattcccagctccagttgcaagagagcggccctggcttggtaaaaccttccgagacccttagcctcacatgcacggttagtgggggcagcatttcctcaggtgattactattggggatggattcggcaacccccgggtaaaggattggagtggattggtcatatttattatagtggagcgacgtactacaacccaagtctcaaatccagggttacaatatccgtcgatacgagcaggaaccaattcagcttgaaactttctagtgtcaccgcagcagacacagccgtctattactgtacgcgggatgactccagtaattggcggtcccgagggcaagggacactggtcacggtctcctcatctggaggcggtggaagcggtggaggaggatctcaggttcagctgcaagagtctggcggaggacttgctcaagctggcggaagcctgagactgtcttgtgccgcctctggcagaaccttcagcatgggctggtttagacaggcccctggcaaagagagagagttcgtcgccgccatcacatacagcggcggcagcccttactacgcctcttctgtcagaggccggttcaccatcagccgggacaacgccaagaacaccgtgtacctccagatgaacagcctgaagccagaggacaccgccgtgtactactgtgccgccaatccaacctacggcagcgactggaatgccgagaattggggccagggcacccaagtgacagtgtctagtacgcgtggcagcatccccgaggacacattcttcccaagccccgagagcagctgcgacgtgaagctggtggaaaagagcttcgagacagacaccaacctgaacttccagaacctgagcgtgatcggcttcagaatcctgctgctgaaagtggccggctttaacctgctgatgaccctgcggctgtggtccagc

SEQ ID NO: 5212 - DNA, 2796 bp, Artificial Sequence
  Synthetic Polynucloetide
atggccttaccagtgaccgccttgctcctgccgctggccttgctgctccacgccgccaggccggaggttcagctgcttgagtctggcggaggactggttcaacctggcggaagcctgagactgtcttgtgccgccagcggcttcacctttagcagctacgccatgagctgggtccgacaggctcctggcaaaggactggaatgggtgtccagcatcagcggcagcggcgactacatctactacgccgatagcgtgaagggcagattcaccatcagccgggacatcagcaagaacaccctgtacctccagatgaacagcctgagagccgaggacaccgccgtgtactactgtgccaaagaaggcaccggcgctaacagcagcctggccgattatagaggccagggcacactggtcaccgtgtctagtggcggaggaagcggcggaggatctcaggtccagctcgtcgagtccggcggcggcctcgtccaggccggcgactccgtcaccctctcctgcaccgcctccggccgcaccttctcctcctacgccctcgcctggttccgccagcgccccggcaaggagcgcgagttcgtcgccggcctccgctggggcggccccaccaactacgccgactccgtcaaggaccgcttcaccatctccggcgactccgccaagcacaccatgtacctccagatgaactccctcaagcccgaggacaccgccgtctactactgcggctacaaccccggcggctgggccgtcccctcccagtacgagtacgactcctggggccagggcacccaggtcaccgtctcctccctcgaggacaaaactcacacatgcccaccgtgcccagcaggcagagccgattgcggctttaccagcgagagctaccagcagggcgtgctgagcgccaccatcctgtacgagatcctgctgggcaaggccaccctgtacgccgtgctggtgtctgccctggtgctgatggctatggtcaagcggaaggacagccggggaagggccaagcgatctggatctggagcaacaaacttctcactactcaaacaagcaggtgacgtggaggagaatcccgggcctactagtatggactggatttggcgcatccttttccttgtcggcgctgctaccggcgcgcattcccagctccagttgcaagagagcggccctggcttggtaaaaccttccgagacccttagcctcacatgcacggttagtgggggcagcatttcctcaggtgattactattggggatggattcggcaacccccgggtaaaggattggagtggattggtcatatttattatagtggagcgacgtactacaacccaagtctcaaatccagggttacaatatccgtcgatacgagcaggaaccaattcagcttgaaactttctagtgtcaccgcagcagacacagccgtctattactgtacgcgggatgactccagtaattggcggtcccgagggcaagggacactggtcacggtctcctcatctggaggcggtggaagcggtggaggaggatctcaggttcagctgcaagagtctggcggaggacttgctcaagctggcggaagcctgagactgtcttgtgccgcctctggcagaaccttcagcatgggctggtttagacaggcccctggcaaagagagagagttcgtcgccgccatcacatacagcggcggcagcccttactacgcctcttctgtcagaggccggttcaccatcagccgggacaacgccaagaacaccgtgtacctccagatgaacagcctgaagccagaggacaccgccgtgtactactgtgccgccaatccaacctacggcagcgactggaatgccgagaattggggccagggcacccaagtgacagtgtctagtacgcgtggcagcatccccgaggacacattcttcccaagccccgagagcagctgcgacgtgaagctggtggaaaagagcttcgagacagacaccaacctgaacttccagaacctgagcgtgatcggcttcagaatcctgctgctgaaagtggccggctttaacctgctgatgaccctgcggctgtggtccagccgcgccaagagaagcggatctggcgtgaagcagaccctgaatttcgacctgctgaagctggctggcgacgtggaatccaacccaggcccttctagaggccatatgaccgagtacaagcccacggtgcgcctcgccacccgcgacgacgtccccagggccgtacgcaccctcgccgccgcgttcgccgactaccccgccacgcgccacaccgtcgatccggaccgccacatcgagcgggtcaccgagctgcaagaactcttcctcacgcgcgtcgggctcgacatcggcaaggtgtgggtcgcggacgacggcgccgcggtggcggtctggaccacgccggagagcgtcgaagcgggggcggtgttcgccgagatcggcccgcgcatggccgagttgagcggttcccggctggccgcgcagcaacagatggaaggcctcctggcgccgcaccggcccaaggagcccgcgtggttcctggccaccgtcggcgtctcgcccgaccaccagggcaagggtctgggcagcgccgtcgtgctccccggagtggaggcggccgagcgcgccggggtgcccgccttcctggagacctccgcgccccgcaacctccccttctacgagcggctcggcttcaccgtcaccgccgacgtcgaggtgcccgaaggaccgcgcacctggtgcatgacccgcaagcccggtgcctga

SEQ ID NO: 5213 - DNA, 2796 bp, Artificial Sequence
  Synthetic Polynucloetide
atggccttaccagtgaccgccttgctcctgccgctggccttgctgctccacgccgccaggccggaggttcagctgcttgagtctggcggaggactggttcaacctggcggaagcctgagactgtcttgtgccgccagcggcttcacctttagcagctacgccatgagctgggtccgacaggctcctggcaaaggactggaatgggtgtccagcatcagcggcagcggcgactacatctactacgccgatagcgtgaagggcagattcaccatcagccgggacatcagcaagaacaccctgtacctccagatgaacagcctgagagccgaggacaccgccgtgtactactgtgccaaagaaggcaccggcgctaacagcagcctggccgattatagaggccagggcacactggtcaccgtgtctagtggcggaggaagcggcggaggatctcaggtccagctcgtcgagtccggcggcggcctcgtccaggccggcgactccgtcaccctctcctgcaccgcctccggccgcaccttctcctcctacgccctcgcctggttccgccagcgccccggcaaggagcgcgagttcgtcgccggcctccgctggggcggccccaccaactacgccgactccgtcaaggaccgcttcaccatctccggcgactccgccaagcacaccatgtacctccagatgaactccctcaagcccgaggacaccgccgtctactactgcggctacaaccccggcggctgggccgtcccctcccagtacgagtacgactcctggggccagggcacccaggtcaccgtctcctccctcgagggatctggcagagccgattgcggctttaccagcgagagctaccagcagggcgtgctgagcgccaccatcctgtacgagatcctgctgggcaaggccaccctgtacgccgtgctggtgtctgccctggtgctgatggctatggtcaagcggaaggacagccggggaagggccaagcgatctggatctggagcaacaaacttctcactactcaaacaagcaggtgacgtggaggagaatcccgggcctactagtatggactggatttggcgcatccttttccttgtcggcgctgctaccggcgcgcattcccagctccagttgcaagagagcggccctggcttggtaaaaccttccgagacccttagcctcacatgcacggttagtgggggcagcatttcctcaggtgattactattggggatggattcggcaacccccgggtaaaggattggagtggattggtcatatttattatagtggagcgacgtactacaacccaagtctcaaatccagggttacaatatccgtcgatacgagcaggaaccaattcagcttgaaactttctagtgtcaccgcagcagacacagccgtctattactgtacgcgggatgactccagtaattggcggtcccgagggcaagggacactggtcacggtctcctcatctggaggcggtggaagcggtggaggaggatctcaggttcagctgcaagagtctggcggaggacttgctcaagctggcggaagcctgagactgtcttgtgccgcctctggcagaaccttcagcatgggctggtttagacaggcccctggcaaagagagagagttcgtcgccgccatcacatacagcggcggcagcccttactacgcctcttctgtcagaggccggttcaccatcagccgggacaacgccaagaacaccgtgtacctccagatgaacagcctgaagccagaggacaccgccgtgtactactgtgccgccaatccaacctacggcagcgactggaatgccgagaattggggccagggcacccaagtgacagtgtctagtacgcgtgataaaactcatacctgtccgccatgcccggcaatccccgaggacacattcttcccaagccccgagagcagctgcgacgtgaagctggtggaaaagagcttcgagacagacaccaacctgaacttccagaacctgagcgtgatcggcttcagaatcctgctgctgaaagtggccggctttaacctgctgatgaccctgcggctgtggtccagccgcgccaagagaagcggatctggcgtgaagcagaccctgaatttcgacctgctgaagctggctggcgacgtggaatccaacccaggcccttctagaggccatatgaccgagtacaagcccacggtgcgcctcgccacccgcgacgacgtccccagggccgtacgcaccctcgccgccgcgttcgccgactaccccgccacgcgccacaccgtcgatccggaccgccacatcgagcgggtcaccgagctgcaagaactcttcctcacgcgcgtcgggctcgacatcggcaaggtgtgggtcgcggacgacggcgccgcggtggcggtctggaccacgccggagagcgtcgaagcgggggcggtgttcgccgagatcggcccgcgcatggccgagttgagcggttcccggctggccgcgcagcaacagatggaaggcctcctggcgccgcaccggcccaaggagcccgcgtggttcctggccaccgtcggcgtctcgcccgaccaccagggcaagggtctgggcagcgccgtcgtgctccccggagtggaggcggccgagcgcgccggggtgcccgccttcctggagacctccgcgccccgcaacctccccttctacgagcggctcggcttcaccgtcaccgccgacgtcgaggtgcccgaaggaccgcgcacctggtgcatgacccgcaagcccggtgcctga

SEQ ID NO: 5214 - DNA, 2823 bp, Artificial Sequence
  Synthetic Polynucloetide
atggccttaccagtgaccgccttgctcctgccgctggccttgctgctccacgccgccaggccggaggttcagctgcttgagtctggcggaggactggttcaacctggcggaagcctgagactgtcttgtgccgccagcggcttcacctttagcagctacgccatgagctgggtccgacaggctcctggcaaaggactggaatgggtgtccagcatcagcggcagcggcgactacatctactacgccgatagcgtgaagggcagattcaccatcagccgggacatcagcaagaacaccctgtacctccagatgaacagcctgagagccgaggacaccgccgtgtactactgtgccaaagaaggcaccggcgctaacagcagcctggccgattatagaggccagggcacactggtcaccgtgtctagtggcggaggaagcggcggaggatctcaggtccagctcgtcgagtccggcggcggcctcgtccaggccggcgactccgtcaccctctcctgcaccgcctccggccgcaccttctcctcctacgccctcgcctggttccgccagcgccccggcaaggagcgcgagttcgtcgccggcctccgctggggcggccccaccaactacgccgactccgtcaaggaccgcttcaccatctccggcgactccgccaagcacaccatgtacctccagatgaactccctcaagcccgaggacaccgccgtctactactgcggctacaaccccggcggctgggccgtcccctcccagtacgagtacgactcctggggccagggcacccaggtcaccgtctcctccctcgaggacaaaactcacacatgcccaccgtgcccagcaggcagagccgattgcggctttaccagcgagagctaccagcagggcgtgctgagcgccaccatcctgtacgagatcctgctgggcaaggccaccctgtacgccgtgctggtgtctgccctggtgctgatggctatggtcaagcggaaggacagccggggaagggccaagcgatctggatctggagcaacaaacttctcactactcaaacaagcaggtgacgtggaggagaatcccgggcctactagtatggactggatttggcgcatccttttccttgtcggcgctgctaccggcgcgcattcccagctccagttgcaagagagcggccctggcttggtaaaaccttccgagacccttagcctcacatgcacggttagtgggggcagcatttcctcaggtgattactattggggatggattcggcaacccccgggtaaaggattggagtggattggtcatatttattatagtggagcgacgtactacaacccaagtctcaaatccagggttacaatatccgtcgatacgagcaggaaccaattcagcttgaaactttctagtgtcaccgcagcagacacagccgtctattactgtacgcgggatgactccagtaattggcggtcccgagggcaagggacactggtcacggtctcctcatctggaggcggtggaagcggtggaggaggatctcaggttcagctgcaagagtctggcggaggacttgctcaagctggcggaagcctgagactgtcttgtgccgcctctggcagaaccttcagcatgggctggtttagacaggcccctggcaaagagagagagttcgtcgccgccatcacatacagcggcggcagcccttactacgcctcttctgtcagaggccggttcaccatcagccgggacaacgccaagaacaccgtgtacctccagatgaacagcctgaagccagaggacaccgccgtgtactactgtgccgccaatccaacctacggcagcgactggaatgccgagaattggggccagggcacccaagtgacagtgtctagtacgcgtgataaaactcatacctgtccgccatgcccggcaatccccgaggacacattcttcccaagccccgagagcagctgcgacgtgaagctggtggaaaagagcttcgagacagacaccaacctgaacttccagaacctgagcgtgatcggcttcagaatcctgctgctgaaagtggccggctttaacctgctgatgaccctgcggctgtggtccagccgcgccaagagaagcggatctggcgtgaagcagaccctgaatttcgacctgctgaagctggctggcgacgtggaatccaacccaggcccttctagaggccatatgaccgagtacaagcccacggtgcgcctcgccacccgcgacgacgtccccagggccgtacgcaccctcgccgccgcgttcgccgactaccccgccacgcgccacaccgtcgatccggaccgccacatcgagcgggtcaccgagctgcaagaactcttcctcacgcgcgtcgggctcgacatcggcaaggtgtgggtcgcggacgacggcgccgcggtggcggtctggaccacgccggagagcgtcgaagcgggggcggtgttcgccgagatcggcccgcgcatggccgagttgagcggttcccggctggccgcgcagcaacagatggaaggcctcctggcgccgcaccggcccaaggagcccgcgtggttcctggccaccgtcggcgtctcgcccgaccaccagggcaagggtctgggcagcgccgtcgtgctccccggagtggaggcggccgagcgcgccggggtgcccgccttcctggagacctccgcgccccgcaacctccccttctacgagcggctcggcttcaccgtcaccgccgacgtcgaggtgcccgaaggaccgcgcacctggtgcatgacccgcaagcccggtgcctga

SEQ ID NO: 5215 - DNA, 2121 bp, Artificial Sequence
  Synthetic Polynucloetide
atggccttaccagtgaccgccttgctcctgccgctggccttgctgctccacgccgccaggccggaggttcagctgcttgagtctggcggaggactggttcaacctggcggaagcctgagactgtcttgtgccgccagcggcttcacctttagcagctacgccatgagctgggtccgacaggctcctggcaaaggactggaatgggtgtccagcatcagcggcagcggcgactacatctactacgccgatagcgtgaagggcagattcaccatcagccgggacatcagcaagaacaccctgtacctccagatgaacagcctgagagccgaggacaccgccgtgtactactgtgccaaagaaggcaccggcgctaacagcagcctggccgattatagaggccagggcacactggtcaccgtgtctagtggcggaggaagcggcggaggatctcaggtccagctcgtcgagtccggcggcggcctcgtccaggccggcgactccgtcaccctctcctgcaccgcctccggccgcaccttctcctcctacgccctcgcctggttccgccagcgccccggcaaggagcgcgagttcgtcgccggcctccgctggggcggccccaccaactacgccgactccgtcaaggaccgcttcaccatctccggcgactccgccaagcacaccatgtacctccagatgaactccctcaagcccgaggacaccgccgtctactactgcggctacaaccccggcggctgggccgtcccctcccagtacgagtacgactcctggggccagggcacccaggtcaccgtctcctccctcgaggacaaaactcacacatgcccaccgtgcccagcaggcagagccgattgcggctttaccagcgagagctaccagcagggcgtgctgagcgccaccatcctgtacgagatcctgctgggcaaggccaccctgtacgccgtgctggtgtctgccctggtgctgatggctatggtcaagcggaaggacagccggggaagggccaagcgatctggatctggagcaacaaacttctcactactcaaacaagcaggtgacgtggaggagaatcccgggcctactagtatggactggatttggcgcatccttttccttgtcggcgctgctaccggcgcgcattcccagctccagttgcaagagagcggccctggcttggtaaaaccttccgagacccttagcctcacatgcacggttagtgggggcagcatttcctcaggtgattactattggggatggattcggcaacccccgggtaaaggattggagtggattggtcatatttattatagtggagcgacgtactacaacccaagtctcaaatccagggttacaatatccgtcgatacgagcaggaaccaattcagcttgaaactttctagtgtcaccgcagcagacacagccgtctattactgtacgcgggatgactccagtaattggcggtcccgagggcaagggacactggtcacggtctcctcatctggaggcggtggaagcggtggaggaggatctcaggttcagctgcaagagtctggcggaggacttgctcaagctggcggaagcctgagactgtcttgtgccgcctctggcagaaccttcagcatgggctggtttagacaggcccctggcaaagagagagagttcgtcgccgccatcacatacagcggcggcagcccttactacgcctcttctgtcagaggccggttcaccatcagccgggacaacgccaagaacaccgtgtacctccagatgaacagcctgaagccagaggacaccgccgtgtactactgtgccgccaatccaacctacggcagcgactggaatgccgagaattggggccagggcacccaagtgacagtgtctagtacgcgtgataaaactcatacctgtccgccatgcccggcaatccccgaggacacattcttcccaagccccgagagcagctgcgacgtgaagctggtggaaaagagcttcgagacagacaccaacctgaacttccagaacctgagcgtgatcggcttcagaatcctgctgctgaaagtggccggctttaacctgctgatgaccctgcggctgtggtccagc

SEQ ID NO: 5216 - DNA, 2094 bp, Artificial Sequence
  Synthetic Polynucloetide
atggccttaccagtgaccgccttgctcctgccgctggccttgctgctccacgccgccaggccggaggttcagctgcttgagtctggcggaggactggttcaacctggcggaagcctgagactgtcttgtgccgccagcggcttcacctttagcagctacgccatgagctgggtccgacaggctcctggcaaaggactggaatgggtgtccagcatcagcggcagcggcgactacatctactacgccgatagcgtgaagggcagattcaccatcagccgggacatcagcaagaacaccctgtacctccagatgaacagcctgagagccgaggacaccgccgtgtactactgtgccaaagaaggcaccggcgctaacagcagcctggccgattatagaggccagggcacactggtcaccgtgtctagtggcggaggaagcggcggaggatctcaggtccagctcgtcgagtccggcggcggcctcgtccaggccggcgactccgtcaccctctcctgcaccgcctccggccgcaccttctcctcctacgccctcgcctggttccgccagcgccccggcaaggagcgcgagttcgtcgccggcctccgctggggcggccccaccaactacgccgactccgtcaaggaccgcttcaccatctccggcgactccgccaagcacaccatgtacctccagatgaactccctcaagcccgaggacaccgccgtctactactgcggctacaaccccggcggctgggccgtcccctcccagtacgagtacgactcctggggccagggcacccaggtcaccgtctcctccctcgagggatctggcagagccgattgcggctttaccagcgagagctaccagcagggcgtgctgagcgccaccatcctgtacgagatcctgctgggcaaggccaccctgtacgccgtgctggtgtctgccctggtgctgatggctatggtcaagcggaaggacagccggggaagggccaagcgatctggatctggagcaacaaacttctcactactcaaacaagcaggtgacgtggaggagaatcccgggcctactagtatggactggatttggcgcatccttttccttgtcggcgctgctaccggcgcgcattcccagctccagttgcaagagagcggccctggcttggtaaaaccttccgagacccttagcctcacatgcacggttagtgggggcagcatttcctcaggtgattactattggggatggattcggcaacccccgggtaaaggattggagtggattggtcatatttattatagtggagcgacgtactacaacccaagtctcaaatccagggttacaatatccgtcgatacgagcaggaaccaattcagcttgaaactttctagtgtcaccgcagcagacacagccgtctattactgtacgcgggatgactccagtaattggcggtcccgagggcaagggacactggtcacggtctcctcatctggaggcggtggaagcggtggaggaggatctcaggttcagctgcaagagtctggcggaggacttgctcaagctggcggaagcctgagactgtcttgtgccgcctctggcagaaccttcagcatgggctggtttagacaggcccctggcaaagagagagagttcgtcgccgccatcacatacagcggcggcagcccttactacgcctcttctgtcagaggccggttcaccatcagccgggacaacgccaagaacaccgtgtacctccagatgaacagcctgaagccagaggacaccgccgtgtactactgtgccgccaatccaacctacggcagcgactggaatgccgagaattggggccagggcacccaagtgacagtgtctagtacgcgtgataaaactcatacctgtccgccatgcccggcaatccccgaggacacattcttcccaagccccgagagcagctgcgacgtgaagctggtggaaaagagcttcgagacagacaccaacctgaacttccagaacctgagcgtgatcggcttcagaatcctgctgctgaaagtggccggctttaacctgctgatgaccctgcggctgtggtccagc

SEQ ID NO: 5217 - DNA, 3450 bp, Artificial Sequence
  Synthetic Polynucloetide
atggccttaccagtgaccgccttgctcctgccgctggccttgctgctccacgccgccaggccggaggttcagctgcttgagtctggcggaggactggttcaacctggcggaagcctgagactgtcttgtgccgccagcggcttcacctttagcagctacgccatgagctgggtccgacaggctcctggcaaaggactggaatgggtgtccagcatcagcggcagcggcgactacatctactacgccgatagcgtgaagggcagattcaccatcagccgggacatcagcaagaacaccctgtacctccagatgaacagcctgagagccgaggacaccgccgtgtactactgtgccaaagaaggcaccggcgctaacagcagcctggccgattatagaggccagggcacactggtcaccgtgtctagtggcggaggaagcggcggaggatctcaggtccagctcgtcgagtccggcggcggcctcgtccaggccggcgactccgtcaccctctcctgcaccgcctccggccgcaccttctcctcctacgccctcgcctggttccgccagcgccccggcaaggagcgcgagttcgtcgccggcctccgctggggcggccccaccaactacgccgactccgtcaaggaccgcttcaccatctccggcgactccgccaagcacaccatgtacctccagatgaactccctcaagcccgaggacaccgccgtctactactgcggctacaaccccggcggctgggccgtcccctcccagtacgagtacgactcctggggccagggcacccaggtcaccgtctcctccctcgagggacagcctaaggccaatcctaccgtgacactgttccctccaagcagcgaagaactccaggccaacaaggccacacttgtgtgcctgatctccgacttctaccctggggctgtgacagtggcttggaaggccgatggatctcctgtgaaagccggcgtggaaaccaccaagccatccaagcagagcaacaacaaatacgccgccagctcctacctgagcctgacacctgagcagtggaagtcccacagatcctacagctgccaagtgacccacgaaggcagcaccgtggaaaagacagtggcccctacagagtgcagccccatcaagaccgatgtgattacaatggaccccaaggacaactgctccaaggacgccaacgataccctgctgctccagctgaccaacaccagcgcctactacatgtacttgttgctgctgctgaagtccgtggtgtacttcgccatcatcacatgctgcctgctgcggagaaccgccttctgctgcaacggcgagaagtctagggccaagcgatctggatctggagcaacaaacttctcactactcaaacaagcaggtgacgtggaggagaatcccgggcctactagtatggactggatttggcgcatccttttccttgtcggcgctgctaccggcgcgcattcccagctccagttgcaagagagcggccctggcttggtaaaaccttccgagacccttagcctcacatgcacggttagtgggggcagcatttcctcaggtgattactattggggatggattcggcaacccccgggtaaaggattggagtggattggtcatatttattatagtggagcgacgtactacaacccaagtctcaaatccagggttacaatatccgtcgatacgagcaggaaccaattcagcttgaaactttctagtgtcaccgcagcagacacagccgtctattactgtacgcgggatgactccagtaattggcggtcccgagggcaagggacactggtcacggtctcctcatctggaggcggtggaagcggtggaggaggatctcaggttcagctgcaagagtctggcggaggacttgctcaagctggcggaagcctgagactgtcttgtgccgcctctggcagaaccttcagcatgggctggtttagacaggcccctggcaaagagagagagttcgtcgccgccatcacatacagcggcggcagcccttactacgcctcttctgtcagaggccggttcaccatcagccgggacaacgccaagaacaccgtgtacctccagatgaacagcctgaagccagaggacaccgccgtgtactactgtgccgccaatccaacctacggcagcgactggaatgccgagaattggggccagggcacccaagtgacagtgtctagtacgcgtgcctctacaaagggaccctccgtgtttcctctggctcccagcagcaagtctacaagcggaggaacagccgctctgggctgcctggtcaaggattactttcccgagcctgtgaccgtgtcctggaatagcggagcactgacaagcggcgtgcacacctttccagccgtgctgcaaagcagcggcctgtactctctgagcagcgtggtcacagtgcctagctctagcctgggcacccagacctacatctgcaatgtgaaccacaagcctagcaacaccaaggtggacaagagagtggaacccaagagctgtgaagtgaaaaccgactccaccgaccacgtgaagcccaaagagacagagaacaccaagcagcccagcaagagctgccacaagcccaaggccatcgtgcacaccgagaaagtgaacatgatgagcctgaccgtgctgggcctgcggatgctgttcgccaaaaccgtggccgtgaacttcctgctgaccgccaagctgttcttcctccgcgccaagagaagcggatctggcgtgaagcagaccctgaatttcgacctgctgaagctggctggcgacgtggaatccaacccaggcccttctagaggccatatgaccgagtacaagcccacggtgcgcctcgccacccgcgacgacgtccccagggccgtacgcaccctcgccgccgcgttcgccgactaccccgccacgcgccacaccgtcgatccggaccgccacatcgagcgggtcaccgagctgcaagaactcttcctcacgcgcgtcgggctcgacatcggcaaggtgtgggtcgcggacgacggcgccgcggtggcggtctggaccacgccggagagcgtcgaagcgggggcggtgttcgccgagatcggcccgcgcatggccgagttgagcggttcccggctggccgcgcagcaacagatggaaggcctcctggcgccgcaccggcccaaggagcccgcgtggttcctggccaccgtcggcgtctcgcccgaccaccagggcaagggtctgggcagcgccgtcgtgctccccggagtggaggcggccgagcgcgccggggtgcccgccttcctggagacctccgcgccccgcaacctccccttctacgagcggctcggcttcaccgtcaccgccgacgtcgaggtgcccgaaggaccgcgcacctggtgcatgacccgcaagcccggtgcctga

SEQ ID NO: 5218 - DNA, 2748 bp, Artificial Sequence
  Synthetic Polynucloetide
atggccttaccagtgaccgccttgctcctgccgctggccttgctgctccacgccgccaggccggaggttcagctgcttgagtctggcggaggactggttcaacctggcggaagcctgagactgtcttgtgccgccagcggcttcacctttagcagctacgccatgagctgggtccgacaggctcctggcaaaggactggaatgggtgtccagcatcagcggcagcggcgactacatctactacgccgatagcgtgaagggcagattcaccatcagccgggacatcagcaagaacaccctgtacctccagatgaacagcctgagagccgaggacaccgccgtgtactactgtgccaaagaaggcaccggcgctaacagcagcctggccgattatagaggccagggcacactggtcaccgtgtctagtggcggaggaagcggcggaggatctcaggtccagctcgtcgagtccggcggcggcctcgtccaggccggcgactccgtcaccctctcctgcaccgcctccggccgcaccttctcctcctacgccctcgcctggttccgccagcgccccggcaaggagcgcgagttcgtcgccggcctccgctggggcggccccaccaactacgccgactccgtcaaggaccgcttcaccatctccggcgactccgccaagcacaccatgtacctccagatgaactccctcaagcccgaggacaccgccgtctactactgcggctacaaccccggcggctgggccgtcccctcccagtacgagtacgactcctggggccagggcacccaggtcaccgtctcctccctcgagggacagcctaaggccaatcctaccgtgacactgttccctccaagcagcgaagaactccaggccaacaaggccacacttgtgtgcctgatctccgacttctaccctggggctgtgacagtggcttggaaggccgatggatctcctgtgaaagccggcgtggaaaccaccaagccatccaagcagagcaacaacaaatacgccgccagctcctacctgagcctgacacctgagcagtggaagtcccacagatcctacagctgccaagtgacccacgaaggcagcaccgtggaaaagacagtggcccctacagagtgcagccccatcaagaccgatgtgattacaatggaccccaaggacaactgctccaaggacgccaacgataccctgctgctccagctgaccaacaccagcgcctactacatgtacttgttgctgctgctgaagtccgtggtgtacttcgccatcatcacatgctgcctgctgcggagaaccgccttctgctgcaacggcgagaagtctagggccaagcgatctggatctggagcaacaaacttctcactactcaaacaagcaggtgacgtggaggagaatcccgggcctactagtatggactggatttggcgcatccttttccttgtcggcgctgctaccggcgcgcattcccagctccagttgcaagagagcggccctggcttggtaaaaccttccgagacccttagcctcacatgcacggttagtgggggcagcatttcctcaggtgattactattggggatggattcggcaacccccgggtaaaggattggagtggattggtcatatttattatagtggagcgacgtactacaacccaagtctcaaatccagggttacaatatccgtcgatacgagcaggaaccaattcagcttgaaactttctagtgtcaccgcagcagacacagccgtctattactgtacgcgggatgactccagtaattggcggtcccgagggcaagggacactggtcacggtctcctcatctggaggcggtggaagcggtggaggaggatctcaggttcagctgcaagagtctggcggaggacttgctcaagctggcggaagcctgagactgtcttgtgccgcctctggcagaaccttcagcatgggctggtttagacaggcccctggcaaagagagagagttcgtcgccgccatcacatacagcggcggcagcccttactacgcctcttctgtcagaggccggttcaccatcagccgggacaacgccaagaacaccgtgtacctccagatgaacagcctgaagccagaggacaccgccgtgtactactgtgccgccaatccaacctacggcagcgactggaatgccgagaattggggccagggcacccaagtgacagtgtctagtacgcgtgcctctacaaagggaccctccgtgtttcctctggctcccagcagcaagtctacaagcggaggaacagccgctctgggctgcctggtcaaggattactttcccgagcctgtgaccgtgtcctggaatagcggagcactgacaagcggcgtgcacacctttccagccgtgctgcaaagcagcggcctgtactctctgagcagcgtggtcacagtgcctagctctagcctgggcacccagacctacatctgcaatgtgaaccacaagcctagcaacaccaaggtggacaagagagtggaacccaagagctgtgaagtgaaaaccgactccaccgaccacgtgaagcccaaagagacagagaacaccaagcagcccagcaagagctgccacaagcccaaggccatcgtgcacaccgagaaagtgaacatgatgagcctgaccgtgctgggcctgcggatgctgttcgccaaaaccgtggccgtgaacttcctgctgaccgccaagctgttcttcctc

SEQ ID NO: 5219 - DNA, 2835 bp, Artificial Sequence
  Synthetic Polynucloetide
atggccttaccagtgaccgccttgctcctgccgctggccttgctgctccacgccgccaggccggaggttcagctgcttgagtctggcggaggactggttcaacctggcggaagcctgagactgtcttgtgccgccagcggcttcacctttagcagctacgccatgagctgggtccgacaggctcctggcaaaggactggaatgggtgtccagcatcagcggcagcggcgactacatctactacgccgatagcgtgaagggcagattcaccatcagccgggacatcagcaagaacaccctgtacctccagatgaacagcctgagagccgaggacaccgccgtgtactactgtgccaaagaaggcaccggcgctaacagcagcctggccgattatagaggccagggcacactggtcaccgtgtctagtggcggaggaagcggcggaggatctcaggtccagctcgtcgagtccggcggcggcctcgtccaggccggcgactccgtcaccctctcctgcaccgcctccggccgcaccttctcctcctacgccctcgcctggttccgccagcgccccggcaaggagcgcgagttcgtcgccggcctccgctggggcggccccaccaactacgccgactccgtcaaggaccgcttcaccatctccggcgactccgccaagcacaccatgtacctccagatgaactccctcaagcccgaggacaccgccgtctactactgcggctacaaccccggcggctgggccgtcccctcccagtacgagtacgactcctggggccagggcacccaggtcaccgtctcctccctcgagggatctcccatcaagaccgatgtgattacaatggaccccaaggacaactgctccaaggacgccaacgataccctgctgctccagctgaccaacaccagcgcctactacatgtacttgttgctgctgctgaagtccgtggtgtacttcgccatcatcacatgctgcctgctgcggagaaccgccttctgctgcaacggcgagaagtctagggccaagcgatctggatctggagcaacaaacttctcactactcaaacaagcaggtgacgtggaggagaatcccgggcctactagtatggactggatttggcgcatccttttccttgtcggcgctgctaccggcgcgcattcccagctccagttgcaagagagcggccctggcttggtaaaaccttccgagacccttagcctcacatgcacggttagtgggggcagcatttcctcaggtgattactattggggatggattcggcaacccccgggtaaaggattggagtggattggtcatatttattatagtggagcgacgtactacaacccaagtctcaaatccagggttacaatatccgtcgatacgagcaggaaccaattcagcttgaaactttctagtgtcaccgcagcagacacagccgtctattactgtacgcgggatgactccagtaattggcggtcccgagggcaagggacactggtcacggtctcctcatctggaggcggtggaagcggtggaggaggatctcaggttcagctgcaagagtctggcggaggacttgctcaagctggcggaagcctgagactgtcttgtgccgcctctggcagaaccttcagcatgggctggtttagacaggcccctggcaaagagagagagttcgtcgccgccatcacatacagcggcggcagcccttactacgcctcttctgtcagaggccggttcaccatcagccgggacaacgccaagaacaccgtgtacctccagatgaacagcctgaagccagaggacaccgccgtgtactactgtgccgccaatccaacctacggcagcgactggaatgccgagaattggggccagggcacccaagtgacagtgtctagtacgcgtggcagcgaagtgaaaaccgactccaccgaccacgtgaagcccaaagagacagagaacaccaagcagcccagcaagagctgccacaagcccaaggccatcgtgcacaccgagaaagtgaacatgatgagcctgaccgtgctgggcctgcggatgctgttcgccaaaaccgtggccgtgaacttcctgctgaccgccaagctgttcttcctccgcgccaagagaagcggatctggcgtgaagcagaccctgaatttcgacctgctgaagctggctggcgacgtggaatccaacccaggcccttctagaggccatatgaccgagtacaagcccacggtgcgcctcgccacccgcgacgacgtccccagggccgtacgcaccctcgccgccgcgttcgccgactaccccgccacgcgccacaccgtcgatccggaccgccacatcgagcgggtcaccgagctgcaagaactcttcctcacgcgcgtcgggctcgacatcggcaaggtgtgggtcgcggacgacggcgccgcggtggcggtctggaccacgccggagagcgtcgaagcgggggcggtgttcgccgagatcggcccgcgcatggccgagttgagcggttcccggctggccgcgcagcaacagatggaaggcctcctggcgccgcaccggcccaaggagcccgcgtggttcctggccaccgtcggcgtctcgcccgaccaccagggcaagggtctgggcagcgccgtcgtgctccccggagtggaggcggccgagcgcgccggggtgcccgccttcctggagacctccgcgccccgcaacctccccttctacgagcggctcggcttcaccgtcaccgccgacgtcgaggtgcccgaaggaccgcgcacctggtgcatgacccgcaagcccggtgcctga

SEQ ID NO: 5220 - DNA, 2133 bp, Artificial Sequence
  Synthetic Polynucloetide
atggccttaccagtgaccgccttgctcctgccgctggccttgctgctccacgccgccaggccggaggttcagctgcttgagtctggcggaggactggttcaacctggcggaagcctgagactgtcttgtgccgccagcggcttcacctttagcagctacgccatgagctgggtccgacaggctcctggcaaaggactggaatgggtgtccagcatcagcggcagcggcgactacatctactacgccgatagcgtgaagggcagattcaccatcagccgggacatcagcaagaacaccctgtacctccagatgaacagcctgagagccgaggacaccgccgtgtactactgtgccaaagaaggcaccggcgctaacagcagcctggccgattatagaggccagggcacactggtcaccgtgtctagtggcggaggaagcggcggaggatctcaggtccagctcgtcgagtccggcggcggcctcgtccaggccggcgactccgtcaccctctcctgcaccgcctccggccgcaccttctcctcctacgccctcgcctggttccgccagcgccccggcaaggagcgcgagttcgtcgccggcctccgctggggcggccccaccaactacgccgactccgtcaaggaccgcttcaccatctccggcgactccgccaagcacaccatgtacctccagatgaactccctcaagcccgaggacaccgccgtctactactgcggctacaaccccggcggctgggccgtcccctcccagtacgagtacgactcctggggccagggcacccaggtcaccgtctcctccctcgagggatctcccatcaagaccgatgtgattacaatggaccccaaggacaactgctccaaggacgccaacgataccctgctgctccagctgaccaacaccagcgcctactacatgtacttgttgctgctgctgaagtccgtggtgtacttcgccatcatcacatgctgcctgctgcggagaaccgccttctgctgcaacggcgagaagtctagggccaagcgatctggatctggagcaacaaacttctcactactcaaacaagcaggtgacgtggaggagaatcccgggcctactagtatggactggatttggcgcatccttttccttgtcggcgctgctaccggcgcgcattcccagctccagttgcaagagagcggccctggcttggtaaaaccttccgagacccttagcctcacatgcacggttagtgggggcagcatttcctcaggtgattactattggggatggattcggcaacccccgggtaaaggattggagtggattggtcatatttattatagtggagcgacgtactacaacccaagtctcaaatccagggttacaatatccgtcgatacgagcaggaaccaattcagcttgaaactttctagtgtcaccgcagcagacacagccgtctattactgtacgcgggatgactccagtaattggcggtcccgagggcaagggacactggtcacggtctcctcatctggaggcggtggaagcggtggaggaggatctcaggttcagctgcaagagtctggcggaggacttgctcaagctggcggaagcctgagactgtcttgtgccgcctctggcagaaccttcagcatgggctggtttagacaggcccctggcaaagagagagagttcgtcgccgccatcacatacagcggcggcagcccttactacgcctcttctgtcagaggccggttcaccatcagccgggacaacgccaagaacaccgtgtacctccagatgaacagcctgaagccagaggacaccgccgtgtactactgtgccgccaatccaacctacggcagcgactggaatgccgagaattggggccagggcacccaagtgacagtgtctagtacgcgtggcagcgaagtgaaaaccgactccaccgaccacgtgaagcccaaagagacagagaacaccaagcagcccagcaagagctgccacaagcccaaggccatcgtgcacaccgagaaagtgaacatgatgagcctgaccgtgctgggcctgcggatgctgttcgccaaaaccgtggccgtgaacttcctgctgaccgccaagctgttcttcctc

SEQ ID NO: 5221 - DNA, 2187 bp, Artificial Sequence
  Synthetic Polynucloetide
atggccttaccagtgaccgccttgctcctgccgctggccttgctgctccacgccgccaggccggaggttcagctgcttgagtctggcggaggactggttcaacctggcggaagcctgagactgtcttgtgccgccagcggcttcacctttagcagctacgccatgagctgggtccgacaggctcctggcaaaggactggaatgggtgtccagcatcagcggcagcggcgactacatctactacgccgatagcgtgaagggcagattcaccatcagccgggacatcagcaagaacaccctgtacctccagatgaacagcctgagagccgaggacaccgccgtgtactactgtgccaaagaaggcaccggcgctaacagcagcctggccgattatagaggccagggcacactggtcaccgtgtctagtggcggaggaagcggcggaggatctcaggtccagctcgtcgagtccggcggcggcctcgtccaggccggcgactccgtcaccctctcctgcaccgcctccggccgcaccttctcctcctacgccctcgcctggttccgccagcgccccggcaaggagcgcgagttcgtcgccggcctccgctggggcggccccaccaactacgccgactccgtcaaggaccgcttcaccatctccggcgactccgccaagcacaccatgtacctccagatgaactccctcaagcccgaggacaccgccgtctactactgcggctacaaccccggcggctgggccgtcccctcccagtacgagtacgactcctggggccagggcacccaggtcaccgtctcctccctcgaggacaaaactcacacatgcccaccgtgcccagcacccatcaagaccgatgtgattacaatggaccccaaggacaactgctccaaggacgccaacgataccctgctgctccagctgaccaacaccagcgcctactacatgtacttgttgctgctgctgaagtccgtggtgtacttcgccatcatcacatgctgcctgctgcggagaaccgccttctgctgcaacggcgagaagtctagggccaagcgatctggatctggagcaacaaacttctcactactcaaacaagcaggtgacgtggaggagaatcccgggcctactagtatggactggatttggcgcatccttttccttgtcggcgctgctaccggcgcgcattcccagctccagttgcaagagagcggccctggcttggtaaaaccttccgagacccttagcctcacatgcacggttagtgggggcagcatttcctcaggtgattactattggggatggattcggcaacccccgggtaaaggattggagtggattggtcatatttattatagtggagcgacgtactacaacccaagtctcaaatccagggttacaatatccgtcgatacgagcaggaaccaattcagcttgaaactttctagtgtcaccgcagcagacacagccgtctattactgtacgcgggatgactccagtaattggcggtcccgagggcaagggacactggtcacggtctcctcatctggaggcggtggaagcggtggaggaggatctcaggttcagctgcaagagtctggcggaggacttgctcaagctggcggaagcctgagactgtcttgtgccgcctctggcagaaccttcagcatgggctggtttagacaggcccctggcaaagagagagagttcgtcgccgccatcacatacagcggcggcagcccttactacgcctcttctgtcagaggccggttcaccatcagccgggacaacgccaagaacaccgtgtacctccagatgaacagcctgaagccagaggacaccgccgtgtactactgtgccgccaatccaacctacggcagcgactggaatgccgagaattggggccagggcacccaagtgacagtgtctagtacgcgtgataaaactcatacctgtccgccatgcccggcagaagtgaaaaccgactccaccgaccacgtgaagcccaaagagacagagaacaccaagcagcccagcaagagctgccacaagcccaaggccatcgtgcacaccgagaaagtgaacatgatgagcctgaccgtgctgggcctgcggatgctgttcgccaaaaccgtggccgtgaacttcctgctgaccgccaagctgttcttcctc

SEQ ID NO: 5222 - DNA, 1293 bp, Artificial Sequence
  Synthetic Polynucloetide
atggactggatttggcgcatccttttccttgtcggcgctgctaccggcgcgcattcccagctccagttgcaagagagcggccctggcttggtaaaaccttccgagacccttagcctcacatgcacggttagtgggggcagcatttcctcaggtgattactattggggatggattcggcaacccccgggtaaaggattggagtggattggtcatatttattatagtggagcgacgtactacaacccaagtctcaaatccagggttacaatatccgtcgatacgagcaggaaccaattcagcttgaaactttctagtgtcaccgcagcagacacagccgtctattactgtacgcgggatgactccagtaattggcggtcccgagggcaagggacactggtcacggtctcctcatctggaggcggtggaagcggtggaggaggatctcaggttcagctgcaagagtctggcggaggacttgctcaagctggcggaagcctgagactgtcttgtgccgcctctggcagaaccttcagcatgggctggtttagacaggcccctggcaaagagagagagttcgtcgccgccatcacatacagcggcggcagcccttactacgcctcttctgtcagaggccggttcaccatcagccgggacaacgccaagaacaccgtgtacctccagatgaacagcctgaagccagaggacaccgccgtgtactactgtgccgccaatccaacctacggcagcgactggaatgccgagaattggggccagggcacccaagtgacagtgtctagtacgcgtgcctctacaaagggaccctccgtgtttcctctggctcccagcagcaagtctacaagcggaggaacagccgctctgggctgcctggtcaaggattactttcccgagcctgtgaccgtgtcctggaatagcggagcactgacaagcggcgtgcacacctttccagccgtgctgcaaagcagcggcctgtactctctgagcagcgtggtcacagtgcctagctctagcctgggcacccagacctacatctgcaatgtgaaccacaagcctagcaacaccaaggtggacaagagagtggaacccaagagctgtatccccgaggacacattcttcccaagccccgagagcagctgcgacgtgaagctggtggaaaagagcttcgagacagacaccaacctgaacttccagaacctgagcgtgatcggcttcagaatcctgctgctgaaagtggccggctttaacctgctgatgaccctgcggctgtggtccagc

SEQ ID NO: 5223 - DNA, 1317 bp, Artificial Sequence
  Synthetic Polynucloetide
atggactggatttggcgcatccttttccttgtcggcgctgctaccggcgcgcattcccagctccagttgcaagagagcggccctggcttggtaaaaccttccgagacccttagcctcacatgcacggttagtgggggcagcatttcctcaggtgattactattggggatggattcggcaacccccgggtaaaggattggagtggattggtcatatttattatagtggagcgacgtactacaacccaagtctcaaatccagggttacaatatccgtcgatacgagcaggaaccaattcagcttgaaactttctagtgtcaccgcagcagacacagccgtctattactgtacgcgggatgactccagtaattggcggtcccgagggcaagggacactggtcacggtctcctcatctggaggcggtggaagcggtggaggaggatctcaggttcagctgcaagagtctggcggaggacttgctcaagctggcggaagcctgagactgtcttgtgccgcctctggcagaaccttcagcatgggctggtttagacaggcccctggcaaagagagagagttcgtcgccgccatcacatacagcggcggcagcccttactacgcctcttctgtcagaggccggttcaccatcagccgggacaacgccaagaacaccgtgtacctccagatgaacagcctgaagccagaggacaccgccgtgtactactgtgccgccaatccaacctacggcagcgactggaatgccgagaattggggccagggcacccaagtgacagtgtctagtacgcgtgcctctacaaagggaccctccgtgtttcctctggctcccagcagcaagtctacaagcggaggaacagccgctctgggctgcctggtcaaggattactttcccgagcctgtgaccgtgtcctggaatagcggagcactgacaagcggcgtgcacacctttccagccgtgctgcaaagcagcggcctgtactctctgagcagcgtggtcacagtgcctagctctagcctgggcacccagacctacatctgcaatgtgaaccacaagcctagcaacaccaaggtggacaagagagtggaacccaagagctgtgaagtgaaaaccgactccaccgaccacgtgaagcccaaagagacagagaacaccaagcagcccagcaagagctgccacaagcccaaggccatcgtgcacaccgagaaagtgaacatgatgagcctgaccgtgctgggcctgcggatgctgttcgccaaaaccgtggccgtgaacttcctgctgaccgccaagctgttcttcctc

SEQ ID NO: 5224 - DNA, 1914 bp, Artificial Sequence
  Synthetic Polynucloetide
atggccttaccagtgaccgccttgctcctgccgctggccttgctgctccacgccgccaggccggaagttcagctgcttgagtctggcggaggactggttcaacctggcggaagcctgagactgtcttgtgccgccagcggcttcatcttcagcagctacgccatgagctgggtccgacaggctcctggaaagggccaagaatgggtttccggcgttagcggcacaggcgtgaacacctactacgccgatagcgtgaagggcagattcaccatcagccgggacaacagcaagaacaccctgtacctccagatgaacagcctgagagccgaggacaccgccgtgtactattgtgcctctggcaaaggctgggacagcggctcttggtacgaggactatagaggccagggcaccctggtcacagtttcttcaggtaccggcggaggcggatctggcggcggaggtagcggtggcggaggatctgaattcgacatccagatgacacagagccctagcagcctgtctgccagcgtgggagacagagtgaccatcacatgcaaggccagcgaccacatcaacaactggctggcctggtatcagcagaagcctggacaggcccctaagctgctgatctacggcgctaccacactggaaacaggcgtgcccagcagattttctggcagcggctctggcaccgactacaccctgacaatatccagcctccagcctgaggacttcgccacctactactgtcagcagagctggaacaccccttggacattcggccagggcaccaagctggaaatcaagagaggcggaggcggaagtggaggcggaggatctggcggcggaggctctcaagttcagcttcaacagcctggcgctgagctggtcaaacctggcgcttctgtgaagatgagctgcaaagccagcggctacgccttcagcagctactggatcaactggatgaagcagaaacccggccagggactcgaatggatcggccaaatctatcccggcgacggcgacaccaactacaacggcaagttcaagggcagagccacactgaccgccgatacctctagcagcacagcctacatgcagctgagcagcctgaccagcgaagatagcgccgtgtacttctgtgcccggtccatcacaacagtcgtgggctgcgctatggactattggggccagggaacaagcgtgaccgtgtctagtacgcgtgagcagaaactgatctcggaagaggatctgaaaattgaagttatgtatcctcctccttacctagacaatgagaagagcaatggaaccattatccatgtgaaagggaaacacctttgtccaagtcccctatttcccggaccttctaagcccttttgggtgctggtggtggttgggggagtcctggcttgctatagcttgctagtaacagtggcctttattattttctgggtgaggagtaagaggagcaggctcctgcacagtgactacatgaacatgactccacgccgccccggacccacccgcaagcattaccagccctatgccccaccacgcgacttcgcagcctatcgctccagagtgaagttcagcaggagcgcagacgcccccgcgtaccagcagggccagaaccagctctataacgagctcaatctaggacgaagagaggagtacgatgttttggacaagagacgtggccgggaccctgagatggggggaaagccgagaaggaagaaccctcaggaaggcctgtacaatgaactgcagaaagataagatggcggaggcctacagtgagattgggatgaaaggcgagcgccggaggggcaaggggcacgatggcctttaccagggtctcagtacagccaccaaggacacctacgacgcccttcacatgcaggccctgccccctcgc

SEQ ID NO: 5225 - DNA, 1935 bp, Artificial Sequence
  Synthetic Polynucloetide
atggccttaccagtgaccgccttgctcctgccgctggccttgctgctccacgccgccaggccggaagttcagctgcttgagtctggcggaggactggttcaacctggcggaagcctgagactgtcttgtgccgccagcggcttcatcttcagcagctacgccatgagctgggtccgacaggctcctggaaagggccaagaatgggtttccggcgttagcggcacaggcgtgaacacctactacgccgatagcgtgaagggcagattcaccatcagccgggacaacagcaagaacaccctgtacctccagatgaacagcctgagagccgaggacaccgccgtgtactattgtgcctctggcaaaggctgggacagcggctcttggtacgaggactatagaggccagggcaccctggtcacagtttcttcaggtaccggcggaggcggatctggcggcggaggtagcggtggcggaggatctgaattcgacatccagatgacacagagccctagcagcctgtctgccagcgtgggagacagagtgaccatcacatgcaaggccagcgaccacatcaacaactggctggcctggtatcagcagaagcctggacaggcccctaagctgctgatctacggcgctaccacactggaaacaggcgtgcccagcagattttctggcagcggctctggcaccgactacaccctgacaatatccagcctccagcctgaggacttcgccacctactactgtcagcagagctggaacaccccttggacattcggccagggcaccaagctggaaatcaagagaggcggaggcggaagtggaggcggaggatctggcggcggaggctctcaagttcagcttcaacagcctggcgctgagctggtcaaacctggcgcttctgtgaagatgagctgcaaagccagcggctacgccttcagcagctactggatcaactggatgaagcagaaacccggccagggactcgaatggatcggccaaatctatcccggcgacggcgacaccaactacaacggcaagttcaagggcagagccacactgaccgccgatacctctagcagcacagcctacatgcagctgagcagcctgaccagcgaagatagcgccgtgtacttctgtgcccggtccatcacaacagtcgtgggctgcgctatggactattggggccagggaacaagcgtgaccgtgtctagtacgcgtgagcagaaactgatctcggaagaggatctggcgaagcccaccacgacgccagcgccgcgaccaccaacaccggcgcccaccatcgcgtcgcagcccctgtccctgcgcccagaggcgtgccggccagcggcggggggcgcagtgcacacgagggggctggacttcgcctgtgacatctacatctgggcgcccttggccgggacttgtggggtccttctcctgtcactggttatcaccctttactgcaaacggggcagaaagaaactcctgtatatattcaaacaaccatttatgagaccagtacaaactactcaagaggaagatggctgtagctgccgatttccagaagaagaagaaggaggatgtgaactgagagtgaagttcagcaggagcgcagacgcccccgcgtaccagcagggccagaaccagctctataacgagctgaatctaggacgaagagaggagtacgatgttttggacaagagacgtggccgggaccctgagatggggggaaagccgagaaggaagaaccctcaggaaggcctgtacaatgaactgcagaaagataagatggcggaggcctacagtgagattgggatgaaaggcgagcgccggaggggcaaggggcacgatggcctttaccagggtctcagtacagccaccaaggacacctacgacgcccttcacatgcaggccctgccccctcgctga

SEQ ID NO: 5226 - DNA, 3174 bp, Artificial Sequence
  Synthetic Polynucloetide
atggccttaccagtgaccgccttgctcctgccgctggccttgctgctccacgccgccaggccggaagttcagctgcttgagtctggcggaggactggttcaacctggcggaagcctgagactgtcttgtgccgccagcggcttcatcttcagcagctacgccatgagctgggtccgacaggctcctggaaagggccaagaatgggtttccggcgttagcggcacaggcgtgaacacctactacgccgatagcgtgaagggcagattcaccatcagccgggacaacagcaagaacaccctgtacctccagatgaacagcctgagagccgaggacaccgccgtgtactattgtgcctctggcaaaggctgggacagcggctcttggtacgaggactatagaggccagggcaccctggtcacagtttcttcaggtaccggcggaggcggatctggcggcggaggtagcggtggcggaggatctgaattcgacatccagatgacacagagccctagcagcctgtctgccagcgtgggagacagagtgaccatcacatgcaaggccagcgaccacatcaacaactggctggcctggtatcagcagaagcctggacaggcccctaagctgctgatctacggcgctaccacactggaaacaggcgtgcccagcagattttctggcagcggctctggcaccgactacaccctgacaatatccagcctccagcctgaggacttcgccacctactactgtcagcagagctggaacaccccttggacattcggccagggcaccaagctggaaatcaagagaggcggaggcggaagtggaggcggaggatctggcggcggaggctctcaagttcagcttcaacagcctggcgctgagctggtcaaacctggcgcttctgtgaagatgagctgcaaagccagcggctacgccttcagcagctactggatcaactggatgaagcagaaacccggccagggactcgaatggatcggccaaatctatcccggcgacggcgacaccaactacaacggcaagttcaagggcagagccacactgaccgccgatacctctagcagcacagcctacatgcagctgagcagcctgaccagcgaagatagcgccgtgtacttctgtgcccggtccatcacaacagtcgtgggctgcgctatggactattggggccagggaacaagcgtgaccgtgtctagtacgcgtgagcagaaactgatctcggaagaggatctggcgaagcccaccacgacgccagcgccgcgaccaccaacaccggcgcccaccatcgcgtcgcagcccctgtccctgcgcccagaggcgtgccggccagcggcggggggcgcagtgcacacgagggggctggacttcgcctgtgacatctacatctgggcgcccttggccgggacttgtggggtccttctcctgtcactggttatcaccctttactgcgggcgcgccagagtgaagttcagcaggagcgcagacgcccccgcgtaccagcagggccagaaccagctctataacgagctgaatctaggacgaagagaggagtacgatgttttggacaagagacgtggccgggaccctgagatggggggaaagccgagaaggaagaaccctcaggaaggcctgtacaatgaactgcagaaagataagatggcggaggcctacagtgagattgggatgaaaggcgagcgccggaggggcaaggggcacgatggcctttaccagggtctcagtacagccaccaaggacacctacgacgcccttcacatgcaggccctgccccctcgctctagaggatctggagcaacaaacttctcactactcaaacaagcaggtgacgtggaggagaatcccgggcctgggatccacatggccacttacgaggttctctgtgaggtggcgcggaaactgggcacggatgacagggaagtggtattgttcctcctaaacgtgttcatacctcaacccacactggcccaattaattggagctcttagagctttaaaggaggagggcaggttaacgtttcccctgttagcggaatgtctgtttcgtgcaggtcgcagagacctcttgcgcgacctgcttcacttagacccgcgttttttagagcgccacctagcgggcacaatgagttatttcagcccttatcagctcactgttctccacgtagacggggagctgtgtgcgagggatattaggtctttgatatttttaagcaaggacactatagggtctcgcagcacaccacagacattcttacactgggtgtactgtatggaaaacttagacctactgggtcccactgacgtggatgccctaatgtcaatgcttagatctttgtcaagagtagacctacagcgccaagtgcaaaccctaatgggccttcacctttccggcccatcacactcccaacactatcgccatacaccactcgagaccgatttctacgactacaaggacgacgatgacaagactagtggctccggcgagggcagaggaagtctactaacctgcggagatgtggaagaaaatcctggcccacatatgaccgagtacaagcccacggtgcgcctcgccacccgcgacgacgtccccagggccgtacgcaccctcgccgccgcgttcgccgactaccccgccacgcgccacaccgtcgatccggaccgccacatcgagcgggtcaccgagctgcaagaactcttcctcacgcgcgtcgggctcgacatcggcaaggtgtgggtcgcggacgacggcgccgcggtggcggtctggaccacgccggagagcgtcgaagcgggggcggtgttcgccgagatcggcccgcgcatggccgagttgagcggttcccggctggccgcgcagcaacagatggaaggcctcctggcgccgcaccggcccaaggagcccgcgtggttcctggccaccgtcggcgtctcgcccgaccaccagggcaagggtctgggcagcgccgtcgtgctccccggagtggaggcggccgagcgcgccggggtgcccgccttcctggagacctccgcgccccgcaacctccccttctacgagcggctcggcttcaccgtcaccgccgacgtcgaggtgcccgaaggaccgcgcacctggtgcatgacccgcaagcccggtgcctga

SEQ ID NO: 5227 - DNA, 2994 bp, Artificial Sequence
  Synthetic Polynucloetide
atggccttaccagtgaccgccttgctcctgccgctggccttgctgctccacgccgccaggccggaagttcagctgcttgagtctggcggaggactggttcaacctggcggaagcctgagactgtcttgtgccgccagcggcttcatcttcagcagctacgccatgagctgggtccgacaggctcctggaaagggccaagaatgggtttccggcgttagcggcacaggcgtgaacacctactacgccgatagcgtgaagggcagattcaccatcagccgggacaacagcaagaacaccctgtacctccagatgaacagcctgagagccgaggacaccgccgtgtactattgtgcctctggcaaaggctgggacagcggctcttggtacgaggactatagaggccagggcaccctggtcacagtttcttcaggtaccggcggaggcggatctggcggcggaggtagcggtggcggaggatctgaattcgacatccagatgacacagagccctagcagcctgtctgccagcgtgggagacagagtgaccatcacatgcaaggccagcgaccacatcaacaactggctggcctggtatcagcagaagcctggacaggcccctaagctgctgatctacggcgctaccacactggaaacaggcgtgcccagcagattttctggcagcggctctggcaccgactacaccctgacaatatccagcctccagcctgaggacttcgccacctactactgtcagcagagctggaacaccccttggacattcggccagggcaccaagctggaaatcaagagactcgagatccagaaccctgatcctgccgtgtaccagctgcgggatagcaagagcagcgacaagagcgtgtgtctgttcaccgacttcgacagccagaccaacgtgtcccagagcaaggactccgacgtgtacatcaccgataagtgcgtgctggacatgcggagcatggacttcaagagcaactccgccgtggcctggtccaacaagtccgatttcgcctgcgccaacgccttcaacaacagcattatccccgaggacacattcttcccaagcagcgacgtgccctgcgacgtgaagctggtggaaaagagcttcgagacagacaccaacctgaacttccagaacctgagcgtgatcggcttcagaatcctgctgctgaaagtggccggctttaacctgctgatgaccctgcggctgtggtccagccgcgccaagagaagcggatctggcgtgaagcagaccctgaatttcgacctgctgaagctggctggcgacgtggaatccaacccaggccctactagtatggactggatttggcgcatccttttccttgtcggcgctgctaccggcgcgcattccttcgaacaagttcagcttcaacagcctggcgctgagctggtcaaacctggcgcttctgtgaagatgagctgcaaagccagcggctacgccttcagcagctactggatcaactggatgaagcagaaacccggccagggactcgaatggatcggccaaatctatcccggcgacggcgacaccaactacaacggcaagttcaagggcagagccacactgaccgccgatacctctagcagcacagcctacatgcagctgagcagcctgaccagcgaagatagcgccgtgtacttctgtgcccggtccatcacaacagtcgtgggctgcgctatggactattggggccagggaacaagcgtgaccgtgtctagtacgcgtgaggacctgaagaacgtgttcccacctgaggtggccgtgttcgagcctagcaaggccgagatcgcccacacccagaaagccaccctcgtgtgcctggctaccggcttctaccccgaccatgtggaactgtcttggtgggtcaacggcaaagaggtgcacagcggcgtgtgtaccgacccccagccactgaaagaacagcccgccctgaacgacagccggtactgcctgagcagcagactgagagtgtccgccaccttctggcagaacccccggaaccacttcagatgccaggtgcagttctacggcctgagcgagaacgacgagtggacccaggacagagccaagcccgtgacccagatcgtgtctgccgaagcctggggcagagccgattgcggcatcaccagcgccagctaccaccagggcgtgctgagcgccaccatcctgtacgagatcctgctgggcaaggccaccctgtacgccgtgctggtgtctgccctggtgctgatggctatggtcaagcggaaggacagccggggaagggccaagcgatctggatctggagcaacaaacttctcactactcaaacaagcaggtgacgtggaggagaatcccgggccttctagaggccatatgaccgagtacaagcccacggtgcgcctcgccacccgcgacgacgtccccagggccgtacgcaccctcgccgccgcgttcgccgactaccccgccacgcgccacaccgtcgatccggaccgccacatcgagcgggtcaccgagctgcaagaactcttcctcacgcgcgtcgggctcgacatcggcaaggtgtgggtcgcggacgacggcgccgcggtggcggtctggaccacgccggagagcgtcgaagcgggggcggtgttcgccgagatcggcccgcgcatggccgagttgagcggttcccggctggccgcgcagcaacagatggaaggcctcctggcgccgcaccggcccaaggagcccgcgtggttcctggccaccgtcggcgtctcgcccgaccaccagggcaagggtctgggcagcgccgtcgtgctccccggagtggaggcggccgagcgcgccggggtgcccgccttcctggagacctccgcgccccgcaacctccccttctacgagcggctcggcttcaccgtcaccgccgacgtcgaggtgcccgaaggaccgcgcacctggtgcatgacccgcaagcccggtgcctga

SEQ ID NO: 5228 - DNA, 2991 bp, Artificial Sequence
  Synthetic Polynucloetide
atggccttaccagtgaccgccttgctcctgccgctggccttgctgctccacgccgccaggccggaagttcagctgcttgagtctggcggaggactggttcaacctggcggaagcctgagactgtcttgtgccgccagcggcttcatcttcagcagctacgccatgagctgggtccgacaggctcctggaaagggccaagaatgggtttccggcgttagcggcacaggcgtgaacacctactacgccgatagcgtgaagggcagattcaccatcagccgggacaacagcaagaacaccctgtacctccagatgaacagcctgagagccgaggacaccgccgtgtactattgtgcctctggcaaaggctgggacagcggctcttggtacgaggactatagaggccagggcaccctggtcacagtttcttcaggtaccggcggaggcggatctggcggcggaggtagcggtggcggaggatctgaattcgacatccagatgacacagagccctagcagcctgtctgccagcgtgggagacagagtgaccatcacatgcaaggccagcgaccacatcaacaactggctggcctggtatcagcagaagcctggacaggcccctaagctgctgatctacggcgctaccacactggaaacaggcgtgcccagcagattttctggcagcggctctggcaccgactacaccctgacaatatccagcctccagcctgaggacttcgccacctactactgtcagcagagctggaacaccccttggacattcggccagggcaccaagctggaaatcaagagactcgaggacctgaagaacgtgttcccacctgaggtggccgtgttcgagcctagcaaggccgagatcgcccacacccagaaagccaccctcgtgtgcctggctaccggcttctaccccgaccatgtggaactgtcttggtgggtcaacggcaaagaggtgcacagcggcgtgtgtaccgacccccagccactgaaagaacagcccgccctgaacgacagccggtactgcctgagcagcagactgagagtgtccgccaccttctggcagaacccccggaaccacttcagatgccaggtgcagttctacggcctgagcgagaacgacgagtggacccaggacagagccaagcccgtgacccagatcgtgtctgccgaagcctggggcagagccgattgcggcatcaccagcgccagctaccaccagggcgtgctgagcgccaccatcctgtacgagatcctgctgggcaaggccaccctgtacgccgtgctggtgtctgccctggtgctgatggctatggtcaagcggaaggacagccggggaagggccaagcgatctggatctggagcaacaaacttctcactactcaaacaagcaggtgacgtggaggagaatcccgggcctactagtatggactggatttggcgcatccttttccttgtcggcgctgctaccggcgcgcattccttcgaacaagttcagcttcaacagcctggcgctgagctggtcaaacctggcgcttctgtgaagatgagctgcaaagccagcggctacgccttcagcagctactggatcaactggatgaagcagaaacccggccagggactcgaatggatcggccaaatctatcccggcgacggcgacaccaactacaacggcaagttcaagggcagagccacactgaccgccgatacctctagcagcacagcctacatgcagctgagcagcctgaccagcgaagatagcgccgtgtacttctgtgcccggtccatcacaacagtcgtgggctgcgctatggactattggggccagggaacaagcgtgaccgtgtctagtacgcgtatccagaaccctgatcctgccgtgtaccagctgcgggatagcaagagcagcgacaagagcgtgtgtctgttcaccgacttcgacagccagaccaacgtgtcccagagcaaggactccgacgtgtacatcaccgataagtgcgtgctggacatgcggagcatggacttcaagagcaactccgccgtggcctggtccaacaagtccgatttcgcctgcgccaacgccttcaacaacagcattatccccgaggacacattcttcccaagcagcgacgtgccctgcgacgtgaagctggtggaaaagagcttcgagacagacaccaacctgaacttccagaacctgagcgtgatcggcttcagaatcctgctgctgaaagtggccggctttaacctgctgatgaccctgcggctgtggtccagccgcgccaagagaagcggatctggcgtgaagcagaccctgaatttcgacctgctgaagctggctggcgacgtggaatccaacccaggcccttctagaggccatatgaccgagtacaagcccacggtgcgcctcgccacccgcgacgacgtccccagggccgtacgcaccctcgccgccgcgttcgccgactaccccgccacgcgccacaccgtcgatccggaccgccacatcgagcgggtcaccgagctgcaagaactcttcctcacgcgcgtcgggctcgacatcggcaaggtgtgggtcgcggacgacggcgccgcggtggcggtctggaccacgccggagagcgtcgaagcgggggcggtgttcgccgagatcggcccgcgcatggccgagttgagcggttcccggctggccgcgcagcaacagatggaaggcctcctggcgccgcaccggcccaaggagcccgcgtggttcctggccaccgtcggcgtctcgcccgaccaccagggcaagggtctgggcagcgccgtcgtgctccccggagtggaggcggccgagcgcgccggggtgcccgccttcctggagacctccgcgccccgcaacctccccttctacgagcggctcggcttcaccgtcaccgccgacgtcgaggtgcccgaaggaccgcgcacctggtgcatgacccgcaagcccggtgcctga

SEQ ID NO: 5229 - DNA, 2289 bp, Artificial Sequence
  Synthetic Polynucloetide
atggccttaccagtgaccgccttgctcctgccgctggccttgctgctccacgccgccaggccggaagttcagctgcttgagtctggcggaggactggttcaacctggcggaagcctgagactgtcttgtgccgccagcggcttcatcttcagcagctacgccatgagctgggtccgacaggctcctggaaagggccaagaatgggtttccggcgttagcggcacaggcgtgaacacctactacgccgatagcgtgaagggcagattcaccatcagccgggacaacagcaagaacaccctgtacctccagatgaacagcctgagagccgaggacaccgccgtgtactattgtgcctctggcaaaggctgggacagcggctcttggtacgaggactatagaggccagggcaccctggtcacagtttcttcaggtaccggcggaggcggatctggcggcggaggtagcggtggcggaggatctgaattcgacatccagatgacacagagccctagcagcctgtctgccagcgtgggagacagagtgaccatcacatgcaaggccagcgaccacatcaacaactggctggcctggtatcagcagaagcctggacaggcccctaagctgctgatctacggcgctaccacactggaaacaggcgtgcccagcagattttctggcagcggctctggcaccgactacaccctgacaatatccagcctccagcctgaggacttcgccacctactactgtcagcagagctggaacaccccttggacattcggccagggcaccaagctggaaatcaagagactcgaggacctgaagaacgtgttcccacctgaggtggccgtgttcgagcctagcgaggccgagatcagccacacccagaaagccaccctcgtgtgcctggctaccggcttctaccccgaccatgtggaactgtcttggtgggtcaacggcaaagaggtgcacagcggcgtgtgtaccgacccccagccactgaaagaacagcccgccctgaacgacagccggtactgcctgagcagcagactgagagtgtccgccaccttctggcagaacccccggaaccacttcagatgccaggtgcagttctacggcctgagcgagaacgacgagtggacccaggacagagccaagcccgtgacccagatcgtgtctgccgaagcctggggcagagccgattgcggctttaccagcgagagctaccagcagggcgtgctgagcgccaccatcctgtacgagatcctgctgggcaaggccaccctgtacgccgtgctggtgtctgccctggtgctgatggctatggtcaagcggaaggacagccggggaagggccaagcgatctggatctggagcaacaaacttctcactactcaaacaagcaggtgacgtggaggagaatcccgggcctactagtatggactggatttggcgcatccttttccttgtcggcgctgctaccggcgcgcattccttcgaacaagttcagcttcaacagcctggcgctgagctggtcaaacctggcgcttctgtgaagatgagctgcaaagccagcggctacgccttcagcagctactggatcaactggatgaagcagaaacccggccagggactcgaatggatcggccaaatctatcccggcgacggcgacaccaactacaacggcaagttcaagggcagagccacactgaccgccgatacctctagcagcacagcctacatgcagctgagcagcctgaccagcgaagatagcgccgtgtacttctgtgcccggtccatcacaacagtcgtgggctgcgctatggactattggggccagggaacaagcgtgaccgtgtctagtacgcgtatccagaaccctgatcctgccgtgtaccagctgcgggatagcaagagcagcgacaagagcgtgtgtctgttcaccgacttcgacagccagaccaacgtgtcccagagcaaggactccgacgtgtacatcaccgataagtgcgtgctggacatgcggagcatggacttcaagagcaactccgccgtggcctggtccaacaagtccgatttcgcctgcgccaacgccttcaacaacagcattatccccgaggacacattcttcccaagccccgagagcagctgcgacgtgaagctggtggaaaagagcttcgagacagacaccaacctgaacttccagaacctgagcgtgatcggcttcagaatcctgctgctgaaagtggccggctttaacctgctgatgaccctgcggctgtggtccagc

SEQ ID NO: 5230 - DNA, 2964 bp, Artificial Sequence
  Synthetic Polynucloetide
atggccttaccagtgaccgccttgctcctgccgctggccttgctgctccacgccgccaggccggaagttcagctgcttgagtctggcggaggactggttcaacctggcggaagcctgagactgtcttgtgccgccagcggcttcatcttcagcagctacgccatgagctgggtccgacaggctcctggaaagggccaagaatgggtttccggcgttagcggcacaggcgtgaacacctactacgccgatagcgtgaagggcagattcaccatcagccgggacaacagcaagaacaccctgtacctccagatgaacagcctgagagccgaggacaccgccgtgtactattgtgcctctggcaaaggctgggacagcggctcttggtacgaggactatagaggccagggcaccctggtcacagtttcttcaggtaccggcggaggcggatctggcggcggaggtagcggtggcggaggatctgaattcgacatccagatgacacagagccctagcagcctgtctgccagcgtgggagacagagtgaccatcacatgcaaggccagcgaccacatcaacaactggctggcctggtatcagcagaagcctggacaggcccctaagctgctgatctacggcgctaccacactggaaacaggcgtgcccagcagattttctggcagcggctctggcaccgactacaccctgacaatatccagcctccagcctgaggacttcgccacctactactgtcagcagagctggaacaccccttggacattcggccagggcaccaagctggaaatcaagagactcgaggacctgaagaacgtgttcccacctgaggtggccgtgttcgagcctagcgaggccgagatcagccacacccagaaagccaccctcgtgtgcctggctaccggcttctaccccgaccatgtggaactgtcttggtgggtcaacggcaaagaggtgcacagcggcgtgtgtaccgacccccagccactgaaagaacagcccgccctgaacgacagccggtactgcctgagcagcagactgagagtgtccgccaccttctggcagaacccccggaaccacttcagatgccaggtgcagttctacggcctgagcgagaacgacgagtggacccaggacagagccaagcccgtgacccagatcgtgtctgccgaagcctggggcagagccgattgcggctttaccagcgagagctaccagcagggcgtgctgagcgccaccatcctgtacgagatcctgctgggcaaggccaccctgtacgccgtgctggtgtctgccctggtgctgatggctatggtcaagcggaaggacagccggggaagggccaagcgatctggatctggagcaacaaacttctcactactcaaacaagcaggtgacgtggaggagaatcccgggcctactagtatggactggatttggcgcatccttttccttgtcggcgctgctaccggcgcgcattccttcgaacaagttcagcttcaacagcctggcgctgagctggtcaaacctggcgcttctgtgaagatgagctgcaaagccagcggctacgccttcagcagctactggatcaactggatgaagcagaaacccggccagggactcgaatggatcggccaaatctatcccggcgacggcgacaccaactacaacggcaagttcaagggcagagccacactgaccgccgatacctctagcagcacagcctacatgcagctgagcagcctgaccagcgaagatagcgccgtgtacttctgtgcccggtccatcacaacagtcgtgggctgcgctatggactattggggccagggaacaagcgtgaccgtgtctagtacgcgtatccagaaccctgatcctgccgtgtaccagctgcgggatagcaagagcagcgacaagagcgtgtgtctgttcaccgacttcgacagccagaccaacgtgtcccagagcaaggactccgacgtgtacatcaccgataagtgcgtgctggacatgcggagcatggacttcaagagcaactccgccgtggcctggtccaacaagtccgatttcgcctgcgccaacgccttcaacaacagcattatccccgaggacacattcttcccaagccccgagagcagctgcgacgtgaagctggtggaaaagagcttcgagacagacaccaacctgaacttccagaacctgagcgtgatcggcttcagaatcctgctgctgaaagtggccggctttaacctgctgatgaccctgcggctgtggtccagccgcgccaagagaagcggatctggcgtgaagcagaccctgaatttcgacctgctgaagctggctggcgacgtggaatccaacccaggcccttctagaggcgggatccacaccatggctacctacgaggtgctgtgcgaggtggcaagaaagctgggcaccgacgacagagaagtggtgctgttcctgctgaacgtgttcatccctcagcctacactggcccagctgatcggtgcactgagagccctgaaagaggaaggccggctgacctttcctctgctggccgaatgcctgttcagagccggaagaagggatctgctgcgggacctgctgcatctggaccccagatttctggaaagacacctggccggcaccatgagctacttcagcccttaccagctgaccgtgctgcacgttgacggcgaactgtgcgccagagatattcggagcctgatcttcctgagcaaggacaccatcggcagccggtctacccctcagacatttctgcactgggtgtactgcatggaaaacctggacctgctcggccccacagatgtggatgccctgatgtccatgctgagaagcctgagcagagtggacctccagagacaggtgcagacactgatgggactgcacctgagcggacctagccacagccagcactacagacacacccct

SEQ ID NO: 5231 - DNA, 2301 bp, Artificial Sequence
  Synthetic Polynucloetide
atggccttaccagtgaccgccttgctcctgccgctggccttgctgctccacgccgccaggccggaagttcagctgcttgagtctggcggaggactggttcaacctggcggaagcctgagactgtcttgtgccgccagcggcttcatcttcagcagctacgccatgagctgggtccgacaggctcctggaaagggccaagaatgggtttccggcgttagcggcacaggcgtgaacacctactacgccgatagcgtgaagggcagattcaccatcagccgggacaacagcaagaacaccctgtacctccagatgaacagcctgagagccgaggacaccgccgtgtactattgtgcctctggcaaaggctgggacagcggctcttggtacgaggactatagaggccagggcaccctggtcacagtttcttcaggtaccggcggaggcggatctggcggcggaggtagcggtggcggaggatctgaattcgacatccagatgacacagagccctagcagcctgtctgccagcgtgggagacagagtgaccatcacatgcaaggccagcgaccacatcaacaactggctggcctggtatcagcagaagcctggacaggcccctaagctgctgatctacggcgctaccacactggaaacaggcgtgcccagcagattttctggcagcggctctggcaccgactacaccctgacaatatccagcctccagcctgaggacttcgccacctactactgtcagcagagctggaacaccccttggacattcggccagggcaccaagctggaaatcaagagactcgagatccagaaccctgatcctgccgtgtaccagctgcgggatagcaagagcagcgacaagagcgtgtgtctgttcaccgacttcgacagccagaccaacgtgtcccagagcaaggactccgacgtgtacatcaccgataagtgcgtgctggacatgcggagcatggacttcaagagcaactccgccgtggcctggtccaacaagtccgatttcgcctgcgccaacgccttcaacaacagcattatccccgaggacacattcttcccaagccccgagagcagctgcgacgtgaagctggtggaaaagagcttcgagacagacaccaacctgaacttccagaacctgagcgtgatcggcttcagaatcctgctgctgaaagtggccggctttaacctgctgatgaccctgcggctgtggtccagccgcgccaagagaagcggatctggcgtgaagcagaccctgaatttcgacctgctgaagctggctggcgacgtggaatccaacccaggccctactagtatggactggatttggcgcatccttttccttgtcggcgctgctaccggcgcgcattccttcgaacaagttcagcttcaacagcctggcgctgagctggtcaaacctggcgcttctgtgaagatgagctgcaaagccagcggctacgccttcagcagctactggatcaactggatgaagcagaaacccggccagggactcgaatggatcggccaaatctatcccggcgacggcgacaccaactacaacggcaagttcaagggcagagccacactgaccgccgatacctctagcagcacagcctacatgcagctgagcagcctgaccagcgaagatagcgccgtgtacttctgtgcccggtccatcacaacagtcgtgggctgcgctatggactattggggccagggaacaagcgtgaccgtgtctagtacgcgtgaggacctgaagaacgtgttcccacctgaggtggccgtgttcgagcctagcgaggccgagatcagccacacccagaaagccaccctcgtgtgcctggctaccggcttctaccccgaccatgtggaactgtcttggtgggtcaacggcaaagaggtgcacagcggcgtgtgtaccgacccccagccactgaaagaacagcccgccctgaacgacagccggtactgcctgagcagcagactgagagtgtccgccaccttctggcagaacccccggaaccacttcagatgccaggtgcagttctacggcctgagcgagaacgacgagtggacccaggacagagccaagcccgtgacccagatcgtgtctgccgaagcctggggcagagccgattgcggctttaccagcgagagctaccagcagggcgtgctgagcgccaccatcctgtacgagatcctgctgggcaaggccaccctgtacgccgtgctggtgtctgccctggtgctgatggctatggtcaagcggaaggacagccgggga

SEQ ID NO: 5232 - DNA, 2967 bp, Artificial Sequence
  Synthetic Polynucloetide
atggccttaccagtgaccgccttgctcctgccgctggccttgctgctccacgccgccaggccggaagttcagctgcttgagtctggcggaggactggttcaacctggcggaagcctgagactgtcttgtgccgccagcggcttcatcttcagcagctacgccatgagctgggtccgacaggctcctggaaagggccaagaatgggtttccggcgttagcggcacaggcgtgaacacctactacgccgatagcgtgaagggcagattcaccatcagccgggacaacagcaagaacaccctgtacctccagatgaacagcctgagagccgaggacaccgccgtgtactattgtgcctctggcaaaggctgggacagcggctcttggtacgaggactatagaggccagggcaccctggtcacagtttcttcaggtaccggcggaggcggatctggcggcggaggtagcggtggcggaggatctgaattcgacatccagatgacacagagccctagcagcctgtctgccagcgtgggagacagagtgaccatcacatgcaaggccagcgaccacatcaacaactggctggcctggtatcagcagaagcctggacaggcccctaagctgctgatctacggcgctaccacactggaaacaggcgtgcccagcagattttctggcagcggctctggcaccgactacaccctgacaatatccagcctccagcctgaggacttcgccacctactactgtcagcagagctggaacaccccttggacattcggccagggcaccaagctggaaatcaagagactcgagatccagaaccctgatcctgccgtgtaccagctgcgggatagcaagagcagcgacaagagcgtgtgtctgttcaccgacttcgacagccagaccaacgtgtcccagagcaaggactccgacgtgtacatcaccgataagtgcgtgctggacatgcggagcatggacttcaagagcaactccgccgtggcctggtccaacaagtccgatttcgcctgcgccaacgccttcaacaacagcattatccccgaggacacattcttcccaagccccgagagcagctgcgacgtgaagctggtggaaaagagcttcgagacagacaccaacctgaacttccagaacctgagcgtgatcggcttcagaatcctgctgctgaaagtggccggctttaacctgctgatgaccctgcggctgtggtccagccgcgccaagagaagcggatctggcgtgaagcagaccctgaatttcgacctgctgaagctggctggcgacgtggaatccaacccaggccctactagtatggactggatttggcgcatccttttccttgtcggcgctgctaccggcgcgcattccttcgaacaagttcagcttcaacagcctggcgctgagctggtcaaacctggcgcttctgtgaagatgagctgcaaagccagcggctacgccttcagcagctactggatcaactggatgaagcagaaacccggccagggactcgaatggatcggccaaatctatcccggcgacggcgacaccaactacaacggcaagttcaagggcagagccacactgaccgccgatacctctagcagcacagcctacatgcagctgagcagcctgaccagcgaagatagcgccgtgtacttctgtgcccggtccatcacaacagtcgtgggctgcgctatggactattggggccagggaacaagcgtgaccgtgtctagtacgcgtgaggacctgaagaacgtgttcccacctgaggtggccgtgttcgagcctagcgaggccgagatcagccacacccagaaagccaccctcgtgtgcctggctaccggcttctaccccgaccatgtggaactgtcttggtgggtcaacggcaaagaggtgcacagcggcgtgtgtaccgacccccagccactgaaagaacagcccgccctgaacgacagccggtactgcctgagcagcagactgagagtgtccgccaccttctggcagaacccccggaaccacttcagatgccaggtgcagttctacggcctgagcgagaacgacgagtggacccaggacagagccaagcccgtgacccagatcgtgtctgccgaagcctggggcagagccgattgcggctttaccagcgagagctaccagcagggcgtgctgagcgccaccatcctgtacgagatcctgctgggcaaggccaccctgtacgccgtgctggtgtctgccctggtgctgatggctatggtcaagcggaaggacagccggggaagggccaagcgatctggatctggagcaacaaacttctcactactcaaacaagcaggtgacgtggaggagaatcccgggccttctagaggcgggatccacaccatggctacctacgaggtgctgtgcgaggtggcaagaaagctgggcaccgacgacagagaagtggtgctgttcctgctgaacgtgttcatccctcagcctacactggcccagctgatcggtgcactgagagccctgaaagaggaaggccggctgacctttcctctgctggccgaatgcctgttcagagccggaagaagggatctgctgcgggacctgctgcatctggaccccagatttctggaaagacacctggccggcaccatgagctacttcagcccttaccagctgaccgtgctgcacgttgacggcgaactgtgcgccagagatattcggagcctgatcttcctgagcaaggacaccatcggcagccggtctacccctcagacatttctgcactgggtgtactgcatggaaaacctggacctgctcggccccacagatgtggatgccctgatgtccatgctgagaagcctgagcagagtggacctccagagacaggtgcagacactgatgggactgcacctgagcggacctagccacagccagcactacagacacacccct

SEQ ID NO: 5233 - DNA, 3126 bp, Artificial Sequence
  Synthetic Polynucloetide
atggccttaccagtgaccgccttgctcctgccgctggccttgctgctccacgccgccaggccgctcgaggggaaaccaattcccaaccctcttctgggactggattcaaccggcagcggcgaggacctgaagaacgtgttcccacctgaggtggccgtgttcgagcctagcaaggccgagatcgcccacacccagaaagccaccctcgtgtgcctggctaccggcttctaccccgaccatgtggaactgtcttggtgggtcaacggcaaagaggtgcacagcggcgtgtgtaccgacccccagccactgaaagaacagcccgccctgaacgacagccggtactgcctgagcagcagactgagagtgtccgccaccttctggcagaacccccggaaccacttcagatgccaggtgcagttctacggcctgagcgagaacgacgagtggacccaggacagagccaagcccgtgacccagatcgtgtctgccgaagcctggggcagagccgattgcggcatcaccagcgccagctaccaccagggcgtgctgagcgccaccatcctgtacgagatcctgctgggcaaggccaccctgtacgccgtgctggtgtctgccctggtgctgatggctatggtcaagcggaaggacagccggggaagggccaagcgatctggatctggagcaacaaacttctcactactcaaacaagcaggtgacgtggaggagaatcccgggcctactagcatggccttaccagtgaccgccttgctcctgccgctggccttgctgctccacgccgccaggccggaagttcagctgcttgagtctggcggaggactggttcaacctggcggaagcctgagactgtcttgtgccgccagcggcttcatcttcagcagctacgccatgagctgggtccgacaggctcctggaaagggccaagaatgggtttccggcgttagcggcacaggcgtgaacacctactacgccgatagcgtgaagggcagattcaccatcagccgggacaacagcaagaacaccctgtacctccagatgaacagcctgagagccgaggacaccgccgtgtactattgtgcctctggcaaaggctgggacagcggctcttggtacgaggactatagaggccagggcaccctggtcacagtttcttcaggtaccggcggaggcggatctggcggcggaggtagcggtggcggaggatctgaattcgacatccagatgacacagagccctagcagcctgtctgccagcgtgggagacagagtgaccatcacatgcaaggccagcgaccacatcaacaactggctggcctggtatcagcagaagcctggacaggcccctaagctgctgatctacggcgctaccacactggaaacaggcgtgcccagcagattttctggcagcggctctggcaccgactacaccctgacaatatccagcctccagcctgaggacttcgccacctactactgtcagcagagctggaacaccccttggacattcggccagggcaccaagctggaaatcaagagaggcggaggcggaagtggaggcggaggatctggcggcggaggctctcaagttcagcttcaacagcctggcgctgagctggtcaaacctggcgcttctgtgaagatgagctgcaaagccagcggctacgccttcagcagctactggatcaactggatgaagcagaaacccggccagggactcgaatggatcggccaaatctatcccggcgacggcgacaccaactacaacggcaagttcaagggcagagccacactgaccgccgatacctctagcagcacagcctacatgcagctgagcagcctgaccagcgaagatagcgccgtgtacttctgtgcccggtccatcacaacagtcgtgggctgcgctatggactattggggccagggaacaagcgtgaccgtgtctagtacgcgtgagcagaaactgatctcggaagaggatgggagcggcatccagaaccctgatcctgccgtgtaccagctgcgggatagcaagagcagcgacaagagcgtgtgtctgttcaccgacttcgacagccagaccaacgtgtcccagagcaaggactccgacgtgtacatcaccgataagtgcgtgctggacatgcggagcatggacttcaagagcaactccgccgtggcctggtccaacaagtccgatttcgcctgcgccaacgccttcaacaacagcattatccccgaggacacattcttcccaagcagcgacgtgccctgcgacgtgaagctggtggaaaagagcttcgagacagacaccaacctgaacttccagaacctgagcgtgatcggcttcagaatcctgctgctgaaagtggccggctttaacctgctgatgaccctgcggctgtggtccagccgcgccaagagaagcggatctggcgtgaagcagaccctgaatttcgacctgctgaagctggctggcgacgtggaatccaacccaggcccttctagaggccatatgaccgagtacaagcccacggtgcgcctcgccacccgcgacgacgtccccagggccgtacgcaccctcgccgccgcgttcgccgactaccccgccacgcgccacaccgtcgatccggaccgccacatcgagcgggtcaccgagctgcaagaactcttcctcacgcgcgtcgggctcgacatcggcaaggtgtgggtcgcggacgacggcgccgcggtggcggtctggaccacgccggagagcgtcgaagcgggggcggtgttcgccgagatcggcccgcgcatggccgagttgagcggttcccggctggccgcgcagcaacagatggaaggcctcctggcgccgcaccggcccaaggagcccgcgtggttcctggccaccgtcggcgtctcgcccgaccaccagggcaagggtctgggcagcgccgtcgtgctccccggagtggaggcggccgagcgcgccggggtgcccgccttcctggagacctccgcgccccgcaacctccccttctacgagcggctcggcttcaccgtcaccgccgacgtcgaggtgcccgaaggaccgcgcacctggtgcatgacccgcaagcccggtgcctga

SEQ ID NO: 5234 - DNA, 3129 bp, Artificial Sequence
  Synthetic Polynucloetide
atggccttaccagtgaccgccttgctcctgccgctggccttgctgctccacgccgccaggccgctcgagcagaaactgatctcggaagaggatctgggctccggcgatcgccctgatcctgccgtgtaccagctgcgggatagcaagagcagcgacaagagcgtgtgtctgttcaccgacttcgacagccagaccaacgtgtcccagagcaaggactccgacgtgtacatcaccgataagtgcgtgctggacatgcggagcatggacttcaagagcaactccgccgtggcctggtccaacaagtccgatttcgcctgcgccaacgccttcaacaacagcattatccccgaggacacattcttcccaagccccgagagcagctgcgacgtgaagctggtggaaaagagcttcgagacagacaccaacctgaacttccagaacctgagcgtgatcggcttcagaatcctgctgctgaaagtggccggctttaacctgctgatgaccctgcggctgtggtccagctctagtcgcgccaagagaagcggatctggcgtgaagcagaccctgaatttcgacctgctgaagctggctggcgacgtggaatccaacccaggccccactagcatggccttaccagtgaccgccttgctcctgccgctggccttgctgctccacgccgccaggccggaagttcagctgcttgagtctggcggaggactggttcaacctggcggaagcctgagactgtcttgtgccgccagcggcttcatcttcagcagctacgccatgagctgggtccgacaggctcctggaaagggccaagaatgggtttccggcgttagcggcacaggcgtgaacacctactacgccgatagcgtgaagggcagattcaccatcagccgggacaacagcaagaacaccctgtacctccagatgaacagcctgagagccgaggacaccgccgtgtactattgtgcctctggcaaaggctgggacagcggctcttggtacgaggactatagaggccagggcaccctggtcacagtttcttcaggtaccggcggaggcggatctggcggcggaggtagcggtggcggaggatctgaattcgacatccagatgacacagagccctagcagcctgtctgccagcgtgggagacagagtgaccatcacatgcaaggccagcgaccacatcaacaactggctggcctggtatcagcagaagcctggacaggcccctaagctgctgatctacggcgctaccacactggaaacaggcgtgcccagcagattttctggcagcggctctggcaccgactacaccctgacaatatccagcctccagcctgaggacttcgccacctactactgtcagcagagctggaacaccccttggacattcggccagggcaccaagctggaaatcaagagaggcggaggcggaagtggaggcggaggatctggcggcggaggctctcaagttcagcttcaacagcctggcgctgagctggtcaaacctggcgcttctgtgaagatgagctgcaaagccagcggctacgccttcagcagctactggatcaactggatgaagcagaaacccggccagggactcgaatggatcggccaaatctatcccggcgacggcgacaccaactacaacggcaagttcaagggcagagccacactgaccgccgatacctctagcagcacagcctacatgcagctgagcagcctgaccagcgaagatagcgccgtgtacttctgtgcccggtccatcacaacagtcgtgggctgcgctatggactattggggccagggaacaagcgtgaccgtgtctagtacgcgtgggaaaccaattcccaaccctcttctgggactggattcaaccggcagcggcgaggacctgaagaacgtgttcccacctgaggtggccgtgttcgagcctagcgaggccgagatcagccacacccagaaagccaccctcgtgtgcctggctaccggcttctaccccgaccatgtggaactgtcttggtgggtcaacggcaaagaggtgcacagcggcgtgtgtaccgacccccagccactgaaagaacagcccgccctgaacgacagccggtactgcctgagcagcagactgagagtgtccgccaccttctggcagaacccccggaaccacttcagatgccaggtgcagttctacggcctgagcgagaacgacgagtggacccaggacagagccaagcccgtgacccagatcgtgtctgccgaagcctggggcagagccgattgcggctttaccagcgagagctaccagcagggcgtgctgagcgccaccatcctgtacgagatcctgctgggcaaggccaccctgtacgccgtgctggtgtctgccctggtgctgatggctatggtcaagcggaaggacagccggggaagggccaagcgatctggatctggagcaacaaacttctcactactcaaacaagcaggtgacgtggaggagaatcccgggccttctagaggccatatgaccgagtacaagcccacggtgcgcctcgccacccgcgacgacgtccccagggccgtacgcaccctcgccgccgcgttcgccgactaccccgccacgcgccacaccgtcgatccggaccgccacatcgagcgggtcaccgagctgcaagaactcttcctcacgcgcgtcgggctcgacatcggcaaggtgtgggtcgcggacgacggcgccgcggtggcggtctggaccacgccggagagcgtcgaagcgggggcggtgttcgccgagatcggcccgcgcatggccgagttgagcggttcccggctggccgcgcagcaacagatggaaggcctcctggcgccgcaccggcccaaggagcccgcgtggttcctggccaccgtcggcgtctcgcccgaccaccagggcaagggtctgggcagcgccgtcgtgctccccggagtggaggcggccgagcgcgccggggtgcccgccttcctggagacctccgcgccccgcaacctccccttctacgagcggctcggcttcaccgtcaccgccgacgtcgaggtgcccgaaggaccgcgcacctggtgcatgacccgcaagcccggtgcctga

SEQ ID NO: 5235 - DNA, 2991 bp, Artificial Sequence
  Synthetic Polynucloetide
atggccttaccagtgaccgccttgctcctgccgctggccttgctgctccacgccgccaggccggaagttcagctgcttgagtctggcggaggactggttcaacctggcggaagcctgagactgtcttgtgccgccagcggcttcatcttcagcagctacgccatgagctgggtccgacaggctcctggaaagggccaagaatgggtttccggcgttagcggcacaggcgtgaacacctactacgccgatagcgtgaagggcagattcaccatcagccgggacaacagcaagaacaccctgtacctccagatgaacagcctgagagccgaggacaccgccgtgtactattgtgcctctggcaaaggctgggacagcggctcttggtacgaggactatagaggccagggcaccctggtcacagtttcttcaggtaccggcggaggcggatctggcggcggaggtagcggtggcggaggatctgaattcgacatccagatgacacagagccctagcagcctgtctgccagcgtgggagacagagtgaccatcacatgcaaggccagcgaccacatcaacaactggctggcctggtatcagcagaagcctggacaggcccctaagctgctgatctacggcgctaccacactggaaacaggcgtgcccagcagattttctggcagcggctctggcaccgactacaccctgacaatatccagcctccagcctgaggacttcgccacctactactgtcagcagagctggaacaccccttggacattcggccagggcaccaagctggaaatcaagagactcgaggacctgaagaacgtgttcccacctgaggtggccgtgttcgagcctagcgaggccgagatcagccacacccagaaagccaccctcgtgtgcctggctaccggcttctaccccgaccatgtggaactgtcttggtgggtcaacggcaaagaggtgcacagcggcgtgtctaccgacccccagccactgaaagaacagcccgccctgaacgacagccggtactgcctgagcagcagactgagagtgtccgccaccttctggcagaacccccggaaccacttcagatgccaggtgcagttctacggcctgagcgagaacgacgagtggacccaggacagagccaagcccgtgacccagatcgtgtctgccgaagcctggggcagagccgattgcggctttaccagcgagagctaccagcagggcgtgctgagcgccaccatcctgtacgagatcctgctgggcaaggccaccctgtacgccgtgctggtgtctgccctggtgctgatggctatggtcaagcggaaggacagccggggaagggccaagcgatctggatctggagcaacaaacttctcactactcaaacaagcaggtgacgtggaggagaatcccgggcctactagtatggactggatttggcgcatccttttccttgtcggcgctgctaccggcgcgcattccttcgaacaagttcagcttcaacagcctggcgctgagctggtcaaacctggcgcttctgtgaagatgagctgcaaagccagcggctacgccttcagcagctactggatcaactggatgaagcagaaacccggccagggactcgaatggatcggccaaatctatcccggcgacggcgacaccaactacaacggcaagttcaagggcagagccacactgaccgccgatacctctagcagcacagcctacatgcagctgagcagcctgaccagcgaagatagcgccgtgtacttctgtgcccggtccatcacaacagtcgtgggctgcgctatggactattggggccagggaacaagcgtgaccgtgtctagtacgcgtatccagaaccctgatcctgccgtgtaccagctgcgggatagcaagagcagcgacaagagcgtgtgtctgttcaccgacttcgacagccagaccaacgtgtcccagagcaaggactccgacgtgtacatcaccgataagaccgtgctggacatgcggagcatggacttcaagagcaactccgccgtggcctggtccaacaagtccgatttcgcctgcgccaacgccttcaacaacagcattatccccgaggacacattcttcccaagccccgagagcagctgcgacgtgaagctggtggaaaagagcttcgagacagacaccaacctgaacttccagaacctgagcgtgatcggcttcagaatcctgctgctgaaagtggccggctttaacctgctgatgaccctgcggctgtggtccagccgcgccaagagaagcggatctggcgtgaagcagaccctgaatttcgacctgctgaagctggctggcgacgtggaatccaacccaggcccttctagaggccatatgaccgagtacaagcccacggtgcgcctcgccacccgcgacgacgtccccagggccgtacgcaccctcgccgccgcgttcgccgactaccccgccacgcgccacaccgtcgatccggaccgccacatcgagcgggtcaccgagctgcaagaactcttcctcacgcgcgtcgggctcgacatcggcaaggtgtgggtcgcggacgacggcgccgcggtggcggtctggaccacgccggagagcgtcgaagcgggggcggtgttcgccgagatcggcccgcgcatggccgagttgagcggttcccggctggccgcgcagcaacagatggaaggcctcctggcgccgcaccggcccaaggagcccgcgtggttcctggccaccgtcggcgtctcgcccgaccaccagggcaagggtctgggcagcgccgtcgtgctccccggagtggaggcggccgagcgcgccggggtgcccgccttcctggagacctccgcgccccgcaacctccccttctacgagcggctcggcttcaccgtcaccgccgacgtcgaggtgcccgaaggaccgcgcacctggtgcatgacccgcaagcccggtgcctga

SEQ ID NO: 5236 - DNA, 3237 bp, Artificial Sequence
  Synthetic Polynucloetide
atggccttaccagtgaccgccttgctcctgccgctggccttgctgctccacgccgccaggccggaagttcagctgcttgagtctggcggaggactggttcaacctggcggaagcctgagactgtcttgtgccgccagcggcttcatcttcagcagctacgccatgagctgggtccgacaggctcctggaaagggccaagaatgggtttccggcgttagcggcacaggcgtgaacacctactacgccgatagcgtgaagggcagattcaccatcagccgggacaacagcaagaacaccctgtacctccagatgaacagcctgagagccgaggacaccgccgtgtactattgtgcctctggcaaaggctgggacagcggctcttggtacgaggactatagaggccagggcaccctggtcacagtttcttcaggtaccggcggaggcggatctggcggcggaggtagcggtggcggaggatctgaattcgacatccagatgacacagagccctagcagcctgtctgccagcgtgggagacagagtgaccatcacatgcaaggccagcgaccacatcaacaactggctggcctggtatcagcagaagcctggacaggcccctaagctgctgatctacggcgctaccacactggaaacaggcgtgcccagcagattttctggcagcggctctggcaccgactacaccctgacaatatccagcctccagcctgaggacttcgccacctactactgtcagcagagctggaacaccccttggacattcggccagggcaccaagctggaaatcaagagactcgaggacctgaagaacgtgttcccacctgaggtggccgtgttcgagcctagcgaggccgagatcagccacacccagaaagccaccctcgtgtgcctggctaccggcttctaccccgaccatgtggaactgtcttggtgggtcaacggcaaagaggtgcacagcggcgtgtctaccgacccccagccactgaaagaacagcccgccctgaacgacagccggtactgcctgagcagcagactgagagtgtccgccaccttctggcagaacccccggaaccacttcagatgccaggtgcagttctacggcctgagcgagaacgacgagtggacccaggacagagccaagcccgtgacccagatcgtgtctgccgaagcctggggcagagccgattgcggctttaccagcgagagctaccagcagggcgtgctgagcgccaccatcctgtacgagatcctgctgggcaaggccaccctgtacgccgtgctggtgtctgccctggtgctgatggctatggtcaagcggaaggacagccggggaagggccaagcgatctggatctggagcaacaaacttctcactactcaaacaagcaggtgacgtggaggagaatcccgggcctactagtatggactggatttggcgcatccttttccttgtcggcgctgctaccggcgcgcattccttcgaacaagttcagcttcaacagcctggcgctgagctggtcaaacctggcgcttctgtgaagatgagctgcaaagccagcggctacgccttcagcagctactggatcaactggatgaagcagaaacccggccagggactcgaatggatcggccaaatctatcccggcgacggcgacaccaactacaacggcaagttcaagggcagagccacactgaccgccgatacctctagcagcacagcctacatgcagctgagcagcctgaccagcgaagatagcgccgtgtacttctgtgcccggtccatcacaacagtcgtgggctgcgctatggactattggggccagggaacaagcgtgaccgtgtctagtacgcgtgagcagaaactgatctcggaagaggatgggagcggcaccccattcccttctctggcccctcccatcatgctgctggtggacggcaagcagcagatggtggtcgtgtgcctggtgctggatgtggccccacctggactggacagccccatctggtttagcgccggcaatggctctgccctggacgcctttacctacggcccaagccctgccaccgatggcacctggacaaatctggcccacctgagcctgcccagcgaggaactggcttcttgggagcctctcgtgtgccacacaggacctggcgctgagggacacagcagatccacccagcctatgcacctgtctggcgaggccagcaccgccagaacctgtcctcaggaacctctgagaggcacccctggcggagcactgtggctgggagtgctgagactgctgctgttcaagctgctgctgtttgacctgctgctgacctgctcctgtctgtgcgatcctgccggccctctgccttctcctgccaccaccacaagactgagagccctgggcagccacagactgcaccctgccacagagacaggcggcagagaggccacaagcagccctagaccccagcccagagacagaagatggggcgataccccccctggcagaaagcctggatctccagtccgcgccaagagaagcggatctggcgtgaagcagaccctgaatttcgacctgctgaagctggctggcgacgtggaatccaacccaggcccttctagaggccatatgaccgagtacaagcccacggtgcgcctcgccacccgcgacgacgtccccagggccgtacgcaccctcgccgccgcgttcgccgactaccccgccacgcgccacaccgtcgatccggaccgccacatcgagcgggtcaccgagctgcaagaactcttcctcacgcgcgtcgggctcgacatcggcaaggtgtgggtcgcggacgacggcgccgcggtggcggtctggaccacgccggagagcgtcgaagcgggggcggtgttcgccgagatcggcccgcgcatggccgagttgagcggttcccggctggccgcgcagcaacagatggaaggcctcctggcgccgcaccggcccaaggagcccgcgtggttcctggccaccgtcggcgtctcgcccgaccaccagggcaagggtctgggcagcgccgtcgtgctccccggagtggaggcggccgagcgcgccggggtgcccgccttcctggagacctccgcgccccgcaacctccccttctacgagcggctcggcttcaccgtcaccgccgacgtcgaggtgcccgaaggaccgcgcacctggtgcatgacccgcaagcccggtgcctga

SEQ ID NO: 5237 - DNA, 3291 bp, Artificial Sequence
  Synthetic Polynucloetide
atggccttaccagtgaccgccttgctcctgccgctggccttgctgctccacgccgccaggccgctcgaggacctgaagaacgtgttcccacctgaggtggccgtgttcgagcctagcgaggccgagatcagccacacccagaaagccaccctcgtgtgcctggctaccggcttctaccccgaccatgtggaactgtcttggtgggtcaacggcaaagaggtgcacagcggcgtgtctaccgacccccagccactgaaagaacagcccgccctgaacgacagccggtactgcctgagcagcagactgagagtgtccgccaccttctggcagaacccccggaaccacttcagatgccaggtgcagttctacggcctgagcgagaacgacgagtggacccaggacagagccaagcccgtgacccagatcgtgtctgccgaagcctggggcagagccgattgcggctttaccagcgagagctaccagcagggcgtgctgagcgccaccatcctgtacgagatcctgctgggcaaggccaccctgtacgccgtgctggtgtctgccctggtgctgatggctatggtcaagcggaaggacagccggggaagggccaagcgatctggatctggagcaacaaacttctcactactcaaacaagcaggtgacgtggaggagaatcccgggcctactagcatggccttaccagtgaccgccttgctcctgccgctggccttgctgctccacgccgccaggccggaagttcagctgcttgagtctggcggaggactggttcaacctggcggaagcctgagactgtcttgtgccgccagcggcttcatcttcagcagctacgccatgagctgggtccgacaggctcctggaaagggccaagaatgggtttccggcgttagcggcacaggcgtgaacacctactacgccgatagcgtgaagggcagattcaccatcagccgggacaacagcaagaacaccctgtacctccagatgaacagcctgagagccgaggacaccgccgtgtactattgtgcctctggcaaaggctgggacagcggctcttggtacgaggactatagaggccagggcaccctggtcacagtttcttcaggtaccggcggaggcggatctggcggcggaggtagcggtggcggaggatctgaattcgacatccagatgacacagagccctagcagcctgtctgccagcgtgggagacagagtgaccatcacatgcaaggccagcgaccacatcaacaactggctggcctggtatcagcagaagcctggacaggcccctaagctgctgatctacggcgctaccacactggaaacaggcgtgcccagcagattttctggcagcggctctggcaccgactacaccctgacaatatccagcctccagcctgaggacttcgccacctactactgtcagcagagctggaacaccccttggacattcggccagggcaccaagctggaaatcaagagaggcggaggcggaagtggaggcggaggatctggcggcggaggctctcaagttcagcttcaacagcctggcgctgagctggtcaaacctggcgcttctgtgaagatgagctgcaaagccagcggctacgccttcagcagctactggatcaactggatgaagcagaaacccggccagggactcgaatggatcggccaaatctatcccggcgacggcgacaccaactacaacggcaagttcaagggcagagccacactgaccgccgatacctctagcagcacagcctacatgcagctgagcagcctgaccagcgaagatagcgccgtgtacttctgtgcccggtccatcacaacagtcgtgggctgcgctatggactattggggccagggaacaagcgtgaccgtgtctagtacgcgtgagcagaaactgatctcggaagaggatctggggagcggcaccccattcccttctctggcccctcccatcatgctgctggtggacggcaagcagcagatggtggtcgtgtgcctggtgctggatgtggccccacctggactggacagccccatctggtttagcgccggcaatggctctgccctggacgcctttacctacggcccaagccctgccaccgatggcacctggacaaatctggcccacctgagcctgcccagcgaggaactggcttcttgggagcctctcgtgtgccacacaggacctggcgctgagggacacagcagatccacccagcctatgcacctgtctggcgaggccagcaccgccagaacctgtcctcaggaacctctgagaggcacccctggcggagcactgtggctgggagtgctgagactgctgctgttcaagctgctgctgtttgacctgctgctgacctgctcctgtctgtgcgatcctgccggccctctgccttctcctgccaccaccacaagactgagagccctgggcagccacagactgcaccctgccacagagacaggcggcagagaggccacaagcagccctagaccccagcccagagacagaagatggggcgataccccccctggcagaaagcctggatctccagtccgcgccaagagaagcggatctggcgtgaagcagaccctgaatttcgacctgctgaagctggctggcgacgtggaatccaacccaggcccttctagatctagaggccatatgaccgagtacaagcccacggtgcgcctcgccacccgcgacgacgtccccagggccgtacgcaccctcgccgccgcgttcgccgactaccccgccacgcgccacaccgtcgatccggaccgccacatcgagcgggtcaccgagctgcaagaactcttcctcacgcgcgtcgggctcgacatcggcaaggtgtgggtcgcggacgacggcgccgcggtggcggtctggaccacgccggagagcgtcgaagcgggggcggtgttcgccgagatcggcccgcgcatggccgagttgagcggttcccggctggccgcgcagcaacagatggaaggcctcctggcgccgcaccggcccaaggagcccgcgtggttcctggccaccgtcggcgtctcgcccgaccaccagggcaagggtctgggcagcgccgtcgtgctccccggagtggaggcggccgagcgcgccggggtgcccgccttcctggagacctccgcgccccgcaacctccccttctacgagcggctcggcttcaccgtcaccgccgacgtcgaggtgcccgaaggaccgcgcacctggtgcatgacccgcaagcccggtgcctga

SEQ ID NO: 5238 - DNA, 3102 bp, Artificial Sequence
  Synthetic Polynucloetide
atggccttaccagtgaccgccttgctcctgccgctggccttgctgctccacgccgccaggccggaagttcagctgcttgagtctggcggaggactggttcaacctggcggaagcctgagactgtcttgtgccgccagcggcttcatcttcagcagctacgccatgagctgggtccgacaggctcctggaaagggccaagaatgggtttccggcgttagcggcacaggcgtgaacacctactacgccgatagcgtgaagggcagattcaccatcagccgggacaacagcaagaacaccctgtacctccagatgaacagcctgagagccgaggacaccgccgtgtactattgtgcctctggcaaaggctgggacagcggctcttggtacgaggactatagaggccagggcaccctggtcacagtttcttcaggtaccggcggaggcggatctggcggcggaggtagcggtggcggaggatctgaattcgacatccagatgacacagagccctagcagcctgtctgccagcgtgggagacagagtgaccatcacatgcaaggccagcgaccacatcaacaactggctggcctggtatcagcagaagcctggacaggcccctaagctgctgatctacggcgctaccacactggaaacaggcgtgcccagcagattttctggcagcggctctggcaccgactacaccctgacaatatccagcctccagcctgaggacttcgccacctactactgtcagcagagctggaacaccccttggacattcggccagggcaccaagctggaaatcaagagactcgaggggaaaccaattcccaaccctcttctgggactggattcaaccggcagcggcgacaagcagctggacgccgacgtgtcccccaagcctaccatcttcctgccctctatcgccgagacaaagctccagaaggccggcacctacctgtgcctgctggaaaagttcttcccagatgtgattaagatccactggcaggaaaagaagtccaacaccatcctgggcagccaggaaggcaacaccatgaagaccaacgacacctacatgaagttcagctggctgaccgtgcccgagaagtccctggacaaagaacacagatgcatcgtgcggcacgaaaacaacaagaacggcgtggaccaggaaatcatcttcccacccatcaagaccgatgtgattacaatggaccccaaggacaactgctccaaggacgccaacgataccctgctgctccagctgaccaacaccagcgcctactacatgtacttgttgctgctgctgaagtccgtggtgtacttcgccatcatcacatgctgcctgctgcggagaaccgccttctgctgcaacggcgagaagtctagggccaagcgatctggatctggagcaacaaacttctcactactcaaacaagcaggtgacgtggaggagaatcccgggcctactagtatggactggatttggcgcatccttttccttgtcggcgctgctaccggcgcgcattccttcgaacaagttcagcttcaacagcctggcgctgagctggtcaaacctggcgcttctgtgaagatgagctgcaaagccagcggctacgccttcagcagctactggatcaactggatgaagcagaaacccggccagggactcgaatggatcggccaaatctatcccggcgacggcgacaccaactacaacggcaagttcaagggcagagccacactgaccgccgatacctctagcagcacagcctacatgcagctgagcagcctgaccagcgaagatagcgccgtgtacttctgtgcccggtccatcacaacagtcgtgggctgcgctatggactattggggccagggaacaagcgtgaccgtgtctagtacgcgtgagcagaaactgatctcggaagaggatgggagcggcagccagcctcacaccaagcccagcgtgttcgtgatgaagaacggcaccaacgtggcctgcctcgtgaaagagttctaccccaaggacatcaggatcaacctggtgtccagcaagaagatcaccgagttcgaccccgccatcgtgatctcccccagcggcaagtacaacgccgtgaagctggggaagtacgaggacagcaacagcgtgacctgctccgtgcagcacgacaacaagaccgtgcacagcaccgactttgaagtgaaaaccgactccaccgaccacgtgaagcccaaagagacagagaacaccaagcagcccagcaagagctgccacaagcccaaggccatcgtgcacaccgagaaagtgaacatgatgagcctgaccgtgctgggcctgcggatgctgttcgccaaaaccgtggccgtgaacttcctgctgaccgccaagctgttcttcctccgcgccaagagaagcggatctggcgtgaagcagaccctgaatttcgacctgctgaagctggctggcgacgtggaatccaacccaggcccttctagaggccatatgaccgagtacaagcccacggtgcgcctcgccacccgcgacgacgtccccagggccgtacgcaccctcgccgccgcgttcgccgactaccccgccacgcgccacaccgtcgatccggaccgccacatcgagcgggtcaccgagctgcaagaactcttcctcacgcgcgtcgggctcgacatcggcaaggtgtgggtcgcggacgacggcgccgcggtggcggtctggaccacgccggagagcgtcgaagcgggggcggtgttcgccgagatcggcccgcgcatggccgagttgagcggttcccggctggccgcgcagcaacagatggaaggcctcctggcgccgcaccggcccaaggagcccgcgtggttcctggccaccgtcggcgtctcgcccgaccaccagggcaagggtctgggcagcgccgtcgtgctccccggagtggaggcggccgagcgcgccggggtgcccgccttcctggagacctccgcgccccgcaacctccccttctacgagcggctcggcttcaccgtcaccgccgacgtcgaggtgcccgaaggaccgcgcacctggtgcatgacccgcaagcccggtgcctga

SEQ ID NO: 5239 - DNA, 2313 bp, Artificial Sequence
  Synthetic Polynucloetide
atggccttaccagtgaccgccttgctcctgccgctggccttgctgctccacgccgccaggccggaagttcagctgcttgagtctggcggaggactggttcaacctggcggaagcctgagactgtcttgtgccgccagcggcttcatcttcagcagctacgccatgagctgggtccgacaggctcctggaaagggccaagaatgggtttccggcgttagcggcacaggcgtgaacacctactacgccgatagcgtgaagggcagattcaccatcagccgggacaacagcaagaacaccctgtacctccagatgaacagcctgagagccgaggacaccgccgtgtactattgtgcctctggcaaaggctgggacagcggctcttggtacgaggactatagaggccagggcaccctggtcacagtttcttcaggtaccggcggaggcggatctggcggcggaggtagcggtggcggaggatctgaattcgacatccagatgacacagagccctagcagcctgtctgccagcgtgggagacagagtgaccatcacatgcaaggccagcgaccacatcaacaactggctggcctggtatcagcagaagcctggacaggcccctaagctgctgatctacggcgctaccacactggaaacaggcgtgcccagcagattttctggcagcggctctggcaccgactacaccctgacaatatccagcctccagcctgaggacttcgccacctactactgtcagcagagctggaacaccccttggacattcggccagggcaccaagctggaaatcaagagactcgagagccagcctcacaccaagcccagcgtgttcgtgatgaagaacggcaccaacgtggcctgcctcgtgaaagagttctaccccaaggacatcaggatcaacctggtgtccagcaagaagatcaccgagttcgaccccgccatcgtgatctcccccagcggcaagtacaacgccgtgaagctggggaagtacgaggacagcaacagcgtgacctgctccgtgcagcacgacaacaagaccgtgcacagcaccgactttgaagtgaaaaccgactccaccgaccacgtgaagcccaaagagacagagaacaccaagcagcccagcaagagctgccacaagcccaaggccatcgtgcacaccgagaaagtgaacatgatgagcctgaccgtgctgggcctgcggatgctgttcgccaaaaccgtggccgtgaacttcctgctgaccgccaagctgttcttcctcagggccaagcgatctggatctggagcaacaaacttctcactactcaaacaagcaggtgacgtggaggagaatcccgggcctactagtatggactggatttggcgcatccttttccttgtcggcgctgctaccggcgcgcattccttcgaacaagttcagcttcaacagcctggcgctgagctggtcaaacctggcgcttctgtgaagatgagctgcaaagccagcggctacgccttcagcagctactggatcaactggatgaagcagaaacccggccagggactcgaatggatcggccaaatctatcccggcgacggcgacaccaactacaacggcaagttcaagggcagagccacactgaccgccgatacctctagcagcacagcctacatgcagctgagcagcctgaccagcgaagatagcgccgtgtacttctgtgcccggtccatcacaacagtcgtgggctgcgctatggactattggggccagggaacaagcgtgaccgtgtctagtacgcgtgacaagcagctggacgccgacgtgtcccccaagcctaccatcttcctgccctctatcgccgagacaaagctccagaaggccggcacctacctgtgcctgctggaaaagttcttcccagatgtgattaagatccactggcaggaaaagaagtccaacaccatcctgggcagccaggaaggcaacaccatgaagaccaacgacacctacatgaagttcagctggctgaccgtgcccgagaagtccctggacaaagaacacagatgcatcgtgcggcacgaaaacaacaagaacggcgtggaccaggaaatcatcttcccacccatcaagaccgatgtgattacaatggaccccaaggacaactgctccaaggacgccaacgataccctgctgctccagctgaccaacaccagcgcctactacatgtacttgttgctgctgctgaagtccgtggtgtacttcgccatcatcacatgctgcctgctgcggagaaccgccttctgctgcaacggcgagaagtct

SEQ ID NO: 5240 - DNA, 3147 bp, Artificial Sequence
  Synthetic Polynucloetide
atggccttaccagtgaccgccttgctcctgccgctggccttgctgctccacgccgccaggccgctcgaggggaaaccaattcccaaccctcttctgggactggattcaaccggcagcggcgacaagcagctggacgccgacgtgtcccccaagcctaccatcttcctgccctctatcgccgagacaaagctccagaaggccggcacctacctgtgcctgctggaaaagttcttcccagatgtgattaagatccactggcaggaaaagaagtccaacaccatcctgggcagccaggaaggcaacaccatgaagaccaacgacacctacatgaagttcagctggctgaccgtgcccgagaagtccctggacaaagaacacagatgcatcgtgcggcacgaaaacaacaagaacggcgtggaccaggaaatcatcttcccacccatcaagaccgatgtgattacaatggaccccaaggacaactgctccaaggacgccaacgataccctgctgctccagctgaccaacaccagcgcctactacatgtacttgttgctgctgctgaagtccgtggtgtacttcgccatcatcacatgctgcctgctgcggagaaccgccttctgctgcaacggcgagaagtctagggccaagcgatctggatctggagcaacaaacttctcactactcaaacaagcaggtgacgtggaggagaatcccgggcctactagcatggccttaccagtgaccgccttgctcctgccgctggccttgctgctccacgccgccaggccggaagttcagctgcttgagtctggcggaggactggttcaacctggcggaagcctgagactgtcttgtgccgccagcggcttcatcttcagcagctacgccatgagctgggtccgacaggctcctggaaagggccaagaatgggtttccggcgttagcggcacaggcgtgaacacctactacgccgatagcgtgaagggcagattcaccatcagccgggacaacagcaagaacaccctgtacctccagatgaacagcctgagagccgaggacaccgccgtgtactattgtgcctctggcaaaggctgggacagcggctcttggtacgaggactatagaggccagggcaccctggtcacagtttcttcaggtaccggcggaggcggatctggcggcggaggtagcggtggcggaggatctgaattcgacatccagatgacacagagccctagcagcctgtctgccagcgtgggagacagagtgaccatcacatgcaaggccagcgaccacatcaacaactggctggcctggtatcagcagaagcctggacaggcccctaagctgctgatctacggcgctaccacactggaaacaggcgtgcccagcagattttctggcagcggctctggcaccgactacaccctgacaatatccagcctccagcctgaggacttcgccacctactactgtcagcagagctggaacaccccttggacattcggccagggcaccaagctggaaatcaagagaggcggaggcggaagtggaggcggaggatctggcggcggaggctctcaagttcagcttcaacagcctggcgctgagctggtcaaacctggcgcttctgtgaagatgagctgcaaagccagcggctacgccttcagcagctactggatcaactggatgaagcagaaacccggccagggactcgaatggatcggccaaatctatcccggcgacggcgacaccaactacaacggcaagttcaagggcagagccacactgaccgccgatacctctagcagcacagcctacatgcagctgagcagcctgaccagcgaagatagcgccgtgtacttctgtgcccggtccatcacaacagtcgtgggctgcgctatggactattggggccagggaacaagcgtgaccgtgtctagtacgcgtgagcagaaactgatctcggaagaggatgggagcggcagccagcctcacaccaagcccagcgtgttcgtgatgaagaacggcaccaacgtggcctgcctcgtgaaagagttctaccccaaggacatcaggatcaacctggtgtccagcaagaagatcaccgagttcgaccccgccatcgtgatctcccccagcggcaagtacaacgccgtgaagctggggaagtacgaggacagcaacagcgtgacctgctccgtgcagcacgacaacaagaccgtgcacagcaccgactttgaagtgaaaaccgactccaccgaccacgtgaagcccaaagagacagagaacaccaagcagcccagcaagagctgccacaagcccaaggccatcgtgcacaccgagaaagtgaacatgatgagcctgaccgtgctgggcctgcggatgctgttcgccaaaaccgtggccgtgaacttcctgctgaccgccaagctgttcttcctccgcgccaagagaagcggatctggcgtgaagcagaccctgaatttcgacctgctgaagctggctggcgacgtggaatccaacccaggcccttctagaggccatatgaccgagtacaagcccacggtgcgcctcgccacccgcgacgacgtccccagggccgtacgcaccctcgccgccgcgttcgccgactaccccgccacgcgccacaccgtcgatccggaccgccacatcgagcgggtcaccgagctgcaagaactcttcctcacgcgcgtcgggctcgacatcggcaaggtgtgggtcgcggacgacggcgccgcggtggcggtctggaccacgccggagagcgtcgaagcgggggcggtgttcgccgagatcggcccgcgcatggccgagttgagcggttcccggctggccgcgcagcaacagatggaaggcctcctggcgccgcaccggcccaaggagcccgcgtggttcctggccaccgtcggcgtctcgcccgaccaccagggcaagggtctgggcagcgccgtcgtgctccccggagtggaggcggccgagcgcgccggggtgcccgccttcctggagacctccgcgccccgcaacctccccttctacgagcggctcggcttcaccgtcaccgccgacgtcgaggtgcccgaaggaccgcgcacctggtgcatgacccgcaagcccggtgcctga

SEQ ID NO: 5241 - DNA, 3522 bp, Artificial Sequence
  Synthetic Polynucloetide
atggccttaccagtgaccgccttgctcctgccgctggccttgctgctccacgccgccaggccggaagttcagctgcttgagtctggcggaggactggttcaacctggcggaagcctgagactgtcttgtgccgccagcggcttcatcttcagcagctacgccatgagctgggtccgacaggctcctggaaagggccaagaatgggtttccggcgttagcggcacaggcgtgaacacctactacgccgatagcgtgaagggcagattcaccatcagccgggacaacagcaagaacaccctgtacctccagatgaacagcctgagagccgaggacaccgccgtgtactattgtgcctctggcaaaggctgggacagcggctcttggtacgaggactatagaggccagggcaccctggtcacagtttcttcaggtaccggcggaggcggatctggcggcggaggtagcggtggcggaggatctgaattcgacatccagatgacacagagccctagcagcctgtctgccagcgtgggagacagagtgaccatcacatgcaaggccagcgaccacatcaacaactggctggcctggtatcagcagaagcctggacaggcccctaagctgctgatctacggcgctaccacactggaaacaggcgtgcccagcagattttctggcagcggctctggcaccgactacaccctgacaatatccagcctccagcctgaggacttcgccacctactactgtcagcagagctggaacaccccttggacattcggccagggcaccaagctggaaatcaagagaggacagcctaaggccaatcctaccgtgacactgttccctccaagcagcgaagaactccaggccaacaaggccacacttgtgtgcctgatctccgacttctaccctggggctgtgacagtggcttggaaggccgatggatctcctgtgaaagccggcgtggaaaccaccaagccatccaagcagagcaacaacaaatacgccgccagctcctacctgagcctgacacctgagcagtggaagtcccacagatcctacagctgccaagtgacccacgaaggcagcaccgtggaaaagacagtggcccctacagagtgcagcggatcccagagcttcggcctgctggaccccaagctgtgctacctgctggatggcatcctgttcatctacggcgtgatcctgaccgccctgttcctgagagtgaagttcagcagaagcgccgacgcccctgcctaccagcagggacagaaccaactgtacaacgagctgaacctgggcagacgggaagagtacgacgtgctggacaagcggagaggcagggaccctgagatgggcggaaagccccagcggagaaagaacccccaggaaggactgtataacgaactccagaaagacaagatggccgaagcctacagcgagatcggcatgaagggcgagcggagaagaggcaagggccacgatggcctgtaccagggcctgagcaccgccaccaaggacacctatgacgccctgcacatgcaggccctgcctccaagaagggccaagcgatctggatctggagcaacaaacttctcactactcaaacaagcaggtgacgtggaggagaatcccgggcctactagtatggactggatttggcgcatccttttccttgtcggcgctgctaccggcgcgcattccttcgaacaagttcagcttcaacagcctggcgctgagctggtcaaacctggcgcttctgtgaagatgagctgcaaagccagcggctacgccttcagcagctactggatcaactggatgaagcagaaacccggccagggactcgaatggatcggccaaatctatcccggcgacggcgacaccaactacaacggcaagttcaagggcagagccacactgaccgccgatacctctagcagcacagcctacatgcagctgagcagcctgaccagcgaagatagcgccgtgtacttctgtgcccggtccatcacaacagtcgtgggctgcgctatggactattggggccagggaacaagcgtgaccgtgtctagtgcctctacaaagggaccctccgtgtttcctctggctcccagcagcaagtctacaagcggaggaacagccgctctgggctgcctggtcaaggattactttcccgagcctgtgaccgtgtcctggaatagcggagcactgacaagcggcgtgcacacctttccagccgtgctgcaaagcagcggcctgtactctctgagcagcgtggtcacagtgcctagctctagcctgggcacccagacctacatctgcaatgtgaaccacaagcctagcaacaccaaggtggacaagagagtggaacccaagagctgtggtacccagagttttgggttgttggaccctaaattgtgctatctgttggacggaatcctgttcatttacggagtgatcctgaccgcattgttcctgcgggttaagttttccagatccgcagacgcacccgcttaccaacaagggcagaaccaactctacaatgaacttaatttggggcggagggaagagtacgacgttctggacaaaaggaggggacgagatcccgagatgggcggaaagcctcagcgaaggaagaatccgcaagaggggctttataacgaactccagaaagataaaatggcagaagcctatagtgagattgggatgaagggagaaaggaggaggggtaaaggtcacgatgggttgtaccaaggattgagcacagccactaaagatacctatgatgcgctccacatgcaggccctgccgccaagacgcgccaagagaagcggatctggcgtgaagcagaccctgaatttcgacctgctgaagctggctggcgacgtggaatccaacccaggcccttctagaggccatatgaccgagtacaagcccacggtgcgcctcgccacccgcgacgacgtccccagggccgtacgcaccctcgccgccgcgttcgccgactaccccgccacgcgccacaccgtcgatccggaccgccacatcgagcgggtcaccgagctgcaagaactcttcctcacgcgcgtcgggctcgacatcggcaaggtgtgggtcgcggacgacggcgccgcggtggcggtctggaccacgccggagagcgtcgaagcgggggcggtgttcgccgagatcggcccgcgcatggccgagttgagcggttcccggctggccgcgcagcaacagatggaaggcctcctggcgccgcaccggcccaaggagcccgcgtggttcctggccaccgtcggcgtctcgcccgaccaccagggcaagggtctgggcagcgccgtcgtgctccccggagtggaggcggccgagcgcgccggggtgcccgccttcctggagacctccgcgccccgcaacctccccttctacgagcggctcggcttcaccgtcaccgccgacgtcgaggtgcccgaaggaccgcgcacctggtgcatgacccgcaagcccggtgcctga

SEQ ID NO: 5242 - DNA, 2877 bp, Artificial Sequence
  Synthetic Polynucloetide
atggccttaccagtgaccgccttgctcctgccgctggccttgctgctccacgccgccaggccggaagttcagctgcttgagtctggcggaggactggttcaacctggcggaagcctgagactgtcttgtgccgccagcggcttcatcttcagcagctacgccatgagctgggtccgacaggctcctggaaagggccaagaatgggtttccggcgttagcggcacaggcgtgaacacctactacgccgatagcgtgaagggcagattcaccatcagccgggacaacagcaagaacaccctgtacctccagatgaacagcctgagagccgaggacaccgccgtgtactattgtgcctctggcaaaggctgggacagcggctcttggtacgaggactatagaggccagggcaccctggtcacagtttcttcaggtaccggcggaggcggatctggcggcggaggtagcggtggcggaggatctgaattcgacatccagatgacacagagccctagcagcctgtctgccagcgtgggagacagagtgaccatcacatgcaaggccagcgaccacatcaacaactggctggcctggtatcagcagaagcctggacaggcccctaagctgctgatctacggcgctaccacactggaaacaggcgtgcccagcagattttctggcagcggctctggcaccgactacaccctgacaatatccagcctccagcctgaggacttcgccacctactactgtcagcagagctggaacaccccttggacattcggccagggcaccaagctggaaatcaagagactcgaggacctgaagaacgtgttcccacctgaggtggccgtgttcgagcctagcgaggccgagatcagccacacccagaaagccaccctcgtgtgcctggctaccggcttctaccccgaccatgtggaactgtcttggtgggtcaacggcaaagaggtgcacagcggcgtgtctaccgacccccagccactgaaagaacagcccgccctgaacgacagccggtactgcctgagcagcagactgagagtgtccgccaccttctggcagaacccccggaaccacttcagatgccaggtgcagttctacggcctgagcgagaacgacgagtggacccaggacagagccaagcccgtgacccagatcgtgtctgccgaagcctggggcagagccgattgcggatcccagagcttcggcctgctggaccccaagctgtgctacctgctggatggcatcctgttcatctacggcgtgatcctgaccgccctgttcctgagagtgaagttcagcagaagcgccgacgcccctgcctaccagcagggacagaaccaactgtacaacgagctgaacctgggcagacgggaagagtacgacgtgctggacaagcggagaggcagggaccctgagatgggcggaaagccccagcggagaaagaacccccaggaaggactgtataacgaactccagaaagacaagatggccgaagcctacagcgagatcggcatgaagggcgagcggagaagaggcaagggccacgatggcctgtaccagggcctgagcaccgccaccaaggacacctatgacgccctgcacatgcaggccctgcctccaagaagggccaagcgatctggatctggagcaacaaacttctcactactcaaacaagcaggtgacgtggaggagaatcccgggcctactagtatggactggatttggcgcatccttttccttgtcggcgctgctaccggcgcgcattccttcgaacaagttcagcttcaacagcctggcgctgagctggtcaaacctggcgcttctgtgaagatgagctgcaaagccagcggctacgccttcagcagctactggatcaactggatgaagcagaaacccggccagggactcgaatggatcggccaaatctatcccggcgacggcgacaccaactacaacggcaagttcaagggcagagccacactgaccgccgatacctctagcagcacagcctacatgcagctgagcagcctgaccagcgaagatagcgccgtgtacttctgtgcccggtccatcacaacagtcgtgggctgcgctatggactattggggccagggaacaagcgtgaccgtgtctagtacgcgtatccagaaccctgatcctgccgtgtaccagctgcgggatagcaagagcagcgacaagagcgtgtgtctgttcaccgacttcgacagccagaccaacgtgtcccagagcaaggactccgacgtgtacatcaccgataagaccgtgctggacatgcggagcatggacttcaagagcaactccgccgtggcctggtccaacaagtccgatttcgcctgcgccaacgccttcaacaacagcattatccccgaggacacattcttcccaagccccgagagcagctgcggtacccagagttttgggttgttggaccctaaattgtgctatctgttggacggaatcctgttcatttacggagtgatcctgaccgcattgttcctgcgggttaagttttccagatccgcagacgcacccgcttaccaacaagggcagaaccaactctacaatgaacttaatttggggcggagggaagagtacgacgttctggacaaaaggaggggacgagatcccgagatgggcggaaagcctcagcgaaggaagaatccgcaagaggggctttataacgaactccagaaagataaaatggcagaagcctatagtgagattgggatgaagggagaaaggaggaggggtaaaggtcacgatgggttgtaccaaggattgagcacagccactaaagatacctatgatgcgctccacatgcaggccctgccgccaaga

SEQ ID NO: 5243 - DNA, 2877 bp, Artificial Sequence
  Synthetic Polynucloetide
atggccttaccagtgaccgccttgctcctgccgctggccttgctgctccacgccgccaggccggaagttcagctgcttgagtctggcggaggactggttcaacctggcggaagcctgagactgtcttgtgccgccagcggcttcatcttcagcagctacgccatgagctgggtccgacaggctcctggaaagggccaagaatgggtttccggcgttagcggcacaggcgtgaacacctactacgccgatagcgtgaagggcagattcaccatcagccgggacaacagcaagaacaccctgtacctccagatgaacagcctgagagccgaggacaccgccgtgtactattgtgcctctggcaaaggctgggacagcggctcttggtacgaggactatagaggccagggcaccctggtcacagtttcttcaggtaccggcggaggcggatctggcggcggaggtagcggtggcggaggatctgaattcgacatccagatgacacagagccctagcagcctgtctgccagcgtgggagacagagtgaccatcacatgcaaggccagcgaccacatcaacaactggctggcctggtatcagcagaagcctggacaggcccctaagctgctgatctacggcgctaccacactggaaacaggcgtgcccagcagattttctggcagcggctctggcaccgactacaccctgacaatatccagcctccagcctgaggacttcgccacctactactgtcagcagagctggaacaccccttggacattcggccagggcaccaagctggaaatcaagagactcgaggacctgaagaacgtgttcccacctgaggtggccgtgttcgagcctagcaaggccgagatcgcccacacccagaaagccaccctcgtgtgcctggctaccggcttctaccccgaccatgtggaactgtcttggtgggtcaacggcaaagaggtgcacagcggcgtgtgtaccgacccccagccactgaaagaacagcccgccctgaacgacagccggtactgcctgagcagcagactgagagtgtccgccaccttctggcagaacccccggaaccacttcagatgccaggtgcagttctacggcctgagcgagaacgacgagtggacccaggacagagccaagcccgtgacccagatcgtgtctgccgaagcctggggcagagccgattgcggatcccagagcttcggcctgctggaccccaagctgtgctacctgctggatggcatcctgttcatctacggcgtgatcctgaccgccctgttcctgagagtgaagttcagcagaagcgccgacgcccctgcctaccagcagggacagaaccaactgtacaacgagctgaacctgggcagacgggaagagtacgacgtgctggacaagcggagaggcagggaccctgagatgggcggaaagccccagcggagaaagaacccccaggaaggactgtataacgaactccagaaagacaagatggccgaagcctacagcgagatcggcatgaagggcgagcggagaagaggcaagggccacgatggcctgtaccagggcctgagcaccgccaccaaggacacctatgacgccctgcacatgcaggccctgcctccaagaagggccaagcgatctggatctggagcaacaaacttctcactactcaaacaagcaggtgacgtggaggagaatcccgggcctactagtatggactggatttggcgcatccttttccttgtcggcgctgctaccggcgcgcattccttcgaacaagttcagcttcaacagcctggcgctgagctggtcaaacctggcgcttctgtgaagatgagctgcaaagccagcggctacgccttcagcagctactggatcaactggatgaagcagaaacccggccagggactcgaatggatcggccaaatctatcccggcgacggcgacaccaactacaacggcaagttcaagggcagagccacactgaccgccgatacctctagcagcacagcctacatgcagctgagcagcctgaccagcgaagatagcgccgtgtacttctgtgcccggtccatcacaacagtcgtgggctgcgctatggactattggggccagggaacaagcgtgaccgtgtctagtacgcgtatccagaaccctgatcctgccgtgtaccagctgcgggatagcaagagcagcgacaagagcgtgtgtctgttcaccgacttcgacagccagaccaacgtgtcccagagcaaggactccgacgtgtacatcaccgataagtgcgtgctggacatgcggagcatggacttcaagagcaactccgccgtggcctggtccaacaagtccgatttcgcctgcgccaacgccttcaacaacagcattatccccgaggacacattcttcccaagcagcgacgtgccctgcggtacccagagttttgggttgttggaccctaaattgtgctatctgttggacggaatcctgttcatttacggagtgatcctgaccgcattgttcctgcgggttaagttttccagatccgcagacgcacccgcttaccaacaagggcagaaccaactctacaatgaacttaatttggggcggagggaagagtacgacgttctggacaaaaggaggggacgagatcccgagatgggcggaaagcctcagcgaaggaagaatccgcaagaggggctttataacgaactccagaaagataaaatggcagaagcctatagtgagattgggatgaagggagaaaggaggaggggtaaaggtcacgatgggttgtaccaaggattgagcacagccactaaagatacctatgatgcgctccacatgcaggccctgccgccaaga

SEQ ID NO: 5244 - DNA, 3090 bp, Artificial Sequence
  Synthetic Polynucloetide
atggccttaccagtgaccgccttgctcctgccgctggccttgctgctccacgccgccaggccggaagttcagctgcttgagtctggcggaggactggttcaacctggcggaagcctgagactgtcttgtgccgccagcggcttcatcttcagcagctacgccatgagctgggtccgacaggctcctggaaagggccaagaatgggtttccggcgttagcggcacaggcgtgaacacctactacgccgatagcgtgaagggcagattcaccatcagccgggacaacagcaagaacaccctgtacctccagatgaacagcctgagagccgaggacaccgccgtgtactattgtgcctctggcaaaggctgggacagcggctcttggtacgaggactatagaggccagggcaccctggtcacagtttcttcaggtaccggcggaggcggatctggcggcggaggtagcggtggcggaggatctgaattcgacatccagatgacacagagccctagcagcctgtctgccagcgtgggagacagagtgaccatcacatgcaaggccagcgaccacatcaacaactggctggcctggtatcagcagaagcctggacaggcccctaagctgctgatctacggcgctaccacactggaaacaggcgtgcccagcagattttctggcagcggctctggcaccgactacaccctgacaatatccagcctccagcctgaggacttcgccacctactactgtcagcagagctggaacaccccttggacattcggccagggcaccaagctggaaatcaagagactcgaggggaaaccaattcccaaccctcttctgggactggattcaaccggcagcggcgaggacctgaagaacgtgttcccacctgaggtggccgtgttcgagcctagcgaggccgagatcagccacacccagaaagccaccctcgtgtgcctggctaccggcttctaccccgaccatgtggaactgtcttggtgggtcaacggcaaagaggtgcacagcggcgtgtctaccgacccccagccactgaaagaacagcccgccctgaacgacagccggtactgcctgagcagcagactgagagtgtccgccaccttctggcagaacccccggaaccacttcagatgccaggtgcagttctacggcctgagcgagaacgacgagtggacccaggacagagccaagcccgtgacccagatcgtgtctgccgaagcctggggcagagccgattgcggatcccagagcttcggcctgctggaccccaagctgtgctacctgctggatggcatcctgttcatctacggcgtgatcctgaccgccctgttcctgagagtgaagttcagcagaagcgccgacgcccctgcctaccagcagggacagaaccaactgtacaacgagctgaacctgggcagacgggaagagtacgacgtgctggacaagcggagaggcagggaccctgagatgggcggaaagccccagcggagaaagaacccccaggaaggactgtataacgaactccagaaagacaagatggccgaagcctacagcgagatcggcatgaagggcgagcggagaagaggcaagggccacgatggcctgtaccagggcctgagcaccgccaccaaggacacctatgacgccctgcacatgcaggccctgcctccaagaagggccaagcgatctggatctggagcaacaaacttctcactactcaaacaagcaggtgacgtggaggagaatcccgggcctactagtatggactggatttggcgcatccttttccttgtcggcgctgctaccggcgcgcattccttcgaacaagttcagcttcaacagcctggcgctgagctggtcaaacctggcgcttctgtgaagatgagctgcaaagccagcggctacgccttcagcagctactggatcaactggatgaagcagaaacccggccagggactcgaatggatcggccaaatctatcccggcgacggcgacaccaactacaacggcaagttcaagggcagagccacactgaccgccgatacctctagcagcacagcctacatgcagctgagcagcctgaccagcgaagatagcgccgtgtacttctgtgcccggtccatcacaacagtcgtgggctgcgctatggactattggggccagggaacaagcgtgaccgtgtctagtacgcgtgagcagaaactgatctcggaagaggatgggagcggcatccagaaccctgatcctgccgtgtaccagctgcgggatagcaagagcagcgacaagagcgtgtgtctgttcaccgacttcgacagccagaccaacgtgtcccagagcaaggactccgacgtgtacatcaccgataagaccgtgctggacatgcggagcatggacttcaagagcaactccgccgtggcctggtccaacaagtccgatttcgcctgcgccaacgccttcaacaacagcattatccccgaggacacattcttcccaagccccgagagcagctgcggtacccagagttttgggttgttggaccctaaattgtgctatctgttggacggaatcctgttcatttacggagtgatcctgaccgcattgttcctgaggagcaagcggtcacggctgctccacagcgattacatgaatatgacaccacgaagaccgggtcctactcgcaaacactaccaaccctacgcacctccccgcgactttgcagcgtaccgatctcgggttaagttttccagatccgcagacgcacccgcttaccaacaagggcagaaccaactctacaatgaacttaatttggggcggagggaagagtacgacgttctggacaaaaggaggggacgagatcccgagatgggcggaaagcctcagcgaaggaagaatccgcaagaggggctttataacgaactccagaaagataaaatggcagaagcctatagtgagattgggatgaagggagaaaggaggaggggtaaaggtcacgatgggttgtaccaaggattgagcacagccactaaagatacctatgatgcgctccacatgcaggccctgccgccaaga

SEQ ID NO: 5245 - DNA, 3213 bp, Artificial Sequence
  Synthetic Polynucloetide
atggccttaccagtgaccgccttgctcctgccgctggccttgctgctccacgccgccaggccggaagttcagctgcttgagtctggcggaggactggttcaacctggcggaagcctgagactgtcttgtgccgccagcggcttcatcttcagcagctacgccatgagctgggtccgacaggctcctggaaagggccaagaatgggtttccggcgttagcggcacaggcgtgaacacctactacgccgatagcgtgaagggcagattcaccatcagccgggacaacagcaagaacaccctgtacctccagatgaacagcctgagagccgaggacaccgccgtgtactattgtgcctctggcaaaggctgggacagcggctcttggtacgaggactatagaggccagggcaccctggtcacagtttcttcaggtaccggcggaggcggatctggcggcggaggtagcggtggcggaggatctgaattcgacatccagatgacacagagccctagcagcctgtctgccagcgtgggagacagagtgaccatcacatgcaaggccagcgaccacatcaacaactggctggcctggtatcagcagaagcctggacaggcccctaagctgctgatctacggcgctaccacactggaaacaggcgtgcccagcagattttctggcagcggctctggcaccgactacaccctgacaatatccagcctccagcctgaggacttcgccacctactactgtcagcagagctggaacaccccttggacattcggccagggcaccaagctggaaatcaagagactcgaggggaaaccaattcccaaccctcttctgggactggattcaaccggcagcggcgaggacctgaagaacgtgttcccacctgaggtggccgtgttcgagcctagcgaggccgagatcagccacacccagaaagccaccctcgtgtgcctggctaccggcttctaccccgaccatgtggaactgtcttggtgggtcaacggcaaagaggtgcacagcggcgtgtctaccgacccccagccactgaaagaacagcccgccctgaacgacagccggtactgcctgagcagcagactgagagtgtccgccaccttctggcagaacccccggaaccacttcagatgccaggtgcagttctacggcctgagcgagaacgacgagtggacccaggacagagccaagcccgtgacccagatcgtgtctgccgaagcctggggcagagccgattgcggatcccagagcttcggcctgctggaccccaagctgtgctacctgctggatggcatcctgttcatctacggcgtgatcctgaccgccctgttcctgaggagtaagaggagcaggctcctgcacagtgactacatgaacatgactccacgccgccccggacccacccgcaagcattaccagccctatgccccaccacgcgacttcgcagcctatcgctccagagtgaagttcagcagaagcgccgacgcccctgcctaccagcagggacagaaccaactgtacaacgagctgaacctgggcagacgggaagagtacgacgtgctggacaagcggagaggcagggaccctgagatgggcggaaagccccagcggagaaagaacccccaggaaggactgtataacgaactccagaaagacaagatggccgaagcctacagcgagatcggcatgaagggcgagcggagaagaggcaagggccacgatggcctgtaccagggcctgagcaccgccaccaaggacacctatgacgccctgcacatgcaggccctgcctccaagaagggccaagcgatctggatctggagcaacaaacttctcactactcaaacaagcaggtgacgtggaggagaatcccgggcctactagtatggactggatttggcgcatccttttccttgtcggcgctgctaccggcgcgcattccttcgaacaagttcagcttcaacagcctggcgctgagctggtcaaacctggcgcttctgtgaagatgagctgcaaagccagcggctacgccttcagcagctactggatcaactggatgaagcagaaacccggccagggactcgaatggatcggccaaatctatcccggcgacggcgacaccaactacaacggcaagttcaagggcagagccacactgaccgccgatacctctagcagcacagcctacatgcagctgagcagcctgaccagcgaagatagcgccgtgtacttctgtgcccggtccatcacaacagtcgtgggctgcgctatggactattggggccagggaacaagcgtgaccgtgtctagtacgcgtgagcagaaactgatctcggaagaggatgggagcggcatccagaaccctgatcctgccgtgtaccagctgcgggatagcaagagcagcgacaagagcgtgtgtctgttcaccgacttcgacagccagaccaacgtgtcccagagcaaggactccgacgtgtacatcaccgataagaccgtgctggacatgcggagcatggacttcaagagcaactccgccgtggcctggtccaacaagtccgatttcgcctgcgccaacgccttcaacaacagcattatccccgaggacacattcttcccaagccccgagagcagctgcggtacccagagttttgggttgttggaccctaaattgtgctatctgttggacggaatcctgttcatttacggagtgatcctgaccgcattgttcctgaggagcaagcggtcacggctgctccacagcgattacatgaatatgacaccacgaagaccgggtcctactcgcaaacactaccaaccctacgcacctccccgcgactttgcagcgtaccgatctcgggttaagttttccagatccgcagacgcacccgcttaccaacaagggcagaaccaactctacaatgaacttaatttggggcggagggaagagtacgacgttctggacaaaaggaggggacgagatcccgagatgggcggaaagcctcagcgaaggaagaatccgcaagaggggctttataacgaactccagaaagataaaatggcagaagcctatagtgagattgggatgaagggagaaaggaggaggggtaaaggtcacgatgggttgtaccaaggattgagcacagccactaaagatacctatgatgcgctccacatgcaggccctgccgccaaga

SEQ ID NO: 5246 - DNA, 3096 bp, Artificial Sequence
  Synthetic Polynucloetide
atggccttaccagtgaccgccttgctcctgccgctggccttgctgctccacgccgccaggccggaagttcagctgcttgagtctggcggaggactggttcaacctggcggaagcctgagactgtcttgtgccgccagcggcttcatcttcagcagctacgccatgagctgggtccgacaggctcctggaaagggccaagaatgggtttccggcgttagcggcacaggcgtgaacacctactacgccgatagcgtgaagggcagattcaccatcagccgggacaacagcaagaacaccctgtacctccagatgaacagcctgagagccgaggacaccgccgtgtactattgtgcctctggcaaaggctgggacagcggctcttggtacgaggactatagaggccagggcaccctggtcacagtttcttcaggtaccggcggaggcggatctggcggcggaggtagcggtggcggaggatctgaattcgacatccagatgacacagagccctagcagcctgtctgccagcgtgggagacagagtgaccatcacatgcaaggccagcgaccacatcaacaactggctggcctggtatcagcagaagcctggacaggcccctaagctgctgatctacggcgctaccacactggaaacaggcgtgcccagcagattttctggcagcggctctggcaccgactacaccctgacaatatccagcctccagcctgaggacttcgccacctactactgtcagcagagctggaacaccccttggacattcggccagggcaccaagctggaaatcaagagactcgaggggaaaccaattcccaaccctcttctgggactggattcaaccggcagcggcgaggacctgaagaacgtgttcccacctgaggtggccgtgttcgagcctagcgaggccgagatcagccacacccagaaagccaccctcgtgtgcctggctaccggcttctaccccgaccatgtggaactgtcttggtgggtcaacggcaaagaggtgcacagcggcgtgtctaccgacccccagccactgaaagaacagcccgccctgaacgacagccggtactgcctgagcagcagactgagagtgtccgccaccttctggcagaacccccggaaccacttcagatgccaggtgcagttctacggcctgagcgagaacgacgagtggacccaggacagagccaagcccgtgacccagatcgtgtctgccgaagcctggggcagagccgattgcggatcccagagcttcggcctgctggaccccaagctgtgctacctgctggatggcatcctgttcatctacggcgtgatcctgaccgccctgttcctgagagtgaagttcagcagaagcgccgacgcccctgcctaccagcagggacagaaccaactgtacaacgagctgaacctgggcagacgggaagagtacgacgtgctggacaagcggagaggcagggaccctgagatgggcggaaagccccagcggagaaagaacccccaggaaggactgtataacgaactccagaaagacaagatggccgaagcctacagcgagatcggcatgaagggcgagcggagaagaggcaagggccacgatggcctgtaccagggcctgagcaccgccaccaaggacacctatgacgccctgcacatgcaggccctgcctccaagaagggccaagcgatctggatctggagcaacaaacttctcactactcaaacaagcaggtgacgtggaggagaatcccgggcctactagtatggactggatttggcgcatccttttccttgtcggcgctgctaccggcgcgcattccttcgaacaagttcagcttcaacagcctggcgctgagctggtcaaacctggcgcttctgtgaagatgagctgcaaagccagcggctacgccttcagcagctactggatcaactggatgaagcagaaacccggccagggactcgaatggatcggccaaatctatcccggcgacggcgacaccaactacaacggcaagttcaagggcagagccacactgaccgccgatacctctagcagcacagcctacatgcagctgagcagcctgaccagcgaagatagcgccgtgtacttctgtgcccggtccatcacaacagtcgtgggctgcgctatggactattggggccagggaacaagcgtgaccgtgtctagtacgcgtgagcagaaactgatctcggaagaggatctggggagcggcatccagaaccctgatcctgccgtgtaccagctgcgggatagcaagagcagcgacaagagcgtgtgtctgttcaccgacttcgacagccagaccaacgtgtcccagagcaaggactccgacgtgtacatcaccgataagaccgtgctggacatgcggagcatggacttcaagagcaactccgccgtggcctggtccaacaagtccgatttcgcctgcgccaacgccttcaacaacagcattatccccgaggacacattcttcccaagccccgagagcagctgcggtacccagagttttgggttgttggaccctaaattgtgctatctgttggacggaatcctgttcatttacggagtgatcctgaccgcattgttcctgaagagaggccggaagaagctgctgtacatcttcaagcagcctttcatgcggcccgtgcagaccacccaggaagaggacggctgctcctgccggttccccgaggaagaagaaggcggctgcgagctgcgggttaagttttccagatccgcagacgcacccgcttaccaacaagggcagaaccaactctacaatgaacttaatttggggcggagggaagagtacgacgttctggacaaaaggaggggacgagatcccgagatgggcggaaagcctcagcgaaggaagaatccgcaagaggggctttataacgaactccagaaagataaaatggcagaagcctatagtgagattgggatgaagggagaaaggaggaggggtaaaggtcacgatgggttgtaccaaggattgagcacagccactaaagatacctatgatgcgctccacatgcaggccctgccgccaaga

SEQ ID NO: 5247 - DNA, 3222 bp, Artificial Sequence
  Synthetic Polynucloetide
atggccttaccagtgaccgccttgctcctgccgctggccttgctgctccacgccgccaggccggaagttcagctgcttgagtctggcggaggactggttcaacctggcggaagcctgagactgtcttgtgccgccagcggcttcatcttcagcagctacgccatgagctgggtccgacaggctcctggaaagggccaagaatgggtttccggcgttagcggcacaggcgtgaacacctactacgccgatagcgtgaagggcagattcaccatcagccgggacaacagcaagaacaccctgtacctccagatgaacagcctgagagccgaggacaccgccgtgtactattgtgcctctggcaaaggctgggacagcggctcttggtacgaggactatagaggccagggcaccctggtcacagtttcttcaggtaccggcggaggcggatctggcggcggaggtagcggtggcggaggatctgaattcgacatccagatgacacagagccctagcagcctgtctgccagcgtgggagacagagtgaccatcacatgcaaggccagcgaccacatcaacaactggctggcctggtatcagcagaagcctggacaggcccctaagctgctgatctacggcgctaccacactggaaacaggcgtgcccagcagattttctggcagcggctctggcaccgactacaccctgacaatatccagcctccagcctgaggacttcgccacctactactgtcagcagagctggaacaccccttggacattcggccagggcaccaagctggaaatcaagagactcgaggggaaaccaattcccaaccctcttctgggactggattcaaccggcagcggcgaggacctgaagaacgtgttcccacctgaggtggccgtgttcgagcctagcgaggccgagatcagccacacccagaaagccaccctcgtgtgcctggctaccggcttctaccccgaccatgtggaactgtcttggtgggtcaacggcaaagaggtgcacagcggcgtgtctaccgacccccagccactgaaagaacagcccgccctgaacgacagccggtactgcctgagcagcagactgagagtgtccgccaccttctggcagaacccccggaaccacttcagatgccaggtgcagttctacggcctgagcgagaacgacgagtggacccaggacagagccaagcccgtgacccagatcgtgtctgccgaagcctggggcagagccgattgcggatcccagagcttcggcctgctggaccccaagctgtgctacctgctggatggcatcctgttcatctacggcgtgatcctgaccgccctgttcctgaaacggggcagaaagaaactcctgtatatattcaaacaaccatttatgagaccagtacaaactactcaagaggaagatggctgtagctgccgatttccagaagaagaagaaggaggatgtgaactgagagtgaagttcagcagaagcgccgacgcccctgcctaccagcagggacagaaccaactgtacaacgagctgaacctgggcagacgggaagagtacgacgtgctggacaagcggagaggcagggaccctgagatgggcggaaagccccagcggagaaagaacccccaggaaggactgtataacgaactccagaaagacaagatggccgaagcctacagcgagatcggcatgaagggcgagcggagaagaggcaagggccacgatggcctgtaccagggcctgagcaccgccaccaaggacacctatgacgccctgcacatgcaggccctgcctccaagaagggccaagcgatctggatctggagcaacaaacttctcactactcaaacaagcaggtgacgtggaggagaatcccgggcctactagtatggactggatttggcgcatccttttccttgtcggcgctgctaccggcgcgcattccttcgaacaagttcagcttcaacagcctggcgctgagctggtcaaacctggcgcttctgtgaagatgagctgcaaagccagcggctacgccttcagcagctactggatcaactggatgaagcagaaacccggccagggactcgaatggatcggccaaatctatcccggcgacggcgacaccaactacaacggcaagttcaagggcagagccacactgaccgccgatacctctagcagcacagcctacatgcagctgagcagcctgaccagcgaagatagcgccgtgtacttctgtgcccggtccatcacaacagtcgtgggctgcgctatggactattggggccagggaacaagcgtgaccgtgtctagtacgcgtgagcagaaactgatctcggaagaggatctggggagcggcatccagaaccctgatcctgccgtgtaccagctgcgggatagcaagagcagcgacaagagcgtgtgtctgttcaccgacttcgacagccagaccaacgtgtcccagagcaaggactccgacgtgtacatcaccgataagaccgtgctggacatgcggagcatggacttcaagagcaactccgccgtggcctggtccaacaagtccgatttcgcctgcgccaacgccttcaacaacagcattatccccgaggacacattcttcccaagccccgagagcagctgcggtacccagagttttgggttgttggaccctaaattgtgctatctgttggacggaatcctgttcatttacggagtgatcctgaccgcattgttcctgaagagaggccggaagaagctgctgtacatcttcaagcagcctttcatgcggcccgtgcagaccacccaggaagaggacggctgctcctgccggttccccgaggaagaagaaggcggctgcgagctgcgggttaagttttccagatccgcagacgcacccgcttaccaacaagggcagaaccaactctacaatgaacttaatttggggcggagggaagagtacgacgttctggacaaaaggaggggacgagatcccgagatgggcggaaagcctcagcgaaggaagaatccgcaagaggggctttataacgaactccagaaagataaaatggcagaagcctatagtgagattgggatgaagggagaaaggaggaggggtaaaggtcacgatgggttgtaccaaggattgagcacagccactaaagatacctatgatgcgctccacatgcaggccctgccgccaaga

SEQ ID NO: 5248 - DNA, 2895 bp, Artificial Sequence
  Synthetic Polynucloetide
atggccttaccagtgaccgccttgctcctgccgctggccttgctgctccacgccgccaggccggaagttcagctgcttgagtctggcggaggactggttcaacctggcggaagcctgagactgtcttgtgccgccagcggcttcatcttcagcagctacgccatgagctgggtccgacaggctcctggaaagggccaagaatgggtttccggcgttagcggcacaggcgtgaacacctactacgccgatagcgtgaagggcagattcaccatcagccgggacaacagcaagaacaccctgtacctccagatgaacagcctgagagccgaggacaccgccgtgtactattgtgcctctggcaaaggctgggacagcggctcttggtacgaggactatagaggccagggcaccctggtcacagtttcttcaggtaccggcggaggcggatctggcggcggaggtagcggtggcggaggatctgaattcgacatccagatgacacagagccctagcagcctgtctgccagcgtgggagacagagtgaccatcacatgcaaggccagcgaccacatcaacaactggctggcctggtatcagcagaagcctggacaggcccctaagctgctgatctacggcgctaccacactggaaacaggcgtgcccagcagattttctggcagcggctctggcaccgactacaccctgacaatatccagcctccagcctgaggacttcgccacctactactgtcagcagagctggaacaccccttggacattcggccagggcaccaagctggaaatcaagagactcgagcagagcttcggcctgctggaccccaagctgtgctacctgctggatggcatcctgttcatctacggcgtgatcctgaccgccctgttcctgagagtgaagttcagcagaagcgccgacgcccctgcctaccagcagggacagaaccaactgtacaacgagctgaacctgggcagacgggaagagtacgacgtgctggacaagcggagaggcagggaccctgagatgggcggaaagccccagcggagaaagaacccccaggaaggactgtataacgaactccagaaagacaagatggccgaagcctacagcgagatcggcatgaagggcgagcggagaagaggcaagggccacgatggcctgtaccagggcctgagcaccgccaccaaggacacctatgacgccctgcacatgcaggccctgcctccaagaagggccaagcgatctggatctggagcaacaaacttctcactactcaaacaagcaggtgacgtggaggagaatcccgggcctactagtatggactggatttggcgcatccttttccttgtcggcgctgctaccggcgcgcattccttcgaacaagttcagcttcaacagcctggcgctgagctggtcaaacctggcgcttctgtgaagatgagctgcaaagccagcggctacgccttcagcagctactggatcaactggatgaagcagaaacccggccagggactcgaatggatcggccaaatctatcccggcgacggcgacaccaactacaacggcaagttcaagggcagagccacactgaccgccgatacctctagcagcacagcctacatgcagctgagcagcctgaccagcgaagatagcgccgtgtacttctgtgcccggtccatcacaacagtcgtgggctgcgctatggactattggggccagggaacaagcgtgaccgtgtctagtacgcgtcagagttttgggttgttggaccctaaattgtgctatctgttggacggaatcctgttcatttacggagtgatcctgaccgcattgttcctgcgggttaagttttccagatccgcagacgcacccgcttaccaacaagggcagaaccaactctacaatgaacttaatttggggcggagggaagagtacgacgttctggacaaaaggaggggacgagatcccgagatgggcggaaagcctcagcgaaggaagaatccgcaagaggggctttataacgaactccagaaagataaaatggcagaagcctatagtgagattgggatgaagggagaaaggaggaggggtaaaggtcacgatgggttgtaccaaggattgagcacagccactaaagatacctatgatgcgctccacatgcaggccctgccgccaagacgcgccaagagaagcggatctggcgtgaagcagaccctgaatttcgacctgctgaagctggctggcgacgtggaatccaacccaggcccttctagaggccatatgaccgagtacaagcccacggtgcgcctcgccacccgcgacgacgtccccagggccgtacgcaccctcgccgccgcgttcgccgactaccccgccacgcgccacaccgtcgatccggaccgccacatcgagcgggtcaccgagctgcaagaactcttcctcacgcgcgtcgggctcgacatcggcaaggtgtgggtcgcggacgacggcgccgcggtggcggtctggaccacgccggagagcgtcgaagcgggggcggtgttcgccgagatcggcccgcgcatggccgagttgagcggttcccggctggccgcgcagcaacagatggaaggcctcctggcgccgcaccggcccaaggagcccgcgtggttcctggccaccgtcggcgtctcgcccgaccaccagggcaagggtctgggcagcgccgtcgtgctccccggagtggaggcggccgagcgcgccggggtgcccgccttcctggagacctccgcgccccgcaacctccccttctacgagcggctcggcttcaccgtcaccgccgacgtcgaggtgcccgaaggaccgcgcacctggtgcatgacccgcaagcccggtgcctga

SEQ ID NO: 5249 - DNA, 2367 bp, Artificial Sequence
  Synthetic Polynucloetide
atggccttaccagtgaccgccttgctcctgccgctggccttgctgctccacgccgccaggccggaagttcagctgcttgagtctggcggaggactggttcaacctggcggaagcctgagactgtcttgtgccgccagcggcttcatcttcagcagctacgccatgagctgggtccgacaggctcctggaaagggccaagaatgggtttccggcgttagcggcacaggcgtgaacacctactacgccgatagcgtgaagggcagattcaccatcagccgggacaacagcaagaacaccctgtacctccagatgaacagcctgagagccgaggacaccgccgtgtactattgtgcctctggcaaaggctgggacagcggctcttggtacgaggactatagaggccagggcaccctggtcacagtttcttcaggtaccggcggaggcggatctggcggcggaggtagcggtggcggaggatctgaattcgacatccagatgacacagagccctagcagcctgtctgccagcgtgggagacagagtgaccatcacatgcaaggccagcgaccacatcaacaactggctggcctggtatcagcagaagcctggacaggcccctaagctgctgatctacggcgctaccacactggaaacaggcgtgcccagcagattttctggcagcggctctggcaccgactacaccctgacaatatccagcctccagcctgaggacttcgccacctactactgtcagcagagctggaacaccccttggacattcggccagggcaccaagctggaaatcaagagactcgagggacagcctaaggccaatcctaccgtgacactgttccctccaagcagcgaagaactccaggccaacaaggccacacttgtgtgcctgatctccgacttctaccctggggctgtgacagtggcttggaaggccgatggatctcctgtgaaagccggcgtggaaaccaccaagccatccaagcagagcaacaacaaatacgccgccagctcctacctgagcctgacacctgagcagtggaagtcccacagatcctacagctgccaagtgacccacgaaggcagcaccgtggaaaagacagtggcccctacagagtgcagccccatcaagaccgatgtgattacaatggaccccaaggacaactgctccaaggacgccaacgataccctgctgctccagctgaccaacaccagcgcctactacatgtacttgttgctgctgctgaagtccgtggtgtacttcgccatcatcacatgctgcctgctgcggagaaccgccttctgctgcaacggcgagaagtctagggccaagcgatctggatctggagcaacaaacttctcactactcaaacaagcaggtgacgtggaggagaatcccgggcctactagtatggactggatttggcgcatccttttccttgtcggcgctgctaccggcgcgcattccttcgaacaagttcagcttcaacagcctggcgctgagctggtcaaacctggcgcttctgtgaagatgagctgcaaagccagcggctacgccttcagcagctactggatcaactggatgaagcagaaacccggccagggactcgaatggatcggccaaatctatcccggcgacggcgacaccaactacaacggcaagttcaagggcagagccacactgaccgccgatacctctagcagcacagcctacatgcagctgagcagcctgaccagcgaagatagcgccgtgtacttctgtgcccggtccatcacaacagtcgtgggctgcgctatggactattggggccagggaacaagcgtgaccgtgtctagtacgcgtgcctctacaaagggaccctccgtgtttcctctggctcccagcagcaagtctacaagcggaggaacagccgctctgggctgcctggtcaaggattactttcccgagcctgtgaccgtgtcctggaatagcggagcactgacaagcggcgtgcacacctttccagccgtgctgcaaagcagcggcctgtactctctgagcagcgtggtcacagtgcctagctctagcctgggcacccagacctacatctgcaatgtgaaccacaagcctagcaacaccaaggtggacaagagagtggaacccaagagctgtgaagtgaaaaccgactccaccgaccacgtgaagcccaaagagacagagaacaccaagcagcccagcaagagctgccacaagcccaaggccatcgtgcacaccgagaaagtgaacatgatgagcctgaccgtgctgggcctgcggatgctgttcgccaaaaccgtggccgtgaacttcctgctgaccgccaagctgttcttcctc

SEQ ID NO: 5250 - DNA, 2301 bp, Artificial Sequence
  Synthetic Polynucloetide
atggccttaccagtgaccgccttgctcctgccgctggccttgctgctccacgccgccaggccggaagttcagctgcttgagtctggcggaggactggttcaacctggcggaagcctgagactgtcttgtgccgccagcggcttcatcttcagcagctacgccatgagctgggtccgacaggctcctggaaagggccaagaatgggtttccggcgttagcggcacaggcgtgaacacctactacgccgatagcgtgaagggcagattcaccatcagccgggacaacagcaagaacaccctgtacctccagatgaacagcctgagagccgaggacaccgccgtgtactattgtgcctctggcaaaggctgggacagcggctcttggtacgaggactatagaggccagggcaccctggtcacagtttcttcaggtaccggcggaggcggatctggcggcggaggtagcggtggcggaggatctgaattcgacatccagatgacacagagccctagcagcctgtctgccagcgtgggagacagagtgaccatcacatgcaaggccagcgaccacatcaacaactggctggcctggtatcagcagaagcctggacaggcccctaagctgctgatctacggcgctaccacactggaaacaggcgtgcccagcagattttctggcagcggctctggcaccgactacaccctgacaatatccagcctccagcctgaggacttcgccacctactactgtcagcagagctggaacaccccttggacattcggccagggcaccaagctggaaatcaagagactcgagggacagcctaaggccaatcctaccgtgacactgttccctccaagcagcgaagaactccaggccaacaaggccacacttgtgtgcctgatctccgacttctaccctggggctgtgacagtggcttggaaggccgatggatctcctgtgaaagccggcgtggaaaccaccaagccatccaagcagagcaacaacaaatacgccgccagctcctacctgagcctgacacctgagcagtggaagtcccacagatcctacagctgccaagtgacccacgaaggcagcaccgtggaaaagacagtggcccctacagagtgcagcggcagagccgattgcggcatcaccagcgccagctaccaccagggcgtgctgagcgccaccatcctgtacgagatcctgctgggcaaggccaccctgtacgccgtgctggtgtctgccctggtgctgatggctatggtcaagcggaaggacagccggggaagggccaagcgatctggatctggagcaacaaacttctcactactcaaacaagcaggtgacgtggaggagaatcccgggcctactagtatggactggatttggcgcatccttttccttgtcggcgctgctaccggcgcgcattccttcgaacaagttcagcttcaacagcctggcgctgagctggtcaaacctggcgcttctgtgaagatgagctgcaaagccagcggctacgccttcagcagctactggatcaactggatgaagcagaaacccggccagggactcgaatggatcggccaaatctatcccggcgacggcgacaccaactacaacggcaagttcaagggcagagccacactgaccgccgatacctctagcagcacagcctacatgcagctgagcagcctgaccagcgaagatagcgccgtgtacttctgtgcccggtccatcacaacagtcgtgggctgcgctatggactattggggccagggaacaagcgtgaccgtgtctagtacgcgtgcctctacaaagggaccctccgtgtttcctctggctcccagcagcaagtctacaagcggaggaacagccgctctgggctgcctggtcaaggattactttcccgagcctgtgaccgtgtcctggaatagcggagcactgacaagcggcgtgcacacctttccagccgtgctgcaaagcagcggcctgtactctctgagcagcgtggtcacagtgcctagctctagcctgggcacccagacctacatctgcaatgtgaaccacaagcctagcaacaccaaggtggacaagagagtggaacccaagagctgtatccccgaggacacattcttcccaagcagcgacgtgccctgcgacgtgaagctggtggaaaagagcttcgagacagacaccaacctgaacttccagaacctgagcgtgatcggcttcagaatcctgctgctgaaagtggccggctttaacctgctgatgaccctgcggctgtggtccagc

SEQ ID NO: 5251 - DNA, 2301 bp, Artificial Sequence
  Synthetic Polynucloetide
atggccttaccagtgaccgccttgctcctgccgctggccttgctgctccacgccgccaggccggaagttcagctgcttgagtctggcggaggactggttcaacctggcggaagcctgagactgtcttgtgccgccagcggcttcatcttcagcagctacgccatgagctgggtccgacaggctcctggaaagggccaagaatgggtttccggcgttagcggcacaggcgtgaacacctactacgccgatagcgtgaagggcagattcaccatcagccgggacaacagcaagaacaccctgtacctccagatgaacagcctgagagccgaggacaccgccgtgtactattgtgcctctggcaaaggctgggacagcggctcttggtacgaggactatagaggccagggcaccctggtcacagtttcttcaggtaccggcggaggcggatctggcggcggaggtagcggtggcggaggatctgaattcgacatccagatgacacagagccctagcagcctgtctgccagcgtgggagacagagtgaccatcacatgcaaggccagcgaccacatcaacaactggctggcctggtatcagcagaagcctggacaggcccctaagctgctgatctacggcgctaccacactggaaacaggcgtgcccagcagattttctggcagcggctctggcaccgactacaccctgacaatatccagcctccagcctgaggacttcgccacctactactgtcagcagagctggaacaccccttggacattcggccagggcaccaagctggaaatcaagagactcgagggacagcctaaggccaatcctaccgtgacactgttccctccaagcagcgaagaactccaggccaacaaggccacacttgtgtgcctgatctccgacttctaccctggggctgtgacagtggcttggaaggccgatggatctcctgtgaaagccggcgtggaaaccaccaagccatccaagcagagcaacaacaaatacgccgccagctcctacctgagcctgacacctgagcagtggaagtcccacagatcctacagctgccaagtgacccacgaaggcagcaccgtggaaaagacagtggcccctacagagtgcagcggcagagccgattgcggctttaccagcgagagctaccagcagggcgtgctgagcgccaccatcctgtacgagatcctgctgggcaaggccaccctgtacgccgtgctggtgtctgccctggtgctgatggctatggtcaagcggaaggacagccggggaagggccaagcgatctggatctggagcaacaaacttctcactactcaaacaagcaggtgacgtggaggagaatcccgggcctactagtatggactggatttggcgcatccttttccttgtcggcgctgctaccggcgcgcattccttcgaacaagttcagcttcaacagcctggcgctgagctggtcaaacctggcgcttctgtgaagatgagctgcaaagccagcggctacgccttcagcagctactggatcaactggatgaagcagaaacccggccagggactcgaatggatcggccaaatctatcccggcgacggcgacaccaactacaacggcaagttcaagggcagagccacactgaccgccgatacctctagcagcacagcctacatgcagctgagcagcctgaccagcgaagatagcgccgtgtacttctgtgcccggtccatcacaacagtcgtgggctgcgctatggactattggggccagggaacaagcgtgaccgtgtctagtacgcgtgcctctacaaagggaccctccgtgtttcctctggctcccagcagcaagtctacaagcggaggaacagccgctctgggctgcctggtcaaggattactttcccgagcctgtgaccgtgtcctggaatagcggagcactgacaagcggcgtgcacacctttccagccgtgctgcaaagcagcggcctgtactctctgagcagcgtggtcacagtgcctagctctagcctgggcacccagacctacatctgcaatgtgaaccacaagcctagcaacaccaaggtggacaagagagtggaacccaagagctgtatccccgaggacacattcttcccaagccccgagagcagctgcgacgtgaagctggtggaaaagagcttcgagacagacaccaacctgaacttccagaacctgagcgtgatcggcttcagaatcctgctgctgaaagtggccggctttaacctgctgatgaccctgcggctgtggtccagc

SEQ ID NO: 5252 - DNA, 1779 bp, Artificial Sequence
  Synthetic Polynucloetide
atggccttaccagtgaccgccttgctcctgccgctggccttgctgctccacgccgccaggccggaagttcagctgcttgagtctggcggaggactggttcaacctggcggaagcctgagactgtcttgtgccgccagcggcttcatcttcagcagctacgccatgagctgggtccgacaggctcctggaaagggccaagaatgggtttccggcgttagcggcacaggcgtgaacacctactacgccgatagcgtgaagggcagattcaccatcagccgggacaacagcaagaacaccctgtacctccagatgaacagcctgagagccgaggacaccgccgtgtactattgtgcctctggcaaaggctgggacagcggctcttggtacgaggactatagaggccagggcaccctggtcacagtttcttcaggtaccggcggaggcggatctggcggcggaggtagcggtggcggaggatctgaattcgacatccagatgacacagagccctagcagcctgtctgccagcgtgggagacagagtgaccatcacatgcaaggccagcgaccacatcaacaactggctggcctggtatcagcagaagcctggacaggcccctaagctgctgatctacggcgctaccacactggaaacaggcgtgcccagcagattttctggcagcggctctggcaccgactacaccctgacaatatccagcctccagcctgaggacttcgccacctactactgtcagcagagctggaacaccccttggacattcggccagggcaccaagctggaaatcaagagaggcggaggcggaagtggaggcggaggatctggcggcggaggctctcaagttcagcttcaacagcctggcgctgagctggtcaaacctggcgcttctgtgaagatgagctgcaaagccagcggctacgccttcagcagctactggatcaactggatgaagcagaaacccggccagggactcgaatggatcggccaaatctatcccggcgacggcgacaccaactacaacggcaagttcaagggcagagccacactgaccgccgatacctctagcagcacagcctacatgcagctgagcagcctgaccagcgaagatagcgccgtgtacttctgtgcccggtccatcacaacagtcgtgggctgcgctatggactattggggccagggaacaagcgtgaccgtgtctagtacgcgtgacggtaacgaggagatgggaggaatcactcaaaccccttacaaagtctcaatttcaggaacaactgttatccttacatgtccccagtatcctggcagcgagatcctttggcagcataacgacaagaatatagggggagatgaagacgataagaatatcggatctgacgaggatcacttgagcctgaaagagttctccgagcttgaacaaagcggatattatgtgtgctatccgcgcgggtcaaagccggaagacgctaacttttacctttatctccgagccagagtgtgcgaaaattgcatggaaatggacgttatgtccgttgctacaatagttatcgtagatatatgcatcacgggtggactgcttctgctggtttattattggtccaagaatagaaaggccaaagctaaacccgtgaccagaggcgctggcgcaggcggaaggcaaaggggacaaaacaaagaacggccaccaccagtgccaaatccagattatgagcctattcggaaaggacagagggacctgtactctggcctgaatcagagaagaatc

SEQ ID NO: 5253 - DNA, 1674 bp, Artificial Sequence
  Synthetic Polynucloetide
atggccttaccagtgaccgccttgctcctgccgctggccttgctgctccacgccgccaggccggaagttcagctgcttgagtctggcggaggactggttcaacctggcggaagcctgagactgtcttgtgccgccagcggcttcatcttcagcagctacgccatgagctgggtccgacaggctcctggaaagggccaagaatgggtttccggcgttagcggcacaggcgtgaacacctactacgccgatagcgtgaagggcagattcaccatcagccgggacaacagcaagaacaccctgtacctccagatgaacagcctgagagccgaggacaccgccgtgtactattgtgcctctggcaaaggctgggacagcggctcttggtacgaggactatagaggccagggcaccctggtcacagtttcttcaggtaccggcggaggcggatctggcggcggaggtagcggtggcggaggatctgaattcgacatccagatgacacagagccctagcagcctgtctgccagcgtgggagacagagtgaccatcacatgcaaggccagcgaccacatcaacaactggctggcctggtatcagcagaagcctggacaggcccctaagctgctgatctacggcgctaccacactggaaacaggcgtgcccagcagattttctggcagcggctctggcaccgactacaccctgacaatatccagcctccagcctgaggacttcgccacctactactgtcagcagagctggaacaccccttggacattcggccagggcaccaagctggaaatcaagagaggcggaggcggaagtggaggcggaggatctggcggcggaggctctcaagttcagcttcaacagcctggcgctgagctggtcaaacctggcgcttctgtgaagatgagctgcaaagccagcggctacgccttcagcagctactggatcaactggatgaagcagaaacccggccagggactcgaatggatcggccaaatctatcccggcgacggcgacaccaactacaacggcaagttcaagggcagagccacactgaccgccgatacctctagcagcacagcctacatgcagctgagcagcctgaccagcgaagatagcgccgtgtacttctgtgcccggtccatcacaacagtcgtgggctgcgctatggactattggggccagggaacaagcgtgaccgtgtctagtacgcgtttcaagatccccatcgaggaactggaagatcgggtgttcgtgaactgcaacacctctatcacctgggtggaaggcaccgtgggaacactgctgagcgacatcaccagactggacctcggcaagcggattctggaccctcggggcatctacagatgcaacggcaccgacatctacaaggacaaagaaagcaccgtgcaggtccactacagaatgtgccagtcctgcgtggaactggaccctgctacagtggccggcatcatcgtgaccgatgtgatcgctactctgctgctggctctgggagtgttctgcttcgccggacacgaaacaggcagactgtctggcgctgccgatacacaggccctgctgagaaacgaccaagtgtatcagcccctgcgcgacagagatgatgcccagtattctcacctcggcggcaactgggctagaaacaag

SEQ ID NO: 5254 - DNA, 1704 bp, Artificial Sequence
  Synthetic Polynucloetide
atggccttaccagtgaccgccttgctcctgccgctggccttgctgctccacgccgccaggccggaagttcagctgcttgagtctggcggaggactggttcaacctggcggaagcctgagactgtcttgtgccgccagcggcttcatcttcagcagctacgccatgagctgggtccgacaggctcctggaaagggccaagaatgggtttccggcgttagcggcacaggcgtgaacacctactacgccgatagcgtgaagggcagattcaccatcagccgggacaacagcaagaacaccctgtacctccagatgaacagcctgagagccgaggacaccgccgtgtactattgtgcctctggcaaaggctgggacagcggctcttggtacgaggactatagaggccagggcaccctggtcacagtttcttcaggtaccggcggaggcggatctggcggcggaggtagcggtggcggaggatctgaattcgacatccagatgacacagagccctagcagcctgtctgccagcgtgggagacagagtgaccatcacatgcaaggccagcgaccacatcaacaactggctggcctggtatcagcagaagcctggacaggcccctaagctgctgatctacggcgctaccacactggaaacaggcgtgcccagcagattttctggcagcggctctggcaccgactacaccctgacaatatccagcctccagcctgaggacttcgccacctactactgtcagcagagctggaacaccccttggacattcggccagggcaccaagctggaaatcaagagaggcggaggcggaagtggaggcggaggatctggcggcggaggctctcaagttcagcttcaacagcctggcgctgagctggtcaaacctggcgcttctgtgaagatgagctgcaaagccagcggctacgccttcagcagctactggatcaactggatgaagcagaaacccggccagggactcgaatggatcggccaaatctatcccggcgacggcgacaccaactacaacggcaagttcaagggcagagccacactgaccgccgatacctctagcagcacagcctacatgcagctgagcagcctgaccagcgaagatagcgccgtgtacttctgtgcccggtccatcacaacagtcgtgggctgcgctatggactattggggccagggaacaagcgtgaccgtgtctagtacgcgtcagagcatcaagggcaaccacctggtcaaggtgtacgactaccaagaggacggcagcgtgctgctgacatgtgatgccgaggccaagaacatcacctggtttaaggacggcaagatgatcggcttcctgaccgaggacaagaagaagtggaacctgggcagcaacgctaaggaccccagaggcatgtatcagtgcaagggcagccagaacaagagcaagcccctccaggtgtactaccggatgtgccagaactgcatcgagctgaacgccgctaccatcagcggctttctgttcgccgagatcgtgtccatcttcgtgctggccgtgggcgtgtactttatcgctggacaggatggcgtgcggcagagcagagcttccgataagcaaaccctgctgcctaacgaccagctgtaccagcctctgaaggacagagaggacgaccagtacagccacctccagggcaatcagctgagaagaaac

SEQ ID NO: 5255 - DNA, 1653 bp, Artificial Sequence
  Synthetic Polynucloetide
atggccttaccagtgaccgccttgctcctgccgctggccttgctgctccacgccgccaggccggaagttcagctgcttgagtctggcggaggactggttcaacctggcggaagcctgagactgtcttgtgccgccagcggcttcatcttcagcagctacgccatgagctgggtccgacaggctcctggaaagggccaagaatgggtttccggcgttagcggcacaggcgtgaacacctactacgccgatagcgtgaagggcagattcaccatcagccgggacaacagcaagaacaccctgtacctccagatgaacagcctgagagccgaggacaccgccgtgtactattgtgcctctggcaaaggctgggacagcggctcttggtacgaggactatagaggccagggcaccctggtcacagtttcttcaggtaccggcggaggcggatctggcggcggaggtagcggtggcggaggatctgaattcgacatccagatgacacagagccctagcagcctgtctgccagcgtgggagacagagtgaccatcacatgcaaggccagcgaccacatcaacaactggctggcctggtatcagcagaagcctggacaggcccctaagctgctgatctacggcgctaccacactggaaacaggcgtgcccagcagattttctggcagcggctctggcaccgactacaccctgacaatatccagcctccagcctgaggacttcgccacctactactgtcagcagagctggaacaccccttggacattcggccagggcaccaagctggaaatcaagagaggcggaggcggaagtggaggcggaggatctggcggcggaggctctcaagttcagcttcaacagcctggcgctgagctggtcaaacctggcgcttctgtgaagatgagctgcaaagccagcggctacgccttcagcagctactggatcaactggatgaagcagaaacccggccagggactcgaatggatcggccaaatctatcccggcgacggcgacaccaactacaacggcaagttcaagggcagagccacactgaccgccgatacctctagcagcacagcctacatgcagctgagcagcctgaccagcgaagatagcgccgtgtacttctgtgcccggtccatcacaacagtcgtgggctgcgctatggactattggggccagggaacaagcgtgaccgtgtctagtacgcgtcagagttttgggttgttggaccctaaattgtgctatctgttggacggaatcctgttcatttacggagtgatcctgaccgcattgttcctgcgggttaagttttccagatccgcagacgcacccgcttaccaacaagggcagaaccaactctacaatgaacttaatttggggcggagggaagagtacgacgttctggacaaaaggaggggacgagatcccgagatgggcggaaagcctcagcgaaggaagaatccgcaagaggggctttataacgaactccagaaagataaaatggcagaagcctatagtgagattgggatgaagggagaaaggaggaggggtaaaggtcacgatgggttgtaccaaggattgagcacagccactaaagatacctatgatgcgctccacatgcaggccctgccgccaaga

SEQ ID NO: 5256 - DNA, 2355 bp, Artificial Sequence
  Synthetic Polynucloetide
atggccttaccagtgaccgccttgctcctgccgctggccttgctgctccacgccgccaggccggaagttcagctgcttgagtctggcggaggactggttcaacctggcggaagcctgagactgtcttgtgccgccagcggcttcatcttcagcagctacgccatgagctgggtccgacaggctcctggaaagggccaagaatgggtttccggcgttagcggcacaggcgtgaacacctactacgccgatagcgtgaagggcagattcaccatcagccgggacaacagcaagaacaccctgtacctccagatgaacagcctgagagccgaggacaccgccgtgtactattgtgcctctggcaaaggctgggacagcggctcttggtacgaggactatagaggccagggcaccctggtcacagtttcttcaggtaccggcggaggcggatctggcggcggaggtagcggtggcggaggatctgaattcgacatccagatgacacagagccctagcagcctgtctgccagcgtgggagacagagtgaccatcacatgcaaggccagcgaccacatcaacaactggctggcctggtatcagcagaagcctggacaggcccctaagctgctgatctacggcgctaccacactggaaacaggcgtgcccagcagattttctggcagcggctctggcaccgactacaccctgacaatatccagcctccagcctgaggacttcgccacctactactgtcagcagagctggaacaccccttggacattcggccagggcaccaagctggaaatcaagagaggcggaggcggaagtggaggcggaggatctggcggcggaggctctcaagttcagcttcaacagcctggcgctgagctggtcaaacctggcgcttctgtgaagatgagctgcaaagccagcggctacgccttcagcagctactggatcaactggatgaagcagaaacccggccagggactcgaatggatcggccaaatctatcccggcgacggcgacaccaactacaacggcaagttcaagggcagagccacactgaccgccgatacctctagcagcacagcctacatgcagctgagcagcctgaccagcgaagatagcgccgtgtacttctgtgcccggtccatcacaacagtcgtgggctgcgctatggactattggggccagggaacaagcgtgaccgtgtctagtacgcgtgggagcggcatccagaaccctgatcctgccgtgtaccagctgcgggatagcaagagcagcgacaagagcgtgtgtctgttcaccgacttcgacagccagaccaacgtgtcccagagcaaggactccgacgtgtacatcaccgataagaccgtgctggacatgcggagcatggacttcaagagcaactccgccgtggcctggtccaacaagtccgatttcgcctgcgccaacgccttcaacaacagcattatccccgaggacacattcttcccaagccccgagagcagctgcgacgtgaagctggtggaaaagagcttcgagacagacaccaacctgaacttccagaacctgagcgtgatcggcttcagaatcctgctgctgaaagtggccggctttaacctgctgatgaccctgcggctgtggtccagccgcgccaagagaagcggatctggcgtgaagcagaccctgaatttcgacctgctgaagctggctggcgacgtggaatccaacccaggcccttctagaggccatatgaccgagtacaagcccacggtgcgcctcgccacccgcgacgacgtccccagggccgtacgcaccctcgccgccgcgttcgccgactaccccgccacgcgccacaccgtcgatccggaccgccacatcgagcgggtcaccgagctgcaagaactcttcctcacgcgcgtcgggctcgacatcggcaaggtgtgggtcgcggacgacggcgccgcggtggcggtctggaccacgccggagagcgtcgaagcgggggcggtgttcgccgagatcggcccgcgcatggccgagttgagcggttcccggctggccgcgcagcaacagatggaaggcctcctggcgccgcaccggcccaaggagcccgcgtggttcctggccaccgtcggcgtctcgcccgaccaccagggcaagggtctgggcagcgccgtcgtgctccccggagtggaggcggccgagcgcgccggggtgcccgccttcctggagacctccgcgccccgcaacctccccttctacgagcggctcggcttcaccgtcaccgccgacgtcgaggtgcccgaaggaccgcgcacctggtgcatgacccgcaagcccggtgcctga

SEQ ID NO: 5257 - DNA, 2451 bp, Artificial Sequence
  Synthetic Polynucloetide
atggccttaccagtgaccgccttgctcctgccgctggccttgctgctccacgccgccaggccggaagttcagctgcttgagtctggcggaggactggttcaacctggcggaagcctgagactgtcttgtgccgccagcggcttcatcttcagcagctacgccatgagctgggtccgacaggctcctggaaagggccaagaatgggtttccggcgttagcggcacaggcgtgaacacctactacgccgatagcgtgaagggcagattcaccatcagccgggacaacagcaagaacaccctgtacctccagatgaacagcctgagagccgaggacaccgccgtgtactattgtgcctctggcaaaggctgggacagcggctcttggtacgaggactatagaggccagggcaccctggtcacagtttcttcaggtaccggcggaggcggatctggcggcggaggtagcggtggcggaggatctgaattcgacatccagatgacacagagccctagcagcctgtctgccagcgtgggagacagagtgaccatcacatgcaaggccagcgaccacatcaacaactggctggcctggtatcagcagaagcctggacaggcccctaagctgctgatctacggcgctaccacactggaaacaggcgtgcccagcagattttctggcagcggctctggcaccgactacaccctgacaatatccagcctccagcctgaggacttcgccacctactactgtcagcagagctggaacaccccttggacattcggccagggcaccaagctggaaatcaagagaggcggaggcggaagtggaggcggaggatctggcggcggaggctctcaagttcagcttcaacagcctggcgctgagctggtcaaacctggcgcttctgtgaagatgagctgcaaagccagcggctacgccttcagcagctactggatcaactggatgaagcagaaacccggccagggactcgaatggatcggccaaatctatcccggcgacggcgacaccaactacaacggcaagttcaagggcagagccacactgaccgccgatacctctagcagcacagcctacatgcagctgagcagcctgaccagcgaagatagcgccgtgtacttctgtgcccggtccatcacaacagtcgtgggctgcgctatggactattggggccagggaacaagcgtgaccgtgtctagtctcgaggacctgaagaacgtgttcccacctgaggtggccgtgttcgagcctagcgaggccgagatcagccacacccagaaagccaccctcgtgtgcctggctaccggcttctaccccgaccatgtggaactgtcttggtgggtcaacggcaaagaggtgcacagcggcgtgtctaccgacccccagccactgaaagaacagcccgccctgaacgacagccggtactgcctgagcagcagactgagagtgtccgccaccttctggcagaacccccggaaccacttcagatgccaggtgcagttctacggcctgagcgagaacgacgagtggacccaggacagagccaagcccgtgacccagatcgtgtctgccgaagcctggggcagagccgattgcggctttaccagcgagagctaccagcagggcgtgctgagcgccaccatcctgtacgagatcctgctgggcaaggccaccctgtacgccgtgctggtgtctgccctggtgctgatggctatggtcaagcggaaggacagccggggaagggccaagcgatctggatctggagcaacaaacttctcactactcaaacaagcaggtgacgtggaggagaatcccgggcctactagaggccatatgaccgagtacaagcccacggtgcgcctcgccacccgcgacgacgtccccagggccgtacgcaccctcgccgccgcgttcgccgactaccccgccacgcgccacaccgtcgatccggaccgccacatcgagcgggtcaccgagctgcaagaactcttcctcacgcgcgtcgggctcgacatcggcaaggtgtgggtcgcggacgacggcgccgcggtggcggtctggaccacgccggagagcgtcgaagcgggggcggtgttcgccgagatcggcccgcgcatggccgagttgagcggttcccggctggccgcgcagcaacagatggaaggcctcctggcgccgcaccggcccaaggagcccgcgtggttcctggccaccgtcggcgtctcgcccgaccaccagggcaagggtctgggcagcgccgtcgtgctccccggagtggaggcggccgagcgcgccggggtgcccgccttcctggagacctccgcgccccgcaacctccccttctacgagcggctcggcttcaccgtcaccgccgacgtcgaggtgcccgaaggaccgcgcacctggtgcatgacccgcaagcccggtgcctga

SEQ ID NO: 5258 - DNA, 2601 bp, Artificial Sequence
  Synthetic Polynucloetide
atggccttaccagtgaccgccttgctcctgccgctggccttgctgctccacgccgccaggccggaagttcagctgcttgagtctggcggaggactggttcaacctggcggaagcctgagactgtcttgtgccgccagcggcttcatcttcagcagctacgccatgagctgggtccgacaggctcctggaaagggccaagaatgggtttccggcgttagcggcacaggcgtgaacacctactacgccgatagcgtgaagggcagattcaccatcagccgggacaacagcaagaacaccctgtacctccagatgaacagcctgagagccgaggacaccgccgtgtactattgtgcctctggcaaaggctgggacagcggctcttggtacgaggactatagaggccagggcaccctggtcacagtttcttcaggtaccggcggaggcggatctggcggcggaggtagcggtggcggaggatctgaattcgacatccagatgacacagagccctagcagcctgtctgccagcgtgggagacagagtgaccatcacatgcaaggccagcgaccacatcaacaactggctggcctggtatcagcagaagcctggacaggcccctaagctgctgatctacggcgctaccacactggaaacaggcgtgcccagcagattttctggcagcggctctggcaccgactacaccctgacaatatccagcctccagcctgaggacttcgccacctactactgtcagcagagctggaacaccccttggacattcggccagggcaccaagctggaaatcaagagaggcggaggcggaagtggaggcggaggatctggcggcggaggctctcaagttcagcttcaacagcctggcgctgagctggtcaaacctggcgcttctgtgaagatgagctgcaaagccagcggctacgccttcagcagctactggatcaactggatgaagcagaaacccggccagggactcgaatggatcggccaaatctatcccggcgacggcgacaccaactacaacggcaagttcaagggcagagccacactgaccgccgatacctctagcagcacagcctacatgcagctgagcagcctgaccagcgaagatagcgccgtgtacttctgtgcccggtccatcacaacagtcgtgggctgcgctatggactattggggccagggaacaagcgtgaccgtgtctagtacgcgtgagcagaaactgatctcggaagaggatctggggagcggcaccccattcccttctctggcccctcccatcatgctgctggtggacggcaagcagcagatggtggtcgtgtgcctggtgctggatgtggccccacctggactggacagccccatctggtttagcgccggcaatggctctgccctggacgcctttacctacggcccaagccctgccaccgatggcacctggacaaatctggcccacctgagcctgcccagcgaggaactggcttcttgggagcctctcgtgtgccacacaggacctggcgctgagggacacagcagatccacccagcctatgcacctgtctggcgaggccagcaccgccagaacctgtcctcaggaacctctgagaggcacccctggcggagcactgtggctgggagtgctgagactgctgctgttcaagctgctgctgtttgacctgctgctgacctgctcctgtctgtgcgatcctgccggccctctgccttctcctgccaccaccacaagactgagagccctgggcagccacagactgcaccctgccacagagacaggcggcagagaggccacaagcagccctagaccccagcccagagacagaagatggggcgataccccccctggcagaaagcctggatctccagtccgcgccaagagaagcggatctggcgtgaagcagaccctgaatttcgacctgctgaagctggctggcgacgtggaatccaacccaggcccttctagatctagaggccatatgaccgagtacaagcccacggtgcgcctcgccacccgcgacgacgtccccagggccgtacgcaccctcgccgccgcgttcgccgactaccccgccacgcgccacaccgtcgatccggaccgccacatcgagcgggtcaccgagctgcaagaactcttcctcacgcgcgtcgggctcgacatcggcaaggtgtgggtcgcggacgacggcgccgcggtggcggtctggaccacgccggagagcgtcgaagcgggggcggtgttcgccgagatcggcccgcgcatggccgagttgagcggttcccggctggccgcgcagcaacagatggaaggcctcctggcgccgcaccggcccaaggagcccgcgtggttcctggccaccgtcggcgtctcgcccgaccaccagggcaagggtctgggcagcgccgtcgtgctccccggagtggaggcggccgagcgcgccggggtgcccgccttcctggagacctccgcgccccgcaacctccccttctacgagcggctcggcttcaccgtcaccgccgacgtcgaggtgcccgaaggaccgcgcacctggtgcatgacccgcaagcccggtgcctga

SEQ ID NO: 5259 - DNA, 2043 bp, Artificial Sequence
  Synthetic Polynucloetide
atggccttaccagtgaccgccttgctcctgccgctggccttgctgctccacgccgccaggccggaagttcagctgcttgagtctggcggaggactggttcaacctggcggaagcctgagactgtcttgtgccgccagcggcttcatcttcagcagctacgccatgagctgggtccgacaggctcctggaaagggccaagaatgggtttccggcgttagcggcacaggcgtgaacacctactacgccgatagcgtgaagggcagattcaccatcagccgggacaacagcaagaacaccctgtacctccagatgaacagcctgagagccgaggacaccgccgtgtactattgtgcctctggcaaaggctgggacagcggctcttggtacgaggactatagaggccagggcaccctggtcacagtttcttcaggtaccggcggaggcggatctggcggcggaggtagcggtggcggaggatctgaattcgacatccagatgacacagagccctagcagcctgtctgccagcgtgggagacagagtgaccatcacatgcaaggccagcgaccacatcaacaactggctggcctggtatcagcagaagcctggacaggcccctaagctgctgatctacggcgctaccacactggaaacaggcgtgcccagcagattttctggcagcggctctggcaccgactacaccctgacaatatccagcctccagcctgaggacttcgccacctactactgtcagcagagctggaacaccccttggacattcggccagggcaccaagctggaaatcaagagactcgaggacctgaagaacgtgttcccacctgaggtggccgtgttcgagcctagcgaggccgagatcagccacacccagaaagccaccctcgtgtgcctggctaccggcttctaccccgaccatgtggaactgtcttggtgggtcaacggcaaagaggtgcacagcggcgtgtctaccgacccccagccactgaaagaacagcccgccctgaacgacagccggtactgcctgagcagcagactgagagtgtccgccaccttctggcagaacccccggaaccacttcagatgccaggtgcagttctacggcctgagcgagaacgacgagtggacccaggacagagccaagcccgtgacccagatcgtgtctgccgaagcctggggcagagccgattgcggctttaccagcgagagctaccagcagggcgtgctgagcgccaccatcctgtacgagatcctgctgggcaaggccaccctgtacgccgtgctggtgtctgccctggtgctgatggctatggtcaagcggaaggacagccggggaagggccaagcgatctggatctggagcaacaaacttctcactactcaaacaagcaggtgacgtggaggagaatcccgggcctactagaggccatatgaccgagtacaagcccacggtgcgcctcgccacccgcgacgacgtccccagggccgtacgcaccctcgccgccgcgttcgccgactaccccgccacgcgccacaccgtcgatccggaccgccacatcgagcgggtcaccgagctgcaagaactcttcctcacgcgcgtcgggctcgacatcggcaaggtgtgggtcgcggacgacggcgccgcggtggcggtctggaccacgccggagagcgtcgaagcgggggcggtgttcgccgagatcggcccgcgcatggccgagttgagcggttcccggctggccgcgcagcaacagatggaaggcctcctggcgccgcaccggcccaaggagcccgcgtggttcctggccaccgtcggcgtctcgcccgaccaccagggcaagggtctgggcagcgccgtcgtgctccccggagtggaggcggccgagcgcgccggggtgcccgccttcctggagacctccgcgccccgcaacctccccttctacgagcggctcggcttcaccgtcaccgccgacgtcgaggtgcccgaaggaccgcgcacctggtgcatgacccgcaagcccggtgcctga

SEQ ID NO: 5260 - DNA, 1350 bp, Artificial Sequence
  Synthetic Polynucloetide
atggccttaccagtgaccgccttgctcctgccgctggccttgctgctccacgccgccaggccggaagttcagctgcttgagtctggcggaggactggttcaacctggcggaagcctgagactgtcttgtgccgccagcggcttcatcttcagcagctacgccatgagctgggtccgacaggctcctggaaagggccaagaatgggtttccggcgttagcggcacaggcgtgaacacctactacgccgatagcgtgaagggcagattcaccatcagccgggacaacagcaagaacaccctgtacctccagatgaacagcctgagagccgaggacaccgccgtgtactattgtgcctctggcaaaggctgggacagcggctcttggtacgaggactatagaggccagggcaccctggtcacagtttcttcaggtaccggcggaggcggatctggcggcggaggtagcggtggcggaggatctgaattcgacatccagatgacacagagccctagcagcctgtctgccagcgtgggagacagagtgaccatcacatgcaaggccagcgaccacatcaacaactggctggcctggtatcagcagaagcctggacaggcccctaagctgctgatctacggcgctaccacactggaaacaggcgtgcccagcagattttctggcagcggctctggcaccgactacaccctgacaatatccagcctccagcctgaggacttcgccacctactactgtcagcagagctggaacaccccttggacattcggccagggcaccaagctggaaatcaagagactcgaggacctgaagaacgtgttcccacctgaggtggccgtgttcgagcctagcgaggccgagatcagccacacccagaaagccaccctcgtgtgcctggctaccggcttctaccccgaccatgtggaactgtcttggtgggtcaacggcaaagaggtgcacagcggcgtgtctaccgacccccagccactgaaagaacagcccgccctgaacgacagccggtactgcctgagcagcagactgagagtgtccgccaccttctggcagaacccccggaaccacttcagatgccaggtgcagttctacggcctgagcgagaacgacgagtggacccaggacagagccaagcccgtgacccagatcgtgtctgccgaagcctggggcagagccgattgcggctttaccagcgagagctaccagcagggcgtgctgagcgccaccatcctgtacgagatcctgctgggcaaggccaccctgtacgccgtgctggtgtctgccctggtgctgatggctatggtcaagcggaaggacagccgggga

SEQ ID NO: 5261 - DNA, 2097 bp, Artificial Sequence
  Synthetic Polynucloetide
atggccttaccagtgaccgccttgctcctgccgctggccttgctgctccacgccgccaggccggaagttcagctgcttgagtctggcggaggactggttcaacctggcggaagcctgagactgtcttgtgccgccagcggcttcatcttcagcagctacgccatgagctgggtccgacaggctcctggaaagggccaagaatgggtttccggcgttagcggcacaggcgtgaacacctactacgccgatagcgtgaagggcagattcaccatcagccgggacaacagcaagaacaccctgtacctccagatgaacagcctgagagccgaggacaccgccgtgtactattgtgcctctggcaaaggctgggacagcggctcttggtacgaggactatagaggccagggcaccctggtcacagtttcttcaggtaccggcggaggcggatctggcggcggaggtagcggtggcggaggatctgaattcgacatccagatgacacagagccctagcagcctgtctgccagcgtgggagacagagtgaccatcacatgcaaggccagcgaccacatcaacaactggctggcctggtatcagcagaagcctggacaggcccctaagctgctgatctacggcgctaccacactggaaacaggcgtgcccagcagattttctggcagcggctctggcaccgactacaccctgacaatatccagcctccagcctgaggacttcgccacctactactgtcagcagagctggaacaccccttggacattcggccagggcaccaagctggaaatcaagagactcgaggggaaaccaattcccaaccctcttctgggactggattcaaccggcagcggcgaggacctgaagaacgtgttcccacctgaggtggccgtgttcgagcctagcgaggccgagatcagccacacccagaaagccaccctcgtgtgcctggctaccggcttctaccccgaccatgtggaactgtcttggtgggtcaacggcaaagaggtgcacagcggcgtgtgtaccgacccccagccactgaaagaacagcccgccctgaacgacagccggtactgcctgagcagcagactgagagtgtccgccaccttctggcagaacccccggaaccacttcagatgccaggtgcagttctacggcctgagcgagaacgacgagtggacccaggacagagccaagcccgtgacccagatcgtgtctgccgaagcctggggcagagccgattgcggctttaccagcgagagctaccagcagggcgtgctgagcgccaccatcctgtacgagatcctgctgggcaaggccaccctgtacgccgtgctggtgtctgccctggtgctgatggctatggtcaagcggaaggacagccggggaagggccaagcgatctggatctggagcaacaaacttctcactactcaaacaagcaggtgacgtggaggagaatcccgggcctactagaggccatatgaccgagtacaagcccacggtgcgcctcgccacccgcgacgacgtccccagggccgtacgcaccctcgccgccgcgttcgccgactaccccgccacgcgccacaccgtcgatccggaccgccacatcgagcgggtcaccgagctgcaagaactcttcctcacgcgcgtcgggctcgacatcggcaaggtgtgggtcgcggacgacggcgccgcggtggcggtctggaccacgccggagagcgtcgaagcgggggcggtgttcgccgagatcggcccgcgcatggccgagttgagcggttcccggctggccgcgcagcaacagatggaaggcctcctggcgccgcaccggcccaaggagcccgcgtggttcctggccaccgtcggcgtctcgcccgaccaccagggcaagggtctgggcagcgccgtcgtgctccccggagtggaggcggccgagcgcgccggggtgcccgccttcctggagacctccgcgccccgcaacctccccttctacgagcggctcggcttcaccgtcaccgccgacgtcgaggtgcccgaaggaccgcgcacctggtgcatgacccgcaagcccggtgcctga

SEQ ID NO: 5262 - DNA, 1407 bp, Artificial Sequence
  Synthetic Polynucloetide
atggccttaccagtgaccgccttgctcctgccgctggccttgctgctccacgccgccaggccggaagttcagctgcttgagtctggcggaggactggttcaacctggcggaagcctgagactgtcttgtgccgccagcggcttcatcttcagcagctacgccatgagctgggtccgacaggctcctggaaagggccaagaatgggtttccggcgttagcggcacaggcgtgaacacctactacgccgatagcgtgaagggcagattcaccatcagccgggacaacagcaagaacaccctgtacctccagatgaacagcctgagagccgaggacaccgccgtgtactattgtgcctctggcaaaggctgggacagcggctcttggtacgaggactatagaggccagggcaccctggtcacagtttcttcaggtaccggcggaggcggatctggcggcggaggtagcggtggcggaggatctgaattcgacatccagatgacacagagccctagcagcctgtctgccagcgtgggagacagagtgaccatcacatgcaaggccagcgaccacatcaacaactggctggcctggtatcagcagaagcctggacaggcccctaagctgctgatctacggcgctaccacactggaaacaggcgtgcccagcagattttctggcagcggctctggcaccgactacaccctgacaatatccagcctccagcctgaggacttcgccacctactactgtcagcagagctggaacaccccttggacattcggccagggcaccaagctggaaatcaagagactcgaggggaaaccaattcccaaccctcttctgggactggattcaaccggcagcggcgaggacctgaagaacgtgttcccacctgaggtggccgtgttcgagcctagcgaggccgagatcagccacacccagaaagccaccctcgtgtgcctggctaccggcttctaccccgaccatgtggaactgtcttggtgggtcaacggcaaagaggtgcacagcggcgtgtgtaccgacccccagccactgaaagaacagcccgccctgaacgacagccggtactgcctgagcagcagactgagagtgtccgccaccttctggcagaacccccggaaccacttcagatgccaggtgcagttctacggcctgagcgagaacgacgagtggacccaggacagagccaagcccgtgacccagatcgtgtctgccgaagcctggggcagagccgattgcggctttaccagcgagagctaccagcagggcgtgctgagcgccaccatcctgtacgagatcctgctgggcaaggccaccctgtacgccgtgctggtgtctgccctggtgctgatggctatggtcaagcggaaggacagccggggatga

SEQ ID NO: 5263 - DNA, 2355 bp, Artificial Sequence
  Synthetic Polynucloetide
atggccttaccagtgaccgccttgctcctgccgctggccttgctgctccacgccgccaggccggaagttcagctgcttgagtctggcggaggactggttcaacctggcggaagcctgagactgtcttgtgccgccagcggcttcatcttcagcagctacgccatgagctgggtccgacaggctcctggaaagggccaagaatgggtttccggcgttagcggcacaggcgtgaacacctactacgccgatagcgtgaagggcagattcaccatcagccgggacaacagcaagaacaccctgtacctccagatgaacagcctgagagccgaggacaccgccgtgtactattgtgcctctggcaaaggctgggacagcggctcttggtacgaggactatagaggccagggcaccctggtcacagtttcttcaggtaccggcggaggcggatctggcggcggaggtagcggtggcggaggatctgaattcgacatccagatgacacagagccctagcagcctgtctgccagcgtgggagacagagtgaccatcacatgcaaggccagcgaccacatcaacaactggctggcctggtatcagcagaagcctggacaggcccctaagctgctgatctacggcgctaccacactggaaacaggcgtgcccagcagattttctggcagcggctctggcaccgactacaccctgacaatatccagcctccagcctgaggacttcgccacctactactgtcagcagagctggaacaccccttggacattcggccagggcaccaagctggaaatcaagagaggcggaggcggaagtggaggcggaggatctggcggcggaggctctcaagttcagcttcaacagcctggcgctgagctggtcaaacctggcgcttctgtgaagatgagctgcaaagccagcggctacgccttcagcagctactggatcaactggatgaagcagaaacccggccagggactcgaatggatcggccaaatctatcccggcgacggcgacaccaactacaacggcaagttcaagggcagagccacactgaccgccgatacctctagcagcacagcctacatgcagctgagcagcctgaccagcgaagatagcgccgtgtacttctgtgcccggtccatcacaacagtcgtgggctgcgctatggactattggggccagggaacaagcgtgaccgtgtctagtacgcgtgggagcggcatccagaaccctgatcctgccgtgtaccagctgcgggatagcaagagcagcgacaagagcgtgtgtctgttcaccgacttcgacagccagaccaacgtgtcccagagcaaggactccgacgtgtacatcaccgataagaccgtgctggacatgcggagcatggacttcaagagcaactccgccgtggcctggtccaacaagtccgatttcgcctgcgccaacgccttcaacaacagcattatccccgaggacacattcttcccaagcagcgacgtgccctgcgacgtgaagctggtggaaaagagcttcgagacagacaccaacctgaacttccagaacctgagcgtgatcggcttcagaatcctgctgctgaaagtggccggctttaacctgctgatgaccctgcggctgtggtccagccgcgccaagagaagcggatctggcgtgaagcagaccctgaatttcgacctgctgaagctggctggcgacgtggaatccaacccaggcccttctagaggccatatgaccgagtacaagcccacggtgcgcctcgccacccgcgacgacgtccccagggccgtacgcaccctcgccgccgcgttcgccgactaccccgccacgcgccacaccgtcgatccggaccgccacatcgagcgggtcaccgagctgcaagaactcttcctcacgcgcgtcgggctcgacatcggcaaggtgtgggtcgcggacgacggcgccgcggtggcggtctggaccacgccggagagcgtcgaagcgggggcggtgttcgccgagatcggcccgcgcatggccgagttgagcggttcccggctggccgcgcagcaacagatggaaggcctcctggcgccgcaccggcccaaggagcccgcgtggttcctggccaccgtcggcgtctcgcccgaccaccagggcaagggtctgggcagcgccgtcgtgctccccggagtggaggcggccgagcgcgccggggtgcccgccttcctggagacctccgcgccccgcaacctccccttctacgagcggctcggcttcaccgtcaccgccgacgtcgaggtgcccgaaggaccgcgcacctggtgcatgacccgcaagcccggtgcctga

SEQ ID NO: 5264 - DNA, 2451 bp, Artificial Sequence
  Synthetic Polynucloetide
atggccttaccagtgaccgccttgctcctgccgctggccttgctgctccacgccgccaggccggaagttcagctgcttgagtctggcggaggactggttcaacctggcggaagcctgagactgtcttgtgccgccagcggcttcatcttcagcagctacgccatgagctgggtccgacaggctcctggaaagggccaagaatgggtttccggcgttagcggcacaggcgtgaacacctactacgccgatagcgtgaagggcagattcaccatcagccgggacaacagcaagaacaccctgtacctccagatgaacagcctgagagccgaggacaccgccgtgtactattgtgcctctggcaaaggctgggacagcggctcttggtacgaggactatagaggccagggcaccctggtcacagtttcttcaggtaccggcggaggcggatctggcggcggaggtagcggtggcggaggatctgaattcgacatccagatgacacagagccctagcagcctgtctgccagcgtgggagacagagtgaccatcacatgcaaggccagcgaccacatcaacaactggctggcctggtatcagcagaagcctggacaggcccctaagctgctgatctacggcgctaccacactggaaacaggcgtgcccagcagattttctggcagcggctctggcaccgactacaccctgacaatatccagcctccagcctgaggacttcgccacctactactgtcagcagagctggaacaccccttggacattcggccagggcaccaagctggaaatcaagagaggcggaggcggaagtggaggcggaggatctggcggcggaggctctcaagttcagcttcaacagcctggcgctgagctggtcaaacctggcgcttctgtgaagatgagctgcaaagccagcggctacgccttcagcagctactggatcaactggatgaagcagaaacccggccagggactcgaatggatcggccaaatctatcccggcgacggcgacaccaactacaacggcaagttcaagggcagagccacactgaccgccgatacctctagcagcacagcctacatgcagctgagcagcctgaccagcgaagatagcgccgtgtacttctgtgcccggtccatcacaacagtcgtgggctgcgctatggactattggggccagggaacaagcgtgaccgtgtctagtctcgaggacctgaagaacgtgttcccacctgaggtggccgtgttcgagcctagcaaggccgagatcgcccacacccagaaagccaccctcgtgtgcctggctaccggcttctaccccgaccatgtggaactgtcttggtgggtcaacggcaaagaggtgcacagcggcgtgtctaccgacccccagccactgaaagaacagcccgccctgaacgacagccggtactgcctgagcagcagactgagagtgtccgccaccttctggcagaacccccggaaccacttcagatgccaggtgcagttctacggcctgagcgagaacgacgagtggacccaggacagagccaagcccgtgacccagatcgtgtctgccgaagcctggggcagagccgattgcggcatcaccagcgccagctaccaccagggcgtgctgagcgccaccatcctgtacgagatcctgctgggcaaggccaccctgtacgccgtgctggtgtctgccctggtgctgatggctatggtcaagcggaaggacagccggggaagggccaagcgatctggatctggagcaacaaacttctcactactcaaacaagcaggtgacgtggaggagaatcccgggcctactagaggccatatgaccgagtacaagcccacggtgcgcctcgccacccgcgacgacgtccccagggccgtacgcaccctcgccgccgcgttcgccgactaccccgccacgcgccacaccgtcgatccggaccgccacatcgagcgggtcaccgagctgcaagaactcttcctcacgcgcgtcgggctcgacatcggcaaggtgtgggtcgcggacgacggcgccgcggtggcggtctggaccacgccggagagcgtcgaagcgggggcggtgttcgccgagatcggcccgcgcatggccgagttgagcggttcccggctggccgcgcagcaacagatggaaggcctcctggcgccgcaccggcccaaggagcccgcgtggttcctggccaccgtcggcgtctcgcccgaccaccagggcaagggtctgggcagcgccgtcgtgctccccggagtggaggcggccgagcgcgccggggtgcccgccttcctggagacctccgcgccccgcaacctccccttctacgagcggctcggcttcaccgtcaccgccgacgtcgaggtgcccgaaggaccgcgcacctggtgcatgacccgcaagcccggtgcctga

SEQ ID NO: 5265 - DNA, 1923 bp, Artificial Sequence; identical to SEQ ID NO: 4087
  Synthetic Polynucloetide

SEQ ID NO: 5266 - DNA, 2982 bp, Artificial Sequence; identical to SEQ ID NO: 4088
  Synthetic Polynucloetide

SEQ ID NO: 5267 - DNA, 2979 bp, Artificial Sequence; identical to SEQ ID NO: 4089
  Synthetic Polynucloetide

SEQ ID NO: 5268 - DNA, 2979 bp, Artificial Sequence; identical to SEQ ID NO: 4090
  Synthetic Polynucloetide

SEQ ID NO: 5269 - DNA, 2277 bp, Artificial Sequence; identical to SEQ ID NO: 4091
  Synthetic Polynucloetide

SEQ ID NO: 5270 - DNA, 2952 bp, Artificial Sequence; identical to SEQ ID NO: 4092
  Synthetic Polynucloetide

SEQ ID NO: 5271 - DNA, 2289 bp, Artificial Sequence; identical to SEQ ID NO: 4093
  Synthetic Polynucloetide

SEQ ID NO: 5272 - DNA, 2955 bp, Artificial Sequence; identical to SEQ ID NO: 4094
  Synthetic Polynucloetide

SEQ ID NO: 5273 - DNA, 2979 bp, Artificial Sequence; identical to SEQ ID NO: 4095
  Synthetic Polynucloetide

SEQ ID NO: 5274 - DNA, 3225 bp, Artificial Sequence; identical to SEQ ID NO: 4096
  Synthetic Polynucloetide

SEQ ID NO: 5275 - DNA, 3090 bp, Artificial Sequence; identical to SEQ ID NO: 4097
  Synthetic Polynucloetide

SEQ ID NO: 5276 - DNA, 2301 bp, Artificial Sequence; identical to SEQ ID NO: 4098
  Synthetic Polynucloetide

SEQ ID NO: 5277 - DNA, 3510 bp, Artificial Sequence; identical to SEQ ID NO: 4099
  Synthetic Polynucloetide

SEQ ID NO: 5278 - DNA, 2865 bp, Artificial Sequence; identical to SEQ ID NO: 4100
  Synthetic Polynucloetide

SEQ ID NO: 5279 - DNA, 2865 bp, Artificial Sequence; identical to SEQ ID NO: 4101
  Synthetic Polynucloetide

SEQ ID NO: 5280 - DNA, 3078 bp, Artificial Sequence; identical to SEQ ID NO: 4102
  Synthetic Polynucloetide

SEQ ID NO: 5281 - DNA, 3201 bp, Artificial Sequence; identical to SEQ ID NO: 4103
  Synthetic Polynucloetide

SEQ ID NO: 5282 - DNA, 3084 bp, Artificial Sequence; identical to SEQ ID NO: 4104
  Synthetic Polynucloetide

SEQ ID NO: 5283 - DNA, 3210 bp, Artificial Sequence; identical to SEQ ID NO: 4105
  Synthetic Polynucloetide

SEQ ID NO: 5284 - DNA, 2883 bp, Artificial Sequence; identical to SEQ ID NO: 4106
  Synthetic Polynucloetide

SEQ ID NO: 5285 - DNA, 2355 bp, Artificial Sequence; identical to SEQ ID NO: 4107
  Synthetic Polynucloetide

SEQ ID NO: 5286 - DNA, 2289 bp, Artificial Sequence; identical to SEQ ID NO: 4108
  Synthetic Polynucloetide

SEQ ID NO: 5287 - DNA, 2289 bp, Artificial Sequence; identical to SEQ ID NO: 4109
  Synthetic Polynucloetide

SEQ ID NO: 5288 - DNA, 1779 bp, Artificial Sequence; identical to SEQ ID NO: 4110
  Synthetic Polynucloetide

SEQ ID NO: 5289 - DNA, 1674 bp, Artificial Sequence; identical to SEQ ID NO: 4111
  Synthetic Polynucloetide

SEQ ID NO: 5290 - DNA, 1704 bp, Artificial Sequence; identical to SEQ ID NO: 4112
  Synthetic Polynucloetide

SEQ ID NO: 5291 - DNA, 1653 bp, Artificial Sequence; identical to SEQ ID NO: 4113
  Synthetic Polynucloetide

SEQ ID NO: 5292 - DNA, 1764 bp, Artificial Sequence; identical to SEQ ID NO: 4114
  Synthetic Polynucloetide

SEQ ID NO: 5293 - DNA, 1263 bp, Artificial Sequence; identical to SEQ ID NO: 4115
  Synthetic Polynucloetide

SEQ ID NO: 5294 - DNA, 1800 bp, Artificial Sequence; identical to SEQ ID NO: 4116
  Synthetic Polynucloetide

SEQ ID NO: 5295 - DNA, 1302 bp, Artificial Sequence; identical to SEQ ID NO: 4117
  Synthetic Polynucloetide

SEQ ID NO: 5296 - DNA, 3405 bp, Artificial Sequence
  Synthetic Polynucloetide
atggccttaccagtgaccgccttgctcctgccgctggccttgctgctccacgccgccaggccggaagttcagctgcttgagtctggcggaggactggttcaacctggcggaagcctgagactgtcttgtgccgccagcggcttcatcttcagcagctacgccatgagctgggtccgacaggctcctggaaagggccaagaatgggtttccggcgttagcggcacaggcgtgaacacctactacgccgatagcgtgaagggcagattcaccatcagccgggacaacagcaagaacaccctgtacctccagatgaacagcctgagagccgaggacaccgccgtgtactattgtgcctctggcaaaggctgggacagcggctcttggtacgaggactatagaggccagggcaccctggtcacagtttcttcaggtaccggcggaggcggatctggcggcggaggtagcggtggcggaggatctgaattcgacatccagatgacacagagccctagcagcctgtctgccagcgtgggagacagagtgaccatcacatgcaaggccagcgaccacatcaacaactggctggcctggtatcagcagaagcctggacaggcccctaagctgctgatctacggcgctaccacactggaaacaggcgtgcccagcagattttctggcagcggctctggcaccgactacaccctgacaatatccagcctccagcctgaggacttcgccacctactactgtcagcagagctggaacaccccttggacattcggccagggcaccaagctggaaatcaagagactcgagatccagaaccctgatcctgccgtgtaccagctgcgggatagcaagagcagcgacaagagcgtgtgtctgttcaccgacttcgacagccagaccaacgtgtcccagagcaaggactccgacgtgtacatcaccgataagtgcgtgctggacatgcggagcatggacttcaagagcaactccgccgtggcctggtccaacaagtccgatttcgcctgcgccaacgccttcaacaacagcattatccccgaggacacattcttcccaagcagcgacgtgccctgcgacgtgaagctggtggaaaagagcttcgagacagacaccaacctgaacttccagaacctgagcgtgatcggcttcagaatcctgctgctgaaagtggccggctttaacctgctgatgaccctgcggctgtggtccagccgcgccaagagaagcggatctggcgtgaagcagaccctgaatttcgacctgctgaagctggctggcgacgtggaatccaacccaggccctactagtatggactggatttggcgcatccttttccttgtcggcgctgctaccggcgcccattccgggccccaggttcagctgcaagagtctggcggaggacttgctcaagctggcggaagcctgagactgtcttgtgccgcctctggcagaaccttcagcatgggctggtttagacaggcccctggcaaagagagagagttcgtcgccgccatcacatacagcggcggcagcccttactacgcctcttctgtcagaggccggttcaccatcagccgggacaacgccaagaacaccgtgtacctccagatgaacagcctgaagccagaggacaccgccgtgtactactgtgccgccaatccaacctacggcagcgactggaatgccgagaattggggccagggcacccaagtgacagtgtctagtggatccggcggcggaggatctggcggaggcggatctgggggcggaggctctttcgaacaagttcagcttcaacagcctggcgctgagctggtcaaacctggcgcttctgtgaagatgagctgcaaagccagcggctacgccttcagcagctactggatcaactggatgaagcagaaacccggccagggactcgaatggatcggccaaatctatcccggcgacggcgacaccaactacaacggcaagttcaagggcagagccacactgaccgccgatacctctagcagcacagcctacatgcagctgagcagcctgaccagcgaagatagcgccgtgtacttctgtgcccggtccatcacaacagtcgtgggctgcgctatggactattggggccagggaacaagcgtgaccgtgtctagtacgcgtgaggacctgaagaacgtgttcccacctgaggtggccgtgttcgagcctagcaaggccgagatcgcccacacccagaaagccaccctcgtgtgcctggctaccggcttctaccccgaccatgtggaactgtcttggtgggtcaacggcaaagaggtgcacagcggcgtgtgtaccgacccccagccactgaaagaacagcccgccctgaacgacagccggtactgcctgagcagcagactgagagtgtccgccaccttctggcagaacccccggaaccacttcagatgccaggtgcagttctacggcctgagcgagaacgacgagtggacccaggacagagccaagcccgtgacccagatcgtgtctgccgaagcctggggcagagccgattgcggcatcaccagcgccagctaccaccagggcgtgctgagcgccaccatcctgtacgagatcctgctgggcaaggccaccctgtacgccgtgctggtgtctgccctggtgctgatggctatggtcaagcggaaggacagccggggaagggccaagcgatctggatctggagcaacaaacttctcactactcaaacaagcaggtgacgtggaggagaatcccgggccttctagaggccatatgaccgagtacaagcccacggtgcgcctcgccacccgcgacgacgtccccagggccgtacgcaccctcgccgccgcgttcgccgactaccccgccacgcgccacaccgtcgatccggaccgccacatcgagcgggtcaccgagctgcaagaactcttcctcacgcgcgtcgggctcgacatcggcaaggtgtgggtcgcggacgacggcgccgcggtggcggtctggaccacgccggagagcgtcgaagcgggggcggtgttcgccgagatcggcccgcgcatggccgagttgagcggttcccggctggccgcgcagcaacagatggaaggcctcctggcgccgcaccggcccaaggagcccgcgtggttcctggccaccgtcggcgtctcgcccgaccaccagggcaagggtctgggcagcgccgtcgtgctccccggagtggaggcggccgagcgcgccggggtgcccgccttcctggagacctccgcgccccgcaacctccccttctacgagcggctcggcttcaccgtcaccgccgacgtcgaggtgcccgaaggaccgcgcacctggtgcatgacccgcaagcccggtgcctga

SEQ ID NO: 5297 - DNA, 3402 bp, Artificial Sequence
  Synthetic Polynucloetide
atggccttaccagtgaccgccttgctcctgccgctggccttgctgctccacgccgccaggccggaagttcagctgcttgagtctggcggaggactggttcaacctggcggaagcctgagactgtcttgtgccgccagcggcttcatcttcagcagctacgccatgagctgggtccgacaggctcctggaaagggccaagaatgggtttccggcgttagcggcacaggcgtgaacacctactacgccgatagcgtgaagggcagattcaccatcagccgggacaacagcaagaacaccctgtacctccagatgaacagcctgagagccgaggacaccgccgtgtactattgtgcctctggcaaaggctgggacagcggctcttggtacgaggactatagaggccagggcaccctggtcacagtttcttcaggtaccggcggaggcggatctggcggcggaggtagcggtggcggaggatctgaattcgacatccagatgacacagagccctagcagcctgtctgccagcgtgggagacagagtgaccatcacatgcaaggccagcgaccacatcaacaactggctggcctggtatcagcagaagcctggacaggcccctaagctgctgatctacggcgctaccacactggaaacaggcgtgcccagcagattttctggcagcggctctggcaccgactacaccctgacaatatccagcctccagcctgaggacttcgccacctactactgtcagcagagctggaacaccccttggacattcggccagggcaccaagctggaaatcaagagactcgaggacctgaagaacgtgttcccacctgaggtggccgtgttcgagcctagcaaggccgagatcgcccacacccagaaagccaccctcgtgtgcctggctaccggcttctaccccgaccatgtggaactgtcttggtgggtcaacggcaaagaggtgcacagcggcgtgtgtaccgacccccagccactgaaagaacagcccgccctgaacgacagccggtactgcctgagcagcagactgagagtgtccgccaccttctggcagaacccccggaaccacttcagatgccaggtgcagttctacggcctgagcgagaacgacgagtggacccaggacagagccaagcccgtgacccagatcgtgtctgccgaagcctggggcagagccgattgcggcatcaccagcgccagctaccaccagggcgtgctgagcgccaccatcctgtacgagatcctgctgggcaaggccaccctgtacgccgtgctggtgtctgccctggtgctgatggctatggtcaagcggaaggacagccggggaagggccaagcgatctggatctggagcaacaaacttctcactactcaaacaagcaggtgacgtggaggagaatcccgggcctactagtatggactggatttggcgcatccttttccttgtcggcgctgctaccggcgcccattccgggccccaggttcagctgcaagagtctggcggaggacttgctcaagctggcggaagcctgagactgtcttgtgccgcctctggcagaaccttcagcatgggctggtttagacaggcccctggcaaagagagagagttcgtcgccgccatcacatacagcggcggcagcccttactacgcctcttctgtcagaggccggttcaccatcagccgggacaacgccaagaacaccgtgtacctccagatgaacagcctgaagccagaggacaccgccgtgtactactgtgccgccaatccaacctacggcagcgactggaatgccgagaattggggccagggcacccaagtgacagtgtctagtggatccggcggcggaggatctggcggaggcggatctgggggcggaggctctttcgaacaagttcagcttcaacagcctggcgctgagctggtcaaacctggcgcttctgtgaagatgagctgcaaagccagcggctacgccttcagcagctactggatcaactggatgaagcagaaacccggccagggactcgaatggatcggccaaatctatcccggcgacggcgacaccaactacaacggcaagttcaagggcagagccacactgaccgccgatacctctagcagcacagcctacatgcagctgagcagcctgaccagcgaagatagcgccgtgtacttctgtgcccggtccatcacaacagtcgtgggctgcgctatggactattggggccagggaacaagcgtgaccgtgtctagtacgcgtatccagaaccctgatcctgccgtgtaccagctgcgggatagcaagagcagcgacaagagcgtgtgtctgttcaccgacttcgacagccagaccaacgtgtcccagagcaaggactccgacgtgtacatcaccgataagtgcgtgctggacatgcggagcatggacttcaagagcaactccgccgtggcctggtccaacaagtccgatttcgcctgcgccaacgccttcaacaacagcattatccccgaggacacattcttcccaagcagcgacgtgccctgcgacgtgaagctggtggaaaagagcttcgagacagacaccaacctgaacttccagaacctgagcgtgatcggcttcagaatcctgctgctgaaagtggccggctttaacctgctgatgaccctgcggctgtggtccagccgcgccaagagaagcggatctggcgtgaagcagaccctgaatttcgacctgctgaagctggctggcgacgtggaatccaacccaggcccttctagaggccatatgaccgagtacaagcccacggtgcgcctcgccacccgcgacgacgtccccagggccgtacgcaccctcgccgccgcgttcgccgactaccccgccacgcgccacaccgtcgatccggaccgccacatcgagcgggtcaccgagctgcaagaactcttcctcacgcgcgtcgggctcgacatcggcaaggtgtgggtcgcggacgacggcgccgcggtggcggtctggaccacgccggagagcgtcgaagcgggggcggtgttcgccgagatcggcccgcgcatggccgagttgagcggttcccggctggccgcgcagcaacagatggaaggcctcctggcgccgcaccggcccaaggagcccgcgtggttcctggccaccgtcggcgtctcgcccgaccaccagggcaagggtctgggcagcgccgtcgtgctccccggagtggaggcggccgagcgcgccggggtgcccgccttcctggagacctccgcgccccgcaacctccccttctacgagcggctcggcttcaccgtcaccgccgacgtcgaggtgcccgaaggaccgcgcacctggtgcatgacccgcaagcccggtgcctga

SEQ ID NO: 5298 - DNA, 3402 bp, Artificial Sequence
  Synthetic Polynucloetide
atggccttaccagtgaccgccttgctcctgccgctggccttgctgctccacgccgccaggccggaagttcagctgcttgagtctggcggaggactggttcaacctggcggaagcctgagactgtcttgtgccgccagcggcttcatcttcagcagctacgccatgagctgggtccgacaggctcctggaaagggccaagaatgggtttccggcgttagcggcacaggcgtgaacacctactacgccgatagcgtgaagggcagattcaccatcagccgggacaacagcaagaacaccctgtacctccagatgaacagcctgagagccgaggacaccgccgtgtactattgtgcctctggcaaaggctgggacagcggctcttggtacgaggactatagaggccagggcaccctggtcacagtttcttcaggtaccggcggaggcggatctggcggcggaggtagcggtggcggaggatctgaattcgacatccagatgacacagagccctagcagcctgtctgccagcgtgggagacagagtgaccatcacatgcaaggccagcgaccacatcaacaactggctggcctggtatcagcagaagcctggacaggcccctaagctgctgatctacggcgctaccacactggaaacaggcgtgcccagcagattttctggcagcggctctggcaccgactacaccctgacaatatccagcctccagcctgaggacttcgccacctactactgtcagcagagctggaacaccccttggacattcggccagggcaccaagctggaaatcaagagactcgaggacctgaagaacgtgttcccacctgaggtggccgtgttcgagcctagcgaggccgagatcagccacacccagaaagccaccctcgtgtgcctggctaccggcttctaccccgaccatgtggaactgtcttggtgggtcaacggcaaagaggtgcacagcggcgtgtgtaccgacccccagccactgaaagaacagcccgccctgaacgacagccggtactgcctgagcagcagactgagagtgtccgccaccttctggcagaacccccggaaccacttcagatgccaggtgcagttctacggcctgagcgagaacgacgagtggacccaggacagagccaagcccgtgacccagatcgtgtctgccgaagcctggggcagagccgattgcggctttaccagcgagagctaccagcagggcgtgctgagcgccaccatcctgtacgagatcctgctgggcaaggccaccctgtacgccgtgctggtgtctgccctggtgctgatggctatggtcaagcggaaggacagccggggaagggccaagcgatctggatctggagcaacaaacttctcactactcaaacaagcaggtgacgtggaggagaatcccgggcctactagtatggactggatttggcgcatccttttccttgtcggcgctgctaccggcgcccattccgggccccaggttcagctgcaagagtctggcggaggacttgctcaagctggcggaagcctgagactgtcttgtgccgcctctggcagaaccttcagcatgggctggtttagacaggcccctggcaaagagagagagttcgtcgccgccatcacatacagcggcggcagcccttactacgcctcttctgtcagaggccggttcaccatcagccgggacaacgccaagaacaccgtgtacctccagatgaacagcctgaagccagaggacaccgccgtgtactactgtgccgccaatccaacctacggcagcgactggaatgccgagaattggggccagggcacccaagtgacagtgtctagtggatccggcggcggaggatctggcggaggcggatctgggggcggaggctctttcgaacaagttcagcttcaacagcctggcgctgagctggtcaaacctggcgcttctgtgaagatgagctgcaaagccagcggctacgccttcagcagctactggatcaactggatgaagcagaaacccggccagggactcgaatggatcggccaaatctatcccggcgacggcgacaccaactacaacggcaagttcaagggcagagccacactgaccgccgatacctctagcagcacagcctacatgcagctgagcagcctgaccagcgaagatagcgccgtgtacttctgtgcccggtccatcacaacagtcgtgggctgcgctatggactattggggccagggaacaagcgtgaccgtgtctagtacgcgtatccagaaccctgatcctgccgtgtaccagctgcgggatagcaagagcagcgacaagagcgtgtgtctgttcaccgacttcgacagccagaccaacgtgtcccagagcaaggactccgacgtgtacatcaccgataagtgcgtgctggacatgcggagcatggacttcaagagcaactccgccgtggcctggtccaacaagtccgatttcgcctgcgccaacgccttcaacaacagcattatccccgaggacacattcttcccaagccccgagagcagctgcgacgtgaagctggtggaaaagagcttcgagacagacaccaacctgaacttccagaacctgagcgtgatcggcttcagaatcctgctgctgaaagtggccggctttaacctgctgatgaccctgcggctgtggtccagccgcgccaagagaagcggatctggcgtgaagcagaccctgaatttcgacctgctgaagctggctggcgacgtggaatccaacccaggcccttctagaggccatatgaccgagtacaagcccacggtgcgcctcgccacccgcgacgacgtccccagggccgtacgcaccctcgccgccgcgttcgccgactaccccgccacgcgccacaccgtcgatccggaccgccacatcgagcgggtcaccgagctgcaagaactcttcctcacgcgcgtcgggctcgacatcggcaaggtgtgggtcgcggacgacggcgccgcggtggcggtctggaccacgccggagagcgtcgaagcgggggcggtgttcgccgagatcggcccgcgcatggccgagttgagcggttcccggctggccgcgcagcaacagatggaaggcctcctggcgccgcaccggcccaaggagcccgcgtggttcctggccaccgtcggcgtctcgcccgaccaccagggcaagggtctgggcagcgccgtcgtgctccccggagtggaggcggccgagcgcgccggggtgcccgccttcctggagacctccgcgccccgcaacctccccttctacgagcggctcggcttcaccgtcaccgccgacgtcgaggtgcccgaaggaccgcgcacctggtgcatgacccgcaagcccggtgcctga

SEQ ID NO: 5299 - DNA, 2700 bp, Artificial Sequence
  Synthetic Polynucloetide
atggccttaccagtgaccgccttgctcctgccgctggccttgctgctccacgccgccaggccggaagttcagctgcttgagtctggcggaggactggttcaacctggcggaagcctgagactgtcttgtgccgccagcggcttcatcttcagcagctacgccatgagctgggtccgacaggctcctggaaagggccaagaatgggtttccggcgttagcggcacaggcgtgaacacctactacgccgatagcgtgaagggcagattcaccatcagccgggacaacagcaagaacaccctgtacctccagatgaacagcctgagagccgaggacaccgccgtgtactattgtgcctctggcaaaggctgggacagcggctcttggtacgaggactatagaggccagggcaccctggtcacagtttcttcaggtaccggcggaggcggatctggcggcggaggtagcggtggcggaggatctgaattcgacatccagatgacacagagccctagcagcctgtctgccagcgtgggagacagagtgaccatcacatgcaaggccagcgaccacatcaacaactggctggcctggtatcagcagaagcctggacaggcccctaagctgctgatctacggcgctaccacactggaaacaggcgtgcccagcagattttctggcagcggctctggcaccgactacaccctgacaatatccagcctccagcctgaggacttcgccacctactactgtcagcagagctggaacaccccttggacattcggccagggcaccaagctggaaatcaagagactcgaggacctgaagaacgtgttcccacctgaggtggccgtgttcgagcctagcgaggccgagatcagccacacccagaaagccaccctcgtgtgcctggctaccggcttctaccccgaccatgtggaactgtcttggtgggtcaacggcaaagaggtgcacagcggcgtgtgtaccgacccccagccactgaaagaacagcccgccctgaacgacagccggtactgcctgagcagcagactgagagtgtccgccaccttctggcagaacccccggaaccacttcagatgccaggtgcagttctacggcctgagcgagaacgacgagtggacccaggacagagccaagcccgtgacccagatcgtgtctgccgaagcctggggcagagccgattgcggctttaccagcgagagctaccagcagggcgtgctgagcgccaccatcctgtacgagatcctgctgggcaaggccaccctgtacgccgtgctggtgtctgccctggtgctgatggctatggtcaagcggaaggacagccggggaagggccaagcgatctggatctggagcaacaaacttctcactactcaaacaagcaggtgacgtggaggagaatcccgggcctactagtatggactggatttggcgcatccttttccttgtcggcgctgctaccggcgcccattccgggccccaggttcagctgcaagagtctggcggaggacttgctcaagctggcggaagcctgagactgtcttgtgccgcctctggcagaaccttcagcatgggctggtttagacaggcccctggcaaagagagagagttcgtcgccgccatcacatacagcggcggcagcccttactacgcctcttctgtcagaggccggttcaccatcagccgggacaacgccaagaacaccgtgtacctccagatgaacagcctgaagccagaggacaccgccgtgtactactgtgccgccaatccaacctacggcagcgactggaatgccgagaattggggccagggcacccaagtgacagtgtctagtggatccggcggcggaggatctggcggaggcggatctgggggcggaggctctttcgaacaagttcagcttcaacagcctggcgctgagctggtcaaacctggcgcttctgtgaagatgagctgcaaagccagcggctacgccttcagcagctactggatcaactggatgaagcagaaacccggccagggactcgaatggatcggccaaatctatcccggcgacggcgacaccaactacaacggcaagttcaagggcagagccacactgaccgccgatacctctagcagcacagcctacatgcagctgagcagcctgaccagcgaagatagcgccgtgtacttctgtgcccggtccatcacaacagtcgtgggctgcgctatggactattggggccagggaacaagcgtgaccgtgtctagtacgcgtatccagaaccctgatcctgccgtgtaccagctgcgggatagcaagagcagcgacaagagcgtgtgtctgttcaccgacttcgacagccagaccaacgtgtcccagagcaaggactccgacgtgtacatcaccgataagtgcgtgctggacatgcggagcatggacttcaagagcaactccgccgtggcctggtccaacaagtccgatttcgcctgcgccaacgccttcaacaacagcattatccccgaggacacattcttcccaagccccgagagcagctgcgacgtgaagctggtggaaaagagcttcgagacagacaccaacctgaacttccagaacctgagcgtgatcggcttcagaatcctgctgctgaaagtggccggctttaacctgctgatgaccctgcggctgtggtccagc

SEQ ID NO: 5300 - DNA, 3375 bp, Artificial Sequence
  Synthetic Polynucloetide
atggccttaccagtgaccgccttgctcctgccgctggccttgctgctccacgccgccaggccggaagttcagctgcttgagtctggcggaggactggttcaacctggcggaagcctgagactgtcttgtgccgccagcggcttcatcttcagcagctacgccatgagctgggtccgacaggctcctggaaagggccaagaatgggtttccggcgttagcggcacaggcgtgaacacctactacgccgatagcgtgaagggcagattcaccatcagccgggacaacagcaagaacaccctgtacctccagatgaacagcctgagagccgaggacaccgccgtgtactattgtgcctctggcaaaggctgggacagcggctcttggtacgaggactatagaggccagggcaccctggtcacagtttcttcaggtaccggcggaggcggatctggcggcggaggtagcggtggcggaggatctgaattcgacatccagatgacacagagccctagcagcctgtctgccagcgtgggagacagagtgaccatcacatgcaaggccagcgaccacatcaacaactggctggcctggtatcagcagaagcctggacaggcccctaagctgctgatctacggcgctaccacactggaaacaggcgtgcccagcagattttctggcagcggctctggcaccgactacaccctgacaatatccagcctccagcctgaggacttcgccacctactactgtcagcagagctggaacaccccttggacattcggccagggcaccaagctggaaatcaagagactcgaggacctgaagaacgtgttcccacctgaggtggccgtgttcgagcctagcgaggccgagatcagccacacccagaaagccaccctcgtgtgcctggctaccggcttctaccccgaccatgtggaactgtcttggtgggtcaacggcaaagaggtgcacagcggcgtgtgtaccgacccccagccactgaaagaacagcccgccctgaacgacagccggtactgcctgagcagcagactgagagtgtccgccaccttctggcagaacccccggaaccacttcagatgccaggtgcagttctacggcctgagcgagaacgacgagtggacccaggacagagccaagcccgtgacccagatcgtgtctgccgaagcctggggcagagccgattgcggctttaccagcgagagctaccagcagggcgtgctgagcgccaccatcctgtacgagatcctgctgggcaaggccaccctgtacgccgtgctggtgtctgccctggtgctgatggctatggtcaagcggaaggacagccggggaagggccaagcgatctggatctggagcaacaaacttctcactactcaaacaagcaggtgacgtggaggagaatcccgggcctactagtatggactggatttggcgcatccttttccttgtcggcgctgctaccggcgcccattccgggccccaggttcagctgcaagagtctggcggaggacttgctcaagctggcggaagcctgagactgtcttgtgccgcctctggcagaaccttcagcatgggctggtttagacaggcccctggcaaagagagagagttcgtcgccgccatcacatacagcggcggcagcccttactacgcctcttctgtcagaggccggttcaccatcagccgggacaacgccaagaacaccgtgtacctccagatgaacagcctgaagccagaggacaccgccgtgtactactgtgccgccaatccaacctacggcagcgactggaatgccgagaattggggccagggcacccaagtgacagtgtctagtggatccggcggcggaggatctggcggaggcggatctgggggcggaggctctttcgaacaagttcagcttcaacagcctggcgctgagctggtcaaacctggcgcttctgtgaagatgagctgcaaagccagcggctacgccttcagcagctactggatcaactggatgaagcagaaacccggccagggactcgaatggatcggccaaatctatcccggcgacggcgacaccaactacaacggcaagttcaagggcagagccacactgaccgccgatacctctagcagcacagcctacatgcagctgagcagcctgaccagcgaagatagcgccgtgtacttctgtgcccggtccatcacaacagtcgtgggctgcgctatggactattggggccagggaacaagcgtgaccgtgtctagtacgcgtatccagaaccctgatcctgccgtgtaccagctgcgggatagcaagagcagcgacaagagcgtgtgtctgttcaccgacttcgacagccagaccaacgtgtcccagagcaaggactccgacgtgtacatcaccgataagtgcgtgctggacatgcggagcatggacttcaagagcaactccgccgtggcctggtccaacaagtccgatttcgcctgcgccaacgccttcaacaacagcattatccccgaggacacattcttcccaagccccgagagcagctgcgacgtgaagctggtggaaaagagcttcgagacagacaccaacctgaacttccagaacctgagcgtgatcggcttcagaatcctgctgctgaaagtggccggctttaacctgctgatgaccctgcggctgtggtccagccgcgccaagagaagcggatctggcgtgaagcagaccctgaatttcgacctgctgaagctggctggcgacgtggaatccaacccaggcccttctagaggcgggatccacaccatggctacctacgaggtgctgtgcgaggtggcaagaaagctgggcaccgacgacagagaagtggtgctgttcctgctgaacgtgttcatccctcagcctacactggcccagctgatcggtgcactgagagccctgaaagaggaaggccggctgacctttcctctgctggccgaatgcctgttcagagccggaagaagggatctgctgcgggacctgctgcatctggaccccagatttctggaaagacacctggccggcaccatgagctacttcagcccttaccagctgaccgtgctgcacgttgacggcgaactgtgcgccagagatattcggagcctgatcttcctgagcaaggacaccatcggcagccggtctacccctcagacatttctgcactgggtgtactgcatggaaaacctggacctgctcggccccacagatgtggatgccctgatgtccatgctgagaagcctgagcagagtggacctccagagacaggtgcagacactgatgggactgcacctgagcggacctagccacagccagcactacagacacacccct

SEQ ID NO: 5301 - DNA, 2712 bp, Artificial Sequence
  Synthetic Polynucloetide
atggccttaccagtgaccgccttgctcctgccgctggccttgctgctccacgccgccaggccggaagttcagctgcttgagtctggcggaggactggttcaacctggcggaagcctgagactgtcttgtgccgccagcggcttcatcttcagcagctacgccatgagctgggtccgacaggctcctggaaagggccaagaatgggtttccggcgttagcggcacaggcgtgaacacctactacgccgatagcgtgaagggcagattcaccatcagccgggacaacagcaagaacaccctgtacctccagatgaacagcctgagagccgaggacaccgccgtgtactattgtgcctctggcaaaggctgggacagcggctcttggtacgaggactatagaggccagggcaccctggtcacagtttcttcaggtaccggcggaggcggatctggcggcggaggtagcggtggcggaggatctgaattcgacatccagatgacacagagccctagcagcctgtctgccagcgtgggagacagagtgaccatcacatgcaaggccagcgaccacatcaacaactggctggcctggtatcagcagaagcctggacaggcccctaagctgctgatctacggcgctaccacactggaaacaggcgtgcccagcagattttctggcagcggctctggcaccgactacaccctgacaatatccagcctccagcctgaggacttcgccacctactactgtcagcagagctggaacaccccttggacattcggccagggcaccaagctggaaatcaagagactcgagatccagaaccctgatcctgccgtgtaccagctgcgggatagcaagagcagcgacaagagcgtgtgtctgttcaccgacttcgacagccagaccaacgtgtcccagagcaaggactccgacgtgtacatcaccgataagtgcgtgctggacatgcggagcatggacttcaagagcaactccgccgtggcctggtccaacaagtccgatttcgcctgcgccaacgccttcaacaacagcattatccccgaggacacattcttcccaagccccgagagcagctgcgacgtgaagctggtggaaaagagcttcgagacagacaccaacctgaacttccagaacctgagcgtgatcggcttcagaatcctgctgctgaaagtggccggctttaacctgctgatgaccctgcggctgtggtccagccgcgccaagagaagcggatctggcgtgaagcagaccctgaatttcgacctgctgaagctggctggcgacgtggaatccaacccaggccctactagtatggactggatttggcgcatccttttccttgtcggcgctgctaccggcgcccattccgggccccaggttcagctgcaagagtctggcggaggacttgctcaagctggcggaagcctgagactgtcttgtgccgcctctggcagaaccttcagcatgggctggtttagacaggcccctggcaaagagagagagttcgtcgccgccatcacatacagcggcggcagcccttactacgcctcttctgtcagaggccggttcaccatcagccgggacaacgccaagaacaccgtgtacctccagatgaacagcctgaagccagaggacaccgccgtgtactactgtgccgccaatccaacctacggcagcgactggaatgccgagaattggggccagggcacccaagtgacagtgtctagtggatccggcggcggaggatctggcggaggcggatctgggggcggaggctctttcgaacaagttcagcttcaacagcctggcgctgagctggtcaaacctggcgcttctgtgaagatgagctgcaaagccagcggctacgccttcagcagctactggatcaactggatgaagcagaaacccggccagggactcgaatggatcggccaaatctatcccggcgacggcgacaccaactacaacggcaagttcaagggcagagccacactgaccgccgatacctctagcagcacagcctacatgcagctgagcagcctgaccagcgaagatagcgccgtgtacttctgtgcccggtccatcacaacagtcgtgggctgcgctatggactattggggccagggaacaagcgtgaccgtgtctagtacgcgtgaggacctgaagaacgtgttcccacctgaggtggccgtgttcgagcctagcgaggccgagatcagccacacccagaaagccaccctcgtgtgcctggctaccggcttctaccccgaccatgtggaactgtcttggtgggtcaacggcaaagaggtgcacagcggcgtgtgtaccgacccccagccactgaaagaacagcccgccctgaacgacagccggtactgcctgagcagcagactgagagtgtccgccaccttctggcagaacccccggaaccacttcagatgccaggtgcagttctacggcctgagcgagaacgacgagtggacccaggacagagccaagcccgtgacccagatcgtgtctgccgaagcctggggcagagccgattgcggctttaccagcgagagctaccagcagggcgtgctgagcgccaccatcctgtacgagatcctgctgggcaaggccaccctgtacgccgtgctggtgtctgccctggtgctgatggctatggtcaagcggaaggacagccgggga

SEQ ID NO: 5302 - DNA, 3378 bp, Artificial Sequence
  Synthetic Polynucloetide
atggccttaccagtgaccgccttgctcctgccgctggccttgctgctccacgccgccaggccggaagttcagctgcttgagtctggcggaggactggttcaacctggcggaagcctgagactgtcttgtgccgccagcggcttcatcttcagcagctacgccatgagctgggtccgacaggctcctggaaagggccaagaatgggtttccggcgttagcggcacaggcgtgaacacctactacgccgatagcgtgaagggcagattcaccatcagccgggacaacagcaagaacaccctgtacctccagatgaacagcctgagagccgaggacaccgccgtgtactattgtgcctctggcaaaggctgggacagcggctcttggtacgaggactatagaggccagggcaccctggtcacagtttcttcaggtaccggcggaggcggatctggcggcggaggtagcggtggcggaggatctgaattcgacatccagatgacacagagccctagcagcctgtctgccagcgtgggagacagagtgaccatcacatgcaaggccagcgaccacatcaacaactggctggcctggtatcagcagaagcctggacaggcccctaagctgctgatctacggcgctaccacactggaaacaggcgtgcccagcagattttctggcagcggctctggcaccgactacaccctgacaatatccagcctccagcctgaggacttcgccacctactactgtcagcagagctggaacaccccttggacattcggccagggcaccaagctggaaatcaagagactcgagatccagaaccctgatcctgccgtgtaccagctgcgggatagcaagagcagcgacaagagcgtgtgtctgttcaccgacttcgacagccagaccaacgtgtcccagagcaaggactccgacgtgtacatcaccgataagtgcgtgctggacatgcggagcatggacttcaagagcaactccgccgtggcctggtccaacaagtccgatttcgcctgcgccaacgccttcaacaacagcattatccccgaggacacattcttcccaagccccgagagcagctgcgacgtgaagctggtggaaaagagcttcgagacagacaccaacctgaacttccagaacctgagcgtgatcggcttcagaatcctgctgctgaaagtggccggctttaacctgctgatgaccctgcggctgtggtccagccgcgccaagagaagcggatctggcgtgaagcagaccctgaatttcgacctgctgaagctggctggcgacgtggaatccaacccaggccctactagtatggactggatttggcgcatccttttccttgtcggcgctgctaccggcgcccattccgggccccaggttcagctgcaagagtctggcggaggacttgctcaagctggcggaagcctgagactgtcttgtgccgcctctggcagaaccttcagcatgggctggtttagacaggcccctggcaaagagagagagttcgtcgccgccatcacatacagcggcggcagcccttactacgcctcttctgtcagaggccggttcaccatcagccgggacaacgccaagaacaccgtgtacctccagatgaacagcctgaagccagaggacaccgccgtgtactactgtgccgccaatccaacctacggcagcgactggaatgccgagaattggggccagggcacccaagtgacagtgtctagtggatccggcggcggaggatctggcggaggcggatctgggggcggaggctctttcgaacaagttcagcttcaacagcctggcgctgagctggtcaaacctggcgcttctgtgaagatgagctgcaaagccagcggctacgccttcagcagctactggatcaactggatgaagcagaaacccggccagggactcgaatggatcggccaaatctatcccggcgacggcgacaccaactacaacggcaagttcaagggcagagccacactgaccgccgatacctctagcagcacagcctacatgcagctgagcagcctgaccagcgaagatagcgccgtgtacttctgtgcccggtccatcacaacagtcgtgggctgcgctatggactattggggccagggaacaagcgtgaccgtgtctagtacgcgtgaggacctgaagaacgtgttcccacctgaggtggccgtgttcgagcctagcgaggccgagatcagccacacccagaaagccaccctcgtgtgcctggctaccggcttctaccccgaccatgtggaactgtcttggtgggtcaacggcaaagaggtgcacagcggcgtgtgtaccgacccccagccactgaaagaacagcccgccctgaacgacagccggtactgcctgagcagcagactgagagtgtccgccaccttctggcagaacccccggaaccacttcagatgccaggtgcagttctacggcctgagcgagaacgacgagtggacccaggacagagccaagcccgtgacccagatcgtgtctgccgaagcctggggcagagccgattgcggctttaccagcgagagctaccagcagggcgtgctgagcgccaccatcctgtacgagatcctgctgggcaaggccaccctgtacgccgtgctggtgtctgccctggtgctgatggctatggtcaagcggaaggacagccggggaagggccaagcgatctggatctggagcaacaaacttctcactactcaaacaagcaggtgacgtggaggagaatcccgggccttctagaggcgggatccacaccatggctacctacgaggtgctgtgcgaggtggcaagaaagctgggcaccgacgacagagaagtggtgctgttcctgctgaacgtgttcatccctcagcctacactggcccagctgatcggtgcactgagagccctgaaagaggaaggccggctgacctttcctctgctggccgaatgcctgttcagagccggaagaagggatctgctgcgggacctgctgcatctggaccccagatttctggaaagacacctggccggcaccatgagctacttcagcccttaccagctgaccgtgctgcacgttgacggcgaactgtgcgccagagatattcggagcctgatcttcctgagcaaggacaccatcggcagccggtctacccctcagacatttctgcactgggtgtactgcatggaaaacctggacctgctcggccccacagatgtggatgccctgatgtccatgctgagaagcctgagcagagtggacctccagagacaggtgcagacactgatgggactgcacctgagcggacctagccacagccagcactacagacacacccct

SEQ ID NO: 5303 - DNA, 3402 bp, Artificial Sequence
  Synthetic Polynucloetide
atggccttaccagtgaccgccttgctcctgccgctggccttgctgctccacgccgccaggccggaagttcagctgcttgagtctggcggaggactggttcaacctggcggaagcctgagactgtcttgtgccgccagcggcttcatcttcagcagctacgccatgagctgggtccgacaggctcctggaaagggccaagaatgggtttccggcgttagcggcacaggcgtgaacacctactacgccgatagcgtgaagggcagattcaccatcagccgggacaacagcaagaacaccctgtacctccagatgaacagcctgagagccgaggacaccgccgtgtactattgtgcctctggcaaaggctgggacagcggctcttggtacgaggactatagaggccagggcaccctggtcacagtttcttcaggtaccggcggaggcggatctggcggcggaggtagcggtggcggaggatctgaattcgacatccagatgacacagagccctagcagcctgtctgccagcgtgggagacagagtgaccatcacatgcaaggccagcgaccacatcaacaactggctggcctggtatcagcagaagcctggacaggcccctaagctgctgatctacggcgctaccacactggaaacaggcgtgcccagcagattttctggcagcggctctggcaccgactacaccctgacaatatccagcctccagcctgaggacttcgccacctactactgtcagcagagctggaacaccccttggacattcggccagggcaccaagctggaaatcaagagactcgaggacctgaagaacgtgttcccacctgaggtggccgtgttcgagcctagcgaggccgagatcagccacacccagaaagccaccctcgtgtgcctggctaccggcttctaccccgaccatgtggaactgtcttggtgggtcaacggcaaagaggtgcacagcggcgtgtctaccgacccccagccactgaaagaacagcccgccctgaacgacagccggtactgcctgagcagcagactgagagtgtccgccaccttctggcagaacccccggaaccacttcagatgccaggtgcagttctacggcctgagcgagaacgacgagtggacccaggacagagccaagcccgtgacccagatcgtgtctgccgaagcctggggcagagccgattgcggctttaccagcgagagctaccagcagggcgtgctgagcgccaccatcctgtacgagatcctgctgggcaaggccaccctgtacgccgtgctggtgtctgccctggtgctgatggctatggtcaagcggaaggacagccggggaagggccaagcgatctggatctggagcaacaaacttctcactactcaaacaagcaggtgacgtggaggagaatcccgggcctactagtatggactggatttggcgcatccttttccttgtcggcgctgctaccggcgcccattccgggccccaggttcagctgcaagagtctggcggaggacttgctcaagctggcggaagcctgagactgtcttgtgccgcctctggcagaaccttcagcatgggctggtttagacaggcccctggcaaagagagagagttcgtcgccgccatcacatacagcggcggcagcccttactacgcctcttctgtcagaggccggttcaccatcagccgggacaacgccaagaacaccgtgtacctccagatgaacagcctgaagccagaggacaccgccgtgtactactgtgccgccaatccaacctacggcagcgactggaatgccgagaattggggccagggcacccaagtgacagtgtctagtggatccggcggcggaggatctggcggaggcggatctgggggcggaggctctttcgaacaagttcagcttcaacagcctggcgctgagctggtcaaacctggcgcttctgtgaagatgagctgcaaagccagcggctacgccttcagcagctactggatcaactggatgaagcagaaacccggccagggactcgaatggatcggccaaatctatcccggcgacggcgacaccaactacaacggcaagttcaagggcagagccacactgaccgccgatacctctagcagcacagcctacatgcagctgagcagcctgaccagcgaagatagcgccgtgtacttctgtgcccggtccatcacaacagtcgtgggctgcgctatggactattggggccagggaacaagcgtgaccgtgtctagtacgcgtatccagaaccctgatcctgccgtgtaccagctgcgggatagcaagagcagcgacaagagcgtgtgtctgttcaccgacttcgacagccagaccaacgtgtcccagagcaaggactccgacgtgtacatcaccgataagaccgtgctggacatgcggagcatggacttcaagagcaactccgccgtggcctggtccaacaagtccgatttcgcctgcgccaacgccttcaacaacagcattatccccgaggacacattcttcccaagccccgagagcagctgcgacgtgaagctggtggaaaagagcttcgagacagacaccaacctgaacttccagaacctgagcgtgatcggcttcagaatcctgctgctgaaagtggccggctttaacctgctgatgaccctgcggctgtggtccagccgcgccaagagaagcggatctggcgtgaagcagaccctgaatttcgacctgctgaagctggctggcgacgtggaatccaacccaggcccttctagaggccatatgaccgagtacaagcccacggtgcgcctcgccacccgcgacgacgtccccagggccgtacgcaccctcgccgccgcgttcgccgactaccccgccacgcgccacaccgtcgatccggaccgccacatcgagcgggtcaccgagctgcaagaactcttcctcacgcgcgtcgggctcgacatcggcaaggtgtgggtcgcggacgacggcgccgcggtggcggtctggaccacgccggagagcgtcgaagcgggggcggtgttcgccgagatcggcccgcgcatggccgagttgagcggttcccggctggccgcgcagcaacagatggaaggcctcctggcgccgcaccggcccaaggagcccgcgtggttcctggccaccgtcggcgtctcgcccgaccaccagggcaagggtctgggcagcgccgtcgtgctccccggagtggaggcggccgagcgcgccggggtgcccgccttcctggagacctccgcgccccgcaacctccccttctacgagcggctcggcttcaccgtcaccgccgacgtcgaggtgcccgaaggaccgcgcacctggtgcatgacccgcaagcccggtgcctga

SEQ ID NO: 5304 - DNA, 3648 bp, Artificial Sequence
  Synthetic Polynucloetide
atggccttaccagtgaccgccttgctcctgccgctggccttgctgctccacgccgccaggccggaagttcagctgcttgagtctggcggaggactggttcaacctggcggaagcctgagactgtcttgtgccgccagcggcttcatcttcagcagctacgccatgagctgggtccgacaggctcctggaaagggccaagaatgggtttccggcgttagcggcacaggcgtgaacacctactacgccgatagcgtgaagggcagattcaccatcagccgggacaacagcaagaacaccctgtacctccagatgaacagcctgagagccgaggacaccgccgtgtactattgtgcctctggcaaaggctgggacagcggctcttggtacgaggactatagaggccagggcaccctggtcacagtttcttcaggtaccggcggaggcggatctggcggcggaggtagcggtggcggaggatctgaattcgacatccagatgacacagagccctagcagcctgtctgccagcgtgggagacagagtgaccatcacatgcaaggccagcgaccacatcaacaactggctggcctggtatcagcagaagcctggacaggcccctaagctgctgatctacggcgctaccacactggaaacaggcgtgcccagcagattttctggcagcggctctggcaccgactacaccctgacaatatccagcctccagcctgaggacttcgccacctactactgtcagcagagctggaacaccccttggacattcggccagggcaccaagctggaaatcaagagactcgaggacctgaagaacgtgttcccacctgaggtggccgtgttcgagcctagcgaggccgagatcagccacacccagaaagccaccctcgtgtgcctggctaccggcttctaccccgaccatgtggaactgtcttggtgggtcaacggcaaagaggtgcacagcggcgtgtctaccgacccccagccactgaaagaacagcccgccctgaacgacagccggtactgcctgagcagcagactgagagtgtccgccaccttctggcagaacccccggaaccacttcagatgccaggtgcagttctacggcctgagcgagaacgacgagtggacccaggacagagccaagcccgtgacccagatcgtgtctgccgaagcctggggcagagccgattgcggctttaccagcgagagctaccagcagggcgtgctgagcgccaccatcctgtacgagatcctgctgggcaaggccaccctgtacgccgtgctggtgtctgccctggtgctgatggctatggtcaagcggaaggacagccggggaagggccaagcgatctggatctggagcaacaaacttctcactactcaaacaagcaggtgacgtggaggagaatcccgggcctactagtatggactggatttggcgcatccttttccttgtcggcgctgctaccggcgcccattccgggccccaggttcagctgcaagagtctggcggaggacttgctcaagctggcggaagcctgagactgtcttgtgccgcctctggcagaaccttcagcatgggctggtttagacaggcccctggcaaagagagagagttcgtcgccgccatcacatacagcggcggcagcccttactacgcctcttctgtcagaggccggttcaccatcagccgggacaacgccaagaacaccgtgtacctccagatgaacagcctgaagccagaggacaccgccgtgtactactgtgccgccaatccaacctacggcagcgactggaatgccgagaattggggccagggcacccaagtgacagtgtctagtggatccggcggcggaggatctggcggaggcggatctgggggcggaggctctttcgaacaagttcagcttcaacagcctggcgctgagctggtcaaacctggcgcttctgtgaagatgagctgcaaagccagcggctacgccttcagcagctactggatcaactggatgaagcagaaacccggccagggactcgaatggatcggccaaatctatcccggcgacggcgacaccaactacaacggcaagttcaagggcagagccacactgaccgccgatacctctagcagcacagcctacatgcagctgagcagcctgaccagcgaagatagcgccgtgtacttctgtgcccggtccatcacaacagtcgtgggctgcgctatggactattggggccagggaacaagcgtgaccgtgtctagtacgcgtgagcagaaactgatctcggaagaggatgggagcggcaccccattcccttctctggcccctcccatcatgctgctggtggacggcaagcagcagatggtggtcgtgtgcctggtgctggatgtggccccacctggactggacagccccatctggtttagcgccggcaatggctctgccctggacgcctttacctacggcccaagccctgccaccgatggcacctggacaaatctggcccacctgagcctgcccagcgaggaactggcttcttgggagcctctcgtgtgccacacaggacctggcgctgagggacacagcagatccacccagcctatgcacctgtctggcgaggccagcaccgccagaacctgtcctcaggaacctctgagaggcacccctggcggagcactgtggctgggagtgctgagactgctgctgttcaagctgctgctgtttgacctgctgctgacctgctcctgtctgtgcgatcctgccggccctctgccttctcctgccaccaccacaagactgagagccctgggcagccacagactgcaccctgccacagagacaggcggcagagaggccacaagcagccctagaccccagcccagagacagaagatggggcgataccccccctggcagaaagcctggatctccagtccgcgccaagagaagcggatctggcgtgaagcagaccctgaatttcgacctgctgaagctggctggcgacgtggaatccaacccaggcccttctagaggccatatgaccgagtacaagcccacggtgcgcctcgccacccgcgacgacgtccccagggccgtacgcaccctcgccgccgcgttcgccgactaccccgccacgcgccacaccgtcgatccggaccgccacatcgagcgggtcaccgagctgcaagaactcttcctcacgcgcgtcgggctcgacatcggcaaggtgtgggtcgcggacgacggcgccgcggtggcggtctggaccacgccggagagcgtcgaagcgggggcggtgttcgccgagatcggcccgcgcatggccgagttgagcggttcccggctggccgcgcagcaacagatggaaggcctcctggcgccgcaccggcccaaggagcccgcgtggttcctggccaccgtcggcgtctcgcccgaccaccagggcaagggtctgggcagcgccgtcgtgctccccggagtggaggcggccgagcgcgccggggtgcccgccttcctggagacctccgcgccccgcaacctccccttctacgagcggctcggcttcaccgtcaccgccgacgtcgaggtgcccgaaggaccgcgcacctggtgcatgacccgcaagcccggtgcctga

SEQ ID NO: 5305 - DNA, 3513 bp, Artificial Sequence
  Synthetic Polynucloetide
atggccttaccagtgaccgccttgctcctgccgctggccttgctgctccacgccgccaggccggaagttcagctgcttgagtctggcggaggactggttcaacctggcggaagcctgagactgtcttgtgccgccagcggcttcatcttcagcagctacgccatgagctgggtccgacaggctcctggaaagggccaagaatgggtttccggcgttagcggcacaggcgtgaacacctactacgccgatagcgtgaagggcagattcaccatcagccgggacaacagcaagaacaccctgtacctccagatgaacagcctgagagccgaggacaccgccgtgtactattgtgcctctggcaaaggctgggacagcggctcttggtacgaggactatagaggccagggcaccctggtcacagtttcttcaggtaccggcggaggcggatctggcggcggaggtagcggtggcggaggatctgaattcgacatccagatgacacagagccctagcagcctgtctgccagcgtgggagacagagtgaccatcacatgcaaggccagcgaccacatcaacaactggctggcctggtatcagcagaagcctggacaggcccctaagctgctgatctacggcgctaccacactggaaacaggcgtgcccagcagattttctggcagcggctctggcaccgactacaccctgacaatatccagcctccagcctgaggacttcgccacctactactgtcagcagagctggaacaccccttggacattcggccagggcaccaagctggaaatcaagagactcgaggggaaaccaattcccaaccctcttctgggactggattcaaccggcagcggcgacaagcagctggacgccgacgtgtcccccaagcctaccatcttcctgccctctatcgccgagacaaagctccagaaggccggcacctacctgtgcctgctggaaaagttcttcccagatgtgattaagatccactggcaggaaaagaagtccaacaccatcctgggcagccaggaaggcaacaccatgaagaccaacgacacctacatgaagttcagctggctgaccgtgcccgagaagtccctggacaaagaacacagatgcatcgtgcggcacgaaaacaacaagaacggcgtggaccaggaaatcatcttcccacccatcaagaccgatgtgattacaatggaccccaaggacaactgctccaaggacgccaacgataccctgctgctccagctgaccaacaccagcgcctactacatgtacttgttgctgctgctgaagtccgtggtgtacttcgccatcatcacatgctgcctgctgcggagaaccgccttctgctgcaacggcgagaagtctagggccaagcgatctggatctggagcaacaaacttctcactactcaaacaagcaggtgacgtggaggagaatcccgggcctactagtatggactggatttggcgcatccttttccttgtcggcgctgctaccggcgcccattccgggccccaggttcagctgcaagagtctggcggaggacttgctcaagctggcggaagcctgagactgtcttgtgccgcctctggcagaaccttcagcatgggctggtttagacaggcccctggcaaagagagagagttcgtcgccgccatcacatacagcggcggcagcccttactacgcctcttctgtcagaggccggttcaccatcagccgggacaacgccaagaacaccgtgtacctccagatgaacagcctgaagccagaggacaccgccgtgtactactgtgccgccaatccaacctacggcagcgactggaatgccgagaattggggccagggcacccaagtgacagtgtctagtggatccggcggcggaggatctggcggaggcggatctgggggcggaggctctttcgaacaagttcagcttcaacagcctggcgctgagctggtcaaacctggcgcttctgtgaagatgagctgcaaagccagcggctacgccttcagcagctactggatcaactggatgaagcagaaacccggccagggactcgaatggatcggccaaatctatcccggcgacggcgacaccaactacaacggcaagttcaagggcagagccacactgaccgccgatacctctagcagcacagcctacatgcagctgagcagcctgaccagcgaagatagcgccgtgtacttctgtgcccggtccatcacaacagtcgtgggctgcgctatggactattggggccagggaacaagcgtgaccgtgtctagtacgcgtgagcagaaactgatctcggaagaggatgggagcggcagccagcctcacaccaagcccagcgtgttcgtgatgaagaacggcaccaacgtggcctgcctcgtgaaagagttctaccccaaggacatcaggatcaacctggtgtccagcaagaagatcaccgagttcgaccccgccatcgtgatctcccccagcggcaagtacaacgccgtgaagctggggaagtacgaggacagcaacagcgtgacctgctccgtgcagcacgacaacaagaccgtgcacagcaccgactttgaagtgaaaaccgactccaccgaccacgtgaagcccaaagagacagagaacaccaagcagcccagcaagagctgccacaagcccaaggccatcgtgcacaccgagaaagtgaacatgatgagcctgaccgtgctgggcctgcggatgctgttcgccaaaaccgtggccgtgaacttcctgctgaccgccaagctgttcttcctccgcgccaagagaagcggatctggcgtgaagcagaccctgaatttcgacctgctgaagctggctggcgacgtggaatccaacccaggcccttctagaggccatatgaccgagtacaagcccacggtgcgcctcgccacccgcgacgacgtccccagggccgtacgcaccctcgccgccgcgttcgccgactaccccgccacgcgccacaccgtcgatccggaccgccacatcgagcgggtcaccgagctgcaagaactcttcctcacgcgcgtcgggctcgacatcggcaaggtgtgggtcgcggacgacggcgccgcggtggcggtctggaccacgccggagagcgtcgaagcgggggcggtgttcgccgagatcggcccgcgcatggccgagttgagcggttcccggctggccgcgcagcaacagatggaaggcctcctggcgccgcaccggcccaaggagcccgcgtggttcctggccaccgtcggcgtctcgcccgaccaccagggcaagggtctgggcagcgccgtcgtgctccccggagtggaggcggccgagcgcgccggggtgcccgccttcctggagacctccgcgccccgcaacctccccttctacgagcggctcggcttcaccgtcaccgccgacgtcgaggtgcccgaaggaccgcgcacctggtgcatgacccgcaagcccggtgcctga

SEQ ID NO: 5306 - DNA, 2724 bp, Artificial Sequence
  Synthetic Polynucloetide
atggccttaccagtgaccgccttgctcctgccgctggccttgctgctccacgccgccaggccggaagttcagctgcttgagtctggcggaggactggttcaacctggcggaagcctgagactgtcttgtgccgccagcggcttcatcttcagcagctacgccatgagctgggtccgacaggctcctggaaagggccaagaatgggtttccggcgttagcggcacaggcgtgaacacctactacgccgatagcgtgaagggcagattcaccatcagccgggacaacagcaagaacaccctgtacctccagatgaacagcctgagagccgaggacaccgccgtgtactattgtgcctctggcaaaggctgggacagcggctcttggtacgaggactatagaggccagggcaccctggtcacagtttcttcaggtaccggcggaggcggatctggcggcggaggtagcggtggcggaggatctgaattcgacatccagatgacacagagccctagcagcctgtctgccagcgtgggagacagagtgaccatcacatgcaaggccagcgaccacatcaacaactggctggcctggtatcagcagaagcctggacaggcccctaagctgctgatctacggcgctaccacactggaaacaggcgtgcccagcagattttctggcagcggctctggcaccgactacaccctgacaatatccagcctccagcctgaggacttcgccacctactactgtcagcagagctggaacaccccttggacattcggccagggcaccaagctggaaatcaagagactcgagagccagcctcacaccaagcccagcgtgttcgtgatgaagaacggcaccaacgtggcctgcctcgtgaaagagttctaccccaaggacatcaggatcaacctggtgtccagcaagaagatcaccgagttcgaccccgccatcgtgatctcccccagcggcaagtacaacgccgtgaagctggggaagtacgaggacagcaacagcgtgacctgctccgtgcagcacgacaacaagaccgtgcacagcaccgactttgaagtgaaaaccgactccaccgaccacgtgaagcccaaagagacagagaacaccaagcagcccagcaagagctgccacaagcccaaggccatcgtgcacaccgagaaagtgaacatgatgagcctgaccgtgctgggcctgcggatgctgttcgccaaaaccgtggccgtgaacttcctgctgaccgccaagctgttcttcctcagggccaagcgatctggatctggagcaacaaacttctcactactcaaacaagcaggtgacgtggaggagaatcccgggcctactagtatggactggatttggcgcatccttttccttgtcggcgctgctaccggcgcccattccgggccccaggttcagctgcaagagtctggcggaggacttgctcaagctggcggaagcctgagactgtcttgtgccgcctctggcagaaccttcagcatgggctggtttagacaggcccctggcaaagagagagagttcgtcgccgccatcacatacagcggcggcagcccttactacgcctcttctgtcagaggccggttcaccatcagccgggacaacgccaagaacaccgtgtacctccagatgaacagcctgaagccagaggacaccgccgtgtactactgtgccgccaatccaacctacggcagcgactggaatgccgagaattggggccagggcacccaagtgacagtgtctagtggatccggcggcggaggatctggcggaggcggatctgggggcggaggctctttcgaacaagttcagcttcaacagcctggcgctgagctggtcaaacctggcgcttctgtgaagatgagctgcaaagccagcggctacgccttcagcagctactggatcaactggatgaagcagaaacccggccagggactcgaatggatcggccaaatctatcccggcgacggcgacaccaactacaacggcaagttcaagggcagagccacactgaccgccgatacctctagcagcacagcctacatgcagctgagcagcctgaccagcgaagatagcgccgtgtacttctgtgcccggtccatcacaacagtcgtgggctgcgctatggactattggggccagggaacaagcgtgaccgtgtctagtacgcgtgacaagcagctggacgccgacgtgtcccccaagcctaccatcttcctgccctctatcgccgagacaaagctccagaaggccggcacctacctgtgcctgctggaaaagttcttcccagatgtgattaagatccactggcaggaaaagaagtccaacaccatcctgggcagccaggaaggcaacaccatgaagaccaacgacacctacatgaagttcagctggctgaccgtgcccgagaagtccctggacaaagaacacagatgcatcgtgcggcacgaaaacaacaagaacggcgtggaccaggaaatcatcttcccacccatcaagaccgatgtgattacaatggaccccaaggacaactgctccaaggacgccaacgataccctgctgctccagctgaccaacaccagcgcctactacatgtacttgttgctgctgctgaagtccgtggtgtacttcgccatcatcacatgctgcctgctgcggagaaccgccttctgctgcaacggcgagaagtct

SEQ ID NO: 5307 - DNA, 3933 bp, Artificial Sequence
  Synthetic Polynucloetide
atggccttaccagtgaccgccttgctcctgccgctggccttgctgctccacgccgccaggccggaagttcagctgcttgagtctggcggaggactggttcaacctggcggaagcctgagactgtcttgtgccgccagcggcttcatcttcagcagctacgccatgagctgggtccgacaggctcctggaaagggccaagaatgggtttccggcgttagcggcacaggcgtgaacacctactacgccgatagcgtgaagggcagattcaccatcagccgggacaacagcaagaacaccctgtacctccagatgaacagcctgagagccgaggacaccgccgtgtactattgtgcctctggcaaaggctgggacagcggctcttggtacgaggactatagaggccagggcaccctggtcacagtttcttcaggtaccggcggaggcggatctggcggcggaggtagcggtggcggaggatctgaattcgacatccagatgacacagagccctagcagcctgtctgccagcgtgggagacagagtgaccatcacatgcaaggccagcgaccacatcaacaactggctggcctggtatcagcagaagcctggacaggcccctaagctgctgatctacggcgctaccacactggaaacaggcgtgcccagcagattttctggcagcggctctggcaccgactacaccctgacaatatccagcctccagcctgaggacttcgccacctactactgtcagcagagctggaacaccccttggacattcggccagggcaccaagctggaaatcaagagaggacagcctaaggccaatcctaccgtgacactgttccctccaagcagcgaagaactccaggccaacaaggccacacttgtgtgcctgatctccgacttctaccctggggctgtgacagtggcttggaaggccgatggatctcctgtgaaagccggcgtggaaaccaccaagccatccaagcagagcaacaacaaatacgccgccagctcctacctgagcctgacacctgagcagtggaagtcccacagatcctacagctgccaagtgacccacgaaggcagcaccgtggaaaagacagtggcccctacagagtgcagcggatcccagagcttcggcctgctggaccccaagctgtgctacctgctggatggcatcctgttcatctacggcgtgatcctgaccgccctgttcctgagagtgaagttcagcagaagcgccgacgcccctgcctaccagcagggacagaaccaactgtacaacgagctgaacctgggcagacgggaagagtacgacgtgctggacaagcggagaggcagggaccctgagatgggcggaaagccccagcggagaaagaacccccaggaaggactgtataacgaactccagaaagacaagatggccgaagcctacagcgagatcggcatgaagggcgagcggagaagaggcaagggccacgatggcctgtaccagggcctgagcaccgccaccaaggacacctatgacgccctgcacatgcaggccctgcctccaagaagggccaagcgatctggatctggagcaacaaacttctcactactcaaacaagcaggtgacgtggaggagaatcccgggcctactagtatggactggatttggcgcatccttttccttgtcggcgctgctaccggcgcccattccgggccccaggttcagctgcaagagtctggcggaggacttgctcaagctggcggaagcctgagactgtcttgtgccgcctctggcagaaccttcagcatgggctggtttagacaggcccctggcaaagagagagagttcgtcgccgccatcacatacagcggcggcagcccttactacgcctcttctgtcagaggccggttcaccatcagccgggacaacgccaagaacaccgtgtacctccagatgaacagcctgaagccagaggacaccgccgtgtactactgtgccgccaatccaacctacggcagcgactggaatgccgagaattggggccagggcacccaagtgacagtgtctagtggatccggcggcggaggatctggcggaggcggatctgggggcggaggctctttcgaacaagttcagcttcaacagcctggcgctgagctggtcaaacctggcgcttctgtgaagatgagctgcaaagccagcggctacgccttcagcagctactggatcaactggatgaagcagaaacccggccagggactcgaatggatcggccaaatctatcccggcgacggcgacaccaactacaacggcaagttcaagggcagagccacactgaccgccgatacctctagcagcacagcctacatgcagctgagcagcctgaccagcgaagatagcgccgtgtacttctgtgcccggtccatcacaacagtcgtgggctgcgctatggactattggggccagggaacaagcgtgaccgtgtctagtgcctctacaaagggaccctccgtgtttcctctggctcccagcagcaagtctacaagcggaggaacagccgctctgggctgcctggtcaaggattactttcccgagcctgtgaccgtgtcctggaatagcggagcactgacaagcggcgtgcacacctttccagccgtgctgcaaagcagcggcctgtactctctgagcagcgtggtcacagtgcctagctctagcctgggcacccagacctacatctgcaatgtgaaccacaagcctagcaacaccaaggtggacaagagagtggaacccaagagctgtggtacccagagttttgggttgttggaccctaaattgtgctatctgttggacggaatcctgttcatttacggagtgatcctgaccgcattgttcctgcgggttaagttttccagatccgcagacgcacccgcttaccaacaagggcagaaccaactctacaatgaacttaatttggggcggagggaagagtacgacgttctggacaaaaggaggggacgagatcccgagatgggcggaaagcctcagcgaaggaagaatccgcaagaggggctttataacgaactccagaaagataaaatggcagaagcctatagtgagattgggatgaagggagaaaggaggaggggtaaaggtcacgatgggttgtaccaaggattgagcacagccactaaagatacctatgatgcgctccacatgcaggccctgccgccaagacgcgccaagagaagcggatctggcgtgaagcagaccctgaatttcgacctgctgaagctggctggcgacgtggaatccaacccaggcccttctagaggccatatgaccgagtacaagcccacggtgcgcctcgccacccgcgacgacgtccccagggccgtacgcaccctcgccgccgcgttcgccgactaccccgccacgcgccacaccgtcgatccggaccgccacatcgagcgggtcaccgagctgcaagaactcttcctcacgcgcgtcgggctcgacatcggcaaggtgtgggtcgcggacgacggcgccgcggtggcggtctggaccacgccggagagcgtcgaagcgggggcggtgttcgccgagatcggcccgcgcatggccgagttgagcggttcccggctggccgcgcagcaacagatggaaggcctcctggcgccgcaccggcccaaggagcccgcgtggttcctggccaccgtcggcgtctcgcccgaccaccagggcaagggtctgggcagcgccgtcgtgctccccggagtggaggcggccgagcgcgccggggtgcccgccttcctggagacctccgcgccccgcaacctccccttctacgagcggctcggcttcaccgtcaccgccgacgtcgaggtgcccgaaggaccgcgcacctggtgcatgacccgcaagcccggtgcctga

SEQ ID NO: 5308 - DNA, 3288 bp, Artificial Sequence
  Synthetic Polynucloetide
atggccttaccagtgaccgccttgctcctgccgctggccttgctgctccacgccgccaggccggaagttcagctgcttgagtctggcggaggactggttcaacctggcggaagcctgagactgtcttgtgccgccagcggcttcatcttcagcagctacgccatgagctgggtccgacaggctcctggaaagggccaagaatgggtttccggcgttagcggcacaggcgtgaacacctactacgccgatagcgtgaagggcagattcaccatcagccgggacaacagcaagaacaccctgtacctccagatgaacagcctgagagccgaggacaccgccgtgtactattgtgcctctggcaaaggctgggacagcggctcttggtacgaggactatagaggccagggcaccctggtcacagtttcttcaggtaccggcggaggcggatctggcggcggaggtagcggtggcggaggatctgaattcgacatccagatgacacagagccctagcagcctgtctgccagcgtgggagacagagtgaccatcacatgcaaggccagcgaccacatcaacaactggctggcctggtatcagcagaagcctggacaggcccctaagctgctgatctacggcgctaccacactggaaacaggcgtgcccagcagattttctggcagcggctctggcaccgactacaccctgacaatatccagcctccagcctgaggacttcgccacctactactgtcagcagagctggaacaccccttggacattcggccagggcaccaagctggaaatcaagagactcgaggacctgaagaacgtgttcccacctgaggtggccgtgttcgagcctagcgaggccgagatcagccacacccagaaagccaccctcgtgtgcctggctaccggcttctaccccgaccatgtggaactgtcttggtgggtcaacggcaaagaggtgcacagcggcgtgtctaccgacccccagccactgaaagaacagcccgccctgaacgacagccggtactgcctgagcagcagactgagagtgtccgccaccttctggcagaacccccggaaccacttcagatgccaggtgcagttctacggcctgagcgagaacgacgagtggacccaggacagagccaagcccgtgacccagatcgtgtctgccgaagcctggggcagagccgattgcggatcccagagcttcggcctgctggaccccaagctgtgctacctgctggatggcatcctgttcatctacggcgtgatcctgaccgccctgttcctgagagtgaagttcagcagaagcgccgacgcccctgcctaccagcagggacagaaccaactgtacaacgagctgaacctgggcagacgggaagagtacgacgtgctggacaagcggagaggcagggaccctgagatgggcggaaagccccagcggagaaagaacccccaggaaggactgtataacgaactccagaaagacaagatggccgaagcctacagcgagatcggcatgaagggcgagcggagaagaggcaagggccacgatggcctgtaccagggcctgagcaccgccaccaaggacacctatgacgccctgcacatgcaggccctgcctccaagaagggccaagcgatctggatctggagcaacaaacttctcactactcaaacaagcaggtgacgtggaggagaatcccgggcctactagtatggactggatttggcgcatccttttccttgtcggcgctgctaccggcgcccattccgggccccaggttcagctgcaagagtctggcggaggacttgctcaagctggcggaagcctgagactgtcttgtgccgcctctggcagaaccttcagcatgggctggtttagacaggcccctggcaaagagagagagttcgtcgccgccatcacatacagcggcggcagcccttactacgcctcttctgtcagaggccggttcaccatcagccgggacaacgccaagaacaccgtgtacctccagatgaacagcctgaagccagaggacaccgccgtgtactactgtgccgccaatccaacctacggcagcgactggaatgccgagaattggggccagggcacccaagtgacagtgtctagtggatccggcggcggaggatctggcggaggcggatctgggggcggaggctctttcgaacaagttcagcttcaacagcctggcgctgagctggtcaaacctggcgcttctgtgaagatgagctgcaaagccagcggctacgccttcagcagctactggatcaactggatgaagcagaaacccggccagggactcgaatggatcggccaaatctatcccggcgacggcgacaccaactacaacggcaagttcaagggcagagccacactgaccgccgatacctctagcagcacagcctacatgcagctgagcagcctgaccagcgaagatagcgccgtgtacttctgtgcccggtccatcacaacagtcgtgggctgcgctatggactattggggccagggaacaagcgtgaccgtgtctagtacgcgtatccagaaccctgatcctgccgtgtaccagctgcgggatagcaagagcagcgacaagagcgtgtgtctgttcaccgacttcgacagccagaccaacgtgtcccagagcaaggactccgacgtgtacatcaccgataagaccgtgctggacatgcggagcatggacttcaagagcaactccgccgtggcctggtccaacaagtccgatttcgcctgcgccaacgccttcaacaacagcattatccccgaggacacattcttcccaagccccgagagcagctgcggtacccagagttttgggttgttggaccctaaattgtgctatctgttggacggaatcctgttcatttacggagtgatcctgaccgcattgttcctgcgggttaagttttccagatccgcagacgcacccgcttaccaacaagggcagaaccaactctacaatgaacttaatttggggcggagggaagagtacgacgttctggacaaaaggaggggacgagatcccgagatgggcggaaagcctcagcgaaggaagaatccgcaagaggggctttataacgaactccagaaagataaaatggcagaagcctatagtgagattgggatgaagggagaaaggaggaggggtaaaggtcacgatgggttgtaccaaggattgagcacagccactaaagatacctatgatgcgctccacatgcaggccctgccgccaaga

SEQ ID NO: 5309 - DNA, 3288 bp, Artificial Sequence
  Synthetic Polynucloetide
atggccttaccagtgaccgccttgctcctgccgctggccttgctgctccacgccgccaggccggaagttcagctgcttgagtctggcggaggactggttcaacctggcggaagcctgagactgtcttgtgccgccagcggcttcatcttcagcagctacgccatgagctgggtccgacaggctcctggaaagggccaagaatgggtttccggcgttagcggcacaggcgtgaacacctactacgccgatagcgtgaagggcagattcaccatcagccgggacaacagcaagaacaccctgtacctccagatgaacagcctgagagccgaggacaccgccgtgtactattgtgcctctggcaaaggctgggacagcggctcttggtacgaggactatagaggccagggcaccctggtcacagtttcttcaggtaccggcggaggcggatctggcggcggaggtagcggtggcggaggatctgaattcgacatccagatgacacagagccctagcagcctgtctgccagcgtgggagacagagtgaccatcacatgcaaggccagcgaccacatcaacaactggctggcctggtatcagcagaagcctggacaggcccctaagctgctgatctacggcgctaccacactggaaacaggcgtgcccagcagattttctggcagcggctctggcaccgactacaccctgacaatatccagcctccagcctgaggacttcgccacctactactgtcagcagagctggaacaccccttggacattcggccagggcaccaagctggaaatcaagagactcgaggacctgaagaacgtgttcccacctgaggtggccgtgttcgagcctagcaaggccgagatcgcccacacccagaaagccaccctcgtgtgcctggctaccggcttctaccccgaccatgtggaactgtcttggtgggtcaacggcaaagaggtgcacagcggcgtgtgtaccgacccccagccactgaaagaacagcccgccctgaacgacagccggtactgcctgagcagcagactgagagtgtccgccaccttctggcagaacccccggaaccacttcagatgccaggtgcagttctacggcctgagcgagaacgacgagtggacccaggacagagccaagcccgtgacccagatcgtgtctgccgaagcctggggcagagccgattgcggatcccagagcttcggcctgctggaccccaagctgtgctacctgctggatggcatcctgttcatctacggcgtgatcctgaccgccctgttcctgagagtgaagttcagcagaagcgccgacgcccctgcctaccagcagggacagaaccaactgtacaacgagctgaacctgggcagacgggaagagtacgacgtgctggacaagcggagaggcagggaccctgagatgggcggaaagccccagcggagaaagaacccccaggaaggactgtataacgaactccagaaagacaagatggccgaagcctacagcgagatcggcatgaagggcgagcggagaagaggcaagggccacgatggcctgtaccagggcctgagcaccgccaccaaggacacctatgacgccctgcacatgcaggccctgcctccaagaagggccaagcgatctggatctggagcaacaaacttctcactactcaaacaagcaggtgacgtggaggagaatcccgggcctactagtatggactggatttggcgcatccttttccttgtcggcgctgctaccggcgcccattccgggccccaggttcagctgcaagagtctggcggaggacttgctcaagctggcggaagcctgagactgtcttgtgccgcctctggcagaaccttcagcatgggctggtttagacaggcccctggcaaagagagagagttcgtcgccgccatcacatacagcggcggcagcccttactacgcctcttctgtcagaggccggttcaccatcagccgggacaacgccaagaacaccgtgtacctccagatgaacagcctgaagccagaggacaccgccgtgtactactgtgccgccaatccaacctacggcagcgactggaatgccgagaattggggccagggcacccaagtgacagtgtctagtggatccggcggcggaggatctggcggaggcggatctgggggcggaggctctttcgaacaagttcagcttcaacagcctggcgctgagctggtcaaacctggcgcttctgtgaagatgagctgcaaagccagcggctacgccttcagcagctactggatcaactggatgaagcagaaacccggccagggactcgaatggatcggccaaatctatcccggcgacggcgacaccaactacaacggcaagttcaagggcagagccacactgaccgccgatacctctagcagcacagcctacatgcagctgagcagcctgaccagcgaagatagcgccgtgtacttctgtgcccggtccatcacaacagtcgtgggctgcgctatggactattggggccagggaacaagcgtgaccgtgtctagtacgcgtatccagaaccctgatcctgccgtgtaccagctgcgggatagcaagagcagcgacaagagcgtgtgtctgttcaccgacttcgacagccagaccaacgtgtcccagagcaaggactccgacgtgtacatcaccgataagtgcgtgctggacatgcggagcatggacttcaagagcaactccgccgtggcctggtccaacaagtccgatttcgcctgcgccaacgccttcaacaacagcattatccccgaggacacattcttcccaagcagcgacgtgccctgcggtacccagagttttgggttgttggaccctaaattgtgctatctgttggacggaatcctgttcatttacggagtgatcctgaccgcattgttcctgcgggttaagttttccagatccgcagacgcacccgcttaccaacaagggcagaaccaactctacaatgaacttaatttggggcggagggaagagtacgacgttctggacaaaaggaggggacgagatcccgagatgggcggaaagcctcagcgaaggaagaatccgcaagaggggctttataacgaactccagaaagataaaatggcagaagcctatagtgagattgggatgaagggagaaaggaggaggggtaaaggtcacgatgggttgtaccaaggattgagcacagccactaaagatacctatgatgcgctccacatgcaggccctgccgccaaga

SEQ ID NO: 5310 - DNA, 3501 bp, Artificial Sequence
  Synthetic Polynucloetide
atggccttaccagtgaccgccttgctcctgccgctggccttgctgctccacgccgccaggccggaagttcagctgcttgagtctggcggaggactggttcaacctggcggaagcctgagactgtcttgtgccgccagcggcttcatcttcagcagctacgccatgagctgggtccgacaggctcctggaaagggccaagaatgggtttccggcgttagcggcacaggcgtgaacacctactacgccgatagcgtgaagggcagattcaccatcagccgggacaacagcaagaacaccctgtacctccagatgaacagcctgagagccgaggacaccgccgtgtactattgtgcctctggcaaaggctgggacagcggctcttggtacgaggactatagaggccagggcaccctggtcacagtttcttcaggtaccggcggaggcggatctggcggcggaggtagcggtggcggaggatctgaattcgacatccagatgacacagagccctagcagcctgtctgccagcgtgggagacagagtgaccatcacatgcaaggccagcgaccacatcaacaactggctggcctggtatcagcagaagcctggacaggcccctaagctgctgatctacggcgctaccacactggaaacaggcgtgcccagcagattttctggcagcggctctggcaccgactacaccctgacaatatccagcctccagcctgaggacttcgccacctactactgtcagcagagctggaacaccccttggacattcggccagggcaccaagctggaaatcaagagactcgaggggaaaccaattcccaaccctcttctgggactggattcaaccggcagcggcgaggacctgaagaacgtgttcccacctgaggtggccgtgttcgagcctagcgaggccgagatcagccacacccagaaagccaccctcgtgtgcctggctaccggcttctaccccgaccatgtggaactgtcttggtgggtcaacggcaaagaggtgcacagcggcgtgtctaccgacccccagccactgaaagaacagcccgccctgaacgacagccggtactgcctgagcagcagactgagagtgtccgccaccttctggcagaacccccggaaccacttcagatgccaggtgcagttctacggcctgagcgagaacgacgagtggacccaggacagagccaagcccgtgacccagatcgtgtctgccgaagcctggggcagagccgattgcggatcccagagcttcggcctgctggaccccaagctgtgctacctgctggatggcatcctgttcatctacggcgtgatcctgaccgccctgttcctgagagtgaagttcagcagaagcgccgacgcccctgcctaccagcagggacagaaccaactgtacaacgagctgaacctgggcagacgggaagagtacgacgtgctggacaagcggagaggcagggaccctgagatgggcggaaagccccagcggagaaagaacccccaggaaggactgtataacgaactccagaaagacaagatggccgaagcctacagcgagatcggcatgaagggcgagcggagaagaggcaagggccacgatggcctgtaccagggcctgagcaccgccaccaaggacacctatgacgccctgcacatgcaggccctgcctccaagaagggccaagcgatctggatctggagcaacaaacttctcactactcaaacaagcaggtgacgtggaggagaatcccgggcctactagtatggactggatttggcgcatccttttccttgtcggcgctgctaccggcgcccattccgggccccaggttcagctgcaagagtctggcggaggacttgctcaagctggcggaagcctgagactgtcttgtgccgcctctggcagaaccttcagcatgggctggtttagacaggcccctggcaaagagagagagttcgtcgccgccatcacatacagcggcggcagcccttactacgcctcttctgtcagaggccggttcaccatcagccgggacaacgccaagaacaccgtgtacctccagatgaacagcctgaagccagaggacaccgccgtgtactactgtgccgccaatccaacctacggcagcgactggaatgccgagaattggggccagggcacccaagtgacagtgtctagtggatccggcggcggaggatctggcggaggcggatctgggggcggaggctctttcgaacaagttcagcttcaacagcctggcgctgagctggtcaaacctggcgcttctgtgaagatgagctgcaaagccagcggctacgccttcagcagctactggatcaactggatgaagcagaaacccggccagggactcgaatggatcggccaaatctatcccggcgacggcgacaccaactacaacggcaagttcaagggcagagccacactgaccgccgatacctctagcagcacagcctacatgcagctgagcagcctgaccagcgaagatagcgccgtgtacttctgtgcccggtccatcacaacagtcgtgggctgcgctatggactattggggccagggaacaagcgtgaccgtgtctagtacgcgtgagcagaaactgatctcggaagaggatgggagcggcatccagaaccctgatcctgccgtgtaccagctgcgggatagcaagagcagcgacaagagcgtgtgtctgttcaccgacttcgacagccagaccaacgtgtcccagagcaaggactccgacgtgtacatcaccgataagaccgtgctggacatgcggagcatggacttcaagagcaactccgccgtggcctggtccaacaagtccgatttcgcctgcgccaacgccttcaacaacagcattatccccgaggacacattcttcccaagccccgagagcagctgcggtacccagagttttgggttgttggaccctaaattgtgctatctgttggacggaatcctgttcatttacggagtgatcctgaccgcattgttcctgaggagcaagcggtcacggctgctccacagcgattacatgaatatgacaccacgaagaccgggtcctactcgcaaacactaccaaccctacgcacctccccgcgactttgcagcgtaccgatctcgggttaagttttccagatccgcagacgcacccgcttaccaacaagggcagaaccaactctacaatgaacttaatttggggcggagggaagagtacgacgttctggacaaaaggaggggacgagatcccgagatgggcggaaagcctcagcgaaggaagaatccgcaagaggggctttataacgaactccagaaagataaaatggcagaagcctatagtgagattgggatgaagggagaaaggaggaggggtaaaggtcacgatgggttgtaccaaggattgagcacagccactaaagatacctatgatgcgctccacatgcaggccctgccgccaaga

SEQ ID NO: 5311 - DNA, 3624 bp, Artificial Sequence
  Synthetic Polynucloetide
atggccttaccagtgaccgccttgctcctgccgctggccttgctgctccacgccgccaggccggaagttcagctgcttgagtctggcggaggactggttcaacctggcggaagcctgagactgtcttgtgccgccagcggcttcatcttcagcagctacgccatgagctgggtccgacaggctcctggaaagggccaagaatgggtttccggcgttagcggcacaggcgtgaacacctactacgccgatagcgtgaagggcagattcaccatcagccgggacaacagcaagaacaccctgtacctccagatgaacagcctgagagccgaggacaccgccgtgtactattgtgcctctggcaaaggctgggacagcggctcttggtacgaggactatagaggccagggcaccctggtcacagtttcttcaggtaccggcggaggcggatctggcggcggaggtagcggtggcggaggatctgaattcgacatccagatgacacagagccctagcagcctgtctgccagcgtgggagacagagtgaccatcacatgcaaggccagcgaccacatcaacaactggctggcctggtatcagcagaagcctggacaggcccctaagctgctgatctacggcgctaccacactggaaacaggcgtgcccagcagattttctggcagcggctctggcaccgactacaccctgacaatatccagcctccagcctgaggacttcgccacctactactgtcagcagagctggaacaccccttggacattcggccagggcaccaagctggaaatcaagagactcgaggggaaaccaattcccaaccctcttctgggactggattcaaccggcagcggcgaggacctgaagaacgtgttcccacctgaggtggccgtgttcgagcctagcgaggccgagatcagccacacccagaaagccaccctcgtgtgcctggctaccggcttctaccccgaccatgtggaactgtcttggtgggtcaacggcaaagaggtgcacagcggcgtgtctaccgacccccagccactgaaagaacagcccgccctgaacgacagccggtactgcctgagcagcagactgagagtgtccgccaccttctggcagaacccccggaaccacttcagatgccaggtgcagttctacggcctgagcgagaacgacgagtggacccaggacagagccaagcccgtgacccagatcgtgtctgccgaagcctggggcagagccgattgcggatcccagagcttcggcctgctggaccccaagctgtgctacctgctggatggcatcctgttcatctacggcgtgatcctgaccgccctgttcctgaggagtaagaggagcaggctcctgcacagtgactacatgaacatgactccacgccgccccggacccacccgcaagcattaccagccctatgccccaccacgcgacttcgcagcctatcgctccagagtgaagttcagcagaagcgccgacgcccctgcctaccagcagggacagaaccaactgtacaacgagctgaacctgggcagacgggaagagtacgacgtgctggacaagcggagaggcagggaccctgagatgggcggaaagccccagcggagaaagaacccccaggaaggactgtataacgaactccagaaagacaagatggccgaagcctacagcgagatcggcatgaagggcgagcggagaagaggcaagggccacgatggcctgtaccagggcctgagcaccgccaccaaggacacctatgacgccctgcacatgcaggccctgcctccaagaagggccaagcgatctggatctggagcaacaaacttctcactactcaaacaagcaggtgacgtggaggagaatcccgggcctactagtatggactggatttggcgcatccttttccttgtcggcgctgctaccggcgcccattccgggccccaggttcagctgcaagagtctggcggaggacttgctcaagctggcggaagcctgagactgtcttgtgccgcctctggcagaaccttcagcatgggctggtttagacaggcccctggcaaagagagagagttcgtcgccgccatcacatacagcggcggcagcccttactacgcctcttctgtcagaggccggttcaccatcagccgggacaacgccaagaacaccgtgtacctccagatgaacagcctgaagccagaggacaccgccgtgtactactgtgccgccaatccaacctacggcagcgactggaatgccgagaattggggccagggcacccaagtgacagtgtctagtggatccggcggcggaggatctggcggaggcggatctgggggcggaggctctttcgaacaagttcagcttcaacagcctggcgctgagctggtcaaacctggcgcttctgtgaagatgagctgcaaagccagcggctacgccttcagcagctactggatcaactggatgaagcagaaacccggccagggactcgaatggatcggccaaatctatcccggcgacggcgacaccaactacaacggcaagttcaagggcagagccacactgaccgccgatacctctagcagcacagcctacatgcagctgagcagcctgaccagcgaagatagcgccgtgtacttctgtgcccggtccatcacaacagtcgtgggctgcgctatggactattggggccagggaacaagcgtgaccgtgtctagtacgcgtgagcagaaactgatctcggaagaggatgggagcggcatccagaaccctgatcctgccgtgtaccagctgcgggatagcaagagcagcgacaagagcgtgtgtctgttcaccgacttcgacagccagaccaacgtgtcccagagcaaggactccgacgtgtacatcaccgataagaccgtgctggacatgcggagcatggacttcaagagcaactccgccgtggcctggtccaacaagtccgatttcgcctgcgccaacgccttcaacaacagcattatccccgaggacacattcttcccaagccccgagagcagctgcggtacccagagttttgggttgttggaccctaaattgtgctatctgttggacggaatcctgttcatttacggagtgatcctgaccgcattgttcctgaggagcaagcggtcacggctgctccacagcgattacatgaatatgacaccacgaagaccgggtcctactcgcaaacactaccaaccctacgcacctccccgcgactttgcagcgtaccgatctcgggttaagttttccagatccgcagacgcacccgcttaccaacaagggcagaaccaactctacaatgaacttaatttggggcggagggaagagtacgacgttctggacaaaaggaggggacgagatcccgagatgggcggaaagcctcagcgaaggaagaatccgcaagaggggctttataacgaactccagaaagataaaatggcagaagcctatagtgagattgggatgaagggagaaaggaggaggggtaaaggtcacgatgggttgtaccaaggattgagcacagccactaaagatacctatgatgcgctccacatgcaggccctgccgccaaga

SEQ ID NO: 5312 - DNA, 3507 bp, Artificial Sequence
  Synthetic Polynucloetide
atggccttaccagtgaccgccttgctcctgccgctggccttgctgctccacgccgccaggccggaagttcagctgcttgagtctggcggaggactggttcaacctggcggaagcctgagactgtcttgtgccgccagcggcttcatcttcagcagctacgccatgagctgggtccgacaggctcctggaaagggccaagaatgggtttccggcgttagcggcacaggcgtgaacacctactacgccgatagcgtgaagggcagattcaccatcagccgggacaacagcaagaacaccctgtacctccagatgaacagcctgagagccgaggacaccgccgtgtactattgtgcctctggcaaaggctgggacagcggctcttggtacgaggactatagaggccagggcaccctggtcacagtttcttcaggtaccggcggaggcggatctggcggcggaggtagcggtggcggaggatctgaattcgacatccagatgacacagagccctagcagcctgtctgccagcgtgggagacagagtgaccatcacatgcaaggccagcgaccacatcaacaactggctggcctggtatcagcagaagcctggacaggcccctaagctgctgatctacggcgctaccacactggaaacaggcgtgcccagcagattttctggcagcggctctggcaccgactacaccctgacaatatccagcctccagcctgaggacttcgccacctactactgtcagcagagctggaacaccccttggacattcggccagggcaccaagctggaaatcaagagactcgaggggaaaccaattcccaaccctcttctgggactggattcaaccggcagcggcgaggacctgaagaacgtgttcccacctgaggtggccgtgttcgagcctagcgaggccgagatcagccacacccagaaagccaccctcgtgtgcctggctaccggcttctaccccgaccatgtggaactgtcttggtgggtcaacggcaaagaggtgcacagcggcgtgtctaccgacccccagccactgaaagaacagcccgccctgaacgacagccggtactgcctgagcagcagactgagagtgtccgccaccttctggcagaacccccggaaccacttcagatgccaggtgcagttctacggcctgagcgagaacgacgagtggacccaggacagagccaagcccgtgacccagatcgtgtctgccgaagcctggggcagagccgattgcggatcccagagcttcggcctgctggaccccaagctgtgctacctgctggatggcatcctgttcatctacggcgtgatcctgaccgccctgttcctgagagtgaagttcagcagaagcgccgacgcccctgcctaccagcagggacagaaccaactgtacaacgagctgaacctgggcagacgggaagagtacgacgtgctggacaagcggagaggcagggaccctgagatgggcggaaagccccagcggagaaagaacccccaggaaggactgtataacgaactccagaaagacaagatggccgaagcctacagcgagatcggcatgaagggcgagcggagaagaggcaagggccacgatggcctgtaccagggcctgagcaccgccaccaaggacacctatgacgccctgcacatgcaggccctgcctccaagaagggccaagcgatctggatctggagcaacaaacttctcactactcaaacaagcaggtgacgtggaggagaatcccgggcctactagtatggactggatttggcgcatccttttccttgtcggcgctgctaccggcgcccattccgggccccaggttcagctgcaagagtctggcggaggacttgctcaagctggcggaagcctgagactgtcttgtgccgcctctggcagaaccttcagcatgggctggtttagacaggcccctggcaaagagagagagttcgtcgccgccatcacatacagcggcggcagcccttactacgcctcttctgtcagaggccggttcaccatcagccgggacaacgccaagaacaccgtgtacctccagatgaacagcctgaagccagaggacaccgccgtgtactactgtgccgccaatccaacctacggcagcgactggaatgccgagaattggggccagggcacccaagtgacagtgtctagtggatccggcggcggaggatctggcggaggcggatctgggggcggaggctctttcgaacaagttcagcttcaacagcctggcgctgagctggtcaaacctggcgcttctgtgaagatgagctgcaaagccagcggctacgccttcagcagctactggatcaactggatgaagcagaaacccggccagggactcgaatggatcggccaaatctatcccggcgacggcgacaccaactacaacggcaagttcaagggcagagccacactgaccgccgatacctctagcagcacagcctacatgcagctgagcagcctgaccagcgaagatagcgccgtgtacttctgtgcccggtccatcacaacagtcgtgggctgcgctatggactattggggccagggaacaagcgtgaccgtgtctagtacgcgtgagcagaaactgatctcggaagaggatctggggagcggcatccagaaccctgatcctgccgtgtaccagctgcgggatagcaagagcagcgacaagagcgtgtgtctgttcaccgacttcgacagccagaccaacgtgtcccagagcaaggactccgacgtgtacatcaccgataagaccgtgctggacatgcggagcatggacttcaagagcaactccgccgtggcctggtccaacaagtccgatttcgcctgcgccaacgccttcaacaacagcattatccccgaggacacattcttcccaagccccgagagcagctgcggtacccagagttttgggttgttggaccctaaattgtgctatctgttggacggaatcctgttcatttacggagtgatcctgaccgcattgttcctgaagagaggccggaagaagctgctgtacatcttcaagcagcctttcatgcggcccgtgcagaccacccaggaagaggacggctgctcctgccggttccccgaggaagaagaaggcggctgcgagctgcgggttaagttttccagatccgcagacgcacccgcttaccaacaagggcagaaccaactctacaatgaacttaatttggggcggagggaagagtacgacgttctggacaaaaggaggggacgagatcccgagatgggcggaaagcctcagcgaaggaagaatccgcaagaggggctttataacgaactccagaaagataaaatggcagaagcctatagtgagattgggatgaagggagaaaggaggaggggtaaaggtcacgatgggttgtaccaaggattgagcacagccactaaagatacctatgatgcgctccacatgcaggccctgccgccaaga

SEQ ID NO: 5313 - DNA, 3633 bp, Artificial Sequence
  Synthetic Polynucloetide
atggccttaccagtgaccgccttgctcctgccgctggccttgctgctccacgccgccaggccggaagttcagctgcttgagtctggcggaggactggttcaacctggcggaagcctgagactgtcttgtgccgccagcggcttcatcttcagcagctacgccatgagctgggtccgacaggctcctggaaagggccaagaatgggtttccggcgttagcggcacaggcgtgaacacctactacgccgatagcgtgaagggcagattcaccatcagccgggacaacagcaagaacaccctgtacctccagatgaacagcctgagagccgaggacaccgccgtgtactattgtgcctctggcaaaggctgggacagcggctcttggtacgaggactatagaggccagggcaccctggtcacagtttcttcaggtaccggcggaggcggatctggcggcggaggtagcggtggcggaggatctgaattcgacatccagatgacacagagccctagcagcctgtctgccagcgtgggagacagagtgaccatcacatgcaaggccagcgaccacatcaacaactggctggcctggtatcagcagaagcctggacaggcccctaagctgctgatctacggcgctaccacactggaaacaggcgtgcccagcagattttctggcagcggctctggcaccgactacaccctgacaatatccagcctccagcctgaggacttcgccacctactactgtcagcagagctggaacaccccttggacattcggccagggcaccaagctggaaatcaagagactcgaggggaaaccaattcccaaccctcttctgggactggattcaaccggcagcggcgaggacctgaagaacgtgttcccacctgaggtggccgtgttcgagcctagcgaggccgagatcagccacacccagaaagccaccctcgtgtgcctggctaccggcttctaccccgaccatgtggaactgtcttggtgggtcaacggcaaagaggtgcacagcggcgtgtctaccgacccccagccactgaaagaacagcccgccctgaacgacagccggtactgcctgagcagcagactgagagtgtccgccaccttctggcagaacccccggaaccacttcagatgccaggtgcagttctacggcctgagcgagaacgacgagtggacccaggacagagccaagcccgtgacccagatcgtgtctgccgaagcctggggcagagccgattgcggatcccagagcttcggcctgctggaccccaagctgtgctacctgctggatggcatcctgttcatctacggcgtgatcctgaccgccctgttcctgaaacggggcagaaagaaactcctgtatatattcaaacaaccatttatgagaccagtacaaactactcaagaggaagatggctgtagctgccgatttccagaagaagaagaaggaggatgtgaactgagagtgaagttcagcagaagcgccgacgcccctgcctaccagcagggacagaaccaactgtacaacgagctgaacctgggcagacgggaagagtacgacgtgctggacaagcggagaggcagggaccctgagatgggcggaaagccccagcggagaaagaacccccaggaaggactgtataacgaactccagaaagacaagatggccgaagcctacagcgagatcggcatgaagggcgagcggagaagaggcaagggccacgatggcctgtaccagggcctgagcaccgccaccaaggacacctatgacgccctgcacatgcaggccctgcctccaagaagggccaagcgatctggatctggagcaacaaacttctcactactcaaacaagcaggtgacgtggaggagaatcccgggcctactagtatggactggatttggcgcatccttttccttgtcggcgctgctaccggcgcccattccgggccccaggttcagctgcaagagtctggcggaggacttgctcaagctggcggaagcctgagactgtcttgtgccgcctctggcagaaccttcagcatgggctggtttagacaggcccctggcaaagagagagagttcgtcgccgccatcacatacagcggcggcagcccttactacgcctcttctgtcagaggccggttcaccatcagccgggacaacgccaagaacaccgtgtacctccagatgaacagcctgaagccagaggacaccgccgtgtactactgtgccgccaatccaacctacggcagcgactggaatgccgagaattggggccagggcacccaagtgacagtgtctagtggatccggcggcggaggatctggcggaggcggatctgggggcggaggctctttcgaacaagttcagcttcaacagcctggcgctgagctggtcaaacctggcgcttctgtgaagatgagctgcaaagccagcggctacgccttcagcagctactggatcaactggatgaagcagaaacccggccagggactcgaatggatcggccaaatctatcccggcgacggcgacaccaactacaacggcaagttcaagggcagagccacactgaccgccgatacctctagcagcacagcctacatgcagctgagcagcctgaccagcgaagatagcgccgtgtacttctgtgcccggtccatcacaacagtcgtgggctgcgctatggactattggggccagggaacaagcgtgaccgtgtctagtacgcgtgagcagaaactgatctcggaagaggatctggggagcggcatccagaaccctgatcctgccgtgtaccagctgcgggatagcaagagcagcgacaagagcgtgtgtctgttcaccgacttcgacagccagaccaacgtgtcccagagcaaggactccgacgtgtacatcaccgataagaccgtgctggacatgcggagcatggacttcaagagcaactccgccgtggcctggtccaacaagtccgatttcgcctgcgccaacgccttcaacaacagcattatccccgaggacacattcttcccaagccccgagagcagctgcggtacccagagttttgggttgttggaccctaaattgtgctatctgttggacggaatcctgttcatttacggagtgatcctgaccgcattgttcctgaagagaggccggaagaagctgctgtacatcttcaagcagcctttcatgcggcccgtgcagaccacccaggaagaggacggctgctcctgccggttccccgaggaagaagaaggcggctgcgagctgcgggttaagttttccagatccgcagacgcacccgcttaccaacaagggcagaaccaactctacaatgaacttaatttggggcggagggaagagtacgacgttctggacaaaaggaggggacgagatcccgagatgggcggaaagcctcagcgaaggaagaatccgcaagaggggctttataacgaactccagaaagataaaatggcagaagcctatagtgagattgggatgaagggagaaaggaggaggggtaaaggtcacgatgggttgtaccaaggattgagcacagccactaaagatacctatgatgcgctccacatgcaggccctgccgccaaga

SEQ ID NO: 5314 - DNA, 3306 bp, Artificial Sequence
  Synthetic Polynucloetide
atggccttaccagtgaccgccttgctcctgccgctggccttgctgctccacgccgccaggccggaagttcagctgcttgagtctggcggaggactggttcaacctggcggaagcctgagactgtcttgtgccgccagcggcttcatcttcagcagctacgccatgagctgggtccgacaggctcctggaaagggccaagaatgggtttccggcgttagcggcacaggcgtgaacacctactacgccgatagcgtgaagggcagattcaccatcagccgggacaacagcaagaacaccctgtacctccagatgaacagcctgagagccgaggacaccgccgtgtactattgtgcctctggcaaaggctgggacagcggctcttggtacgaggactatagaggccagggcaccctggtcacagtttcttcaggtaccggcggaggcggatctggcggcggaggtagcggtggcggaggatctgaattcgacatccagatgacacagagccctagcagcctgtctgccagcgtgggagacagagtgaccatcacatgcaaggccagcgaccacatcaacaactggctggcctggtatcagcagaagcctggacaggcccctaagctgctgatctacggcgctaccacactggaaacaggcgtgcccagcagattttctggcagcggctctggcaccgactacaccctgacaatatccagcctccagcctgaggacttcgccacctactactgtcagcagagctggaacaccccttggacattcggccagggcaccaagctggaaatcaagagactcgagcagagcttcggcctgctggaccccaagctgtgctacctgctggatggcatcctgttcatctacggcgtgatcctgaccgccctgttcctgagagtgaagttcagcagaagcgccgacgcccctgcctaccagcagggacagaaccaactgtacaacgagctgaacctgggcagacgggaagagtacgacgtgctggacaagcggagaggcagggaccctgagatgggcggaaagccccagcggagaaagaacccccaggaaggactgtataacgaactccagaaagacaagatggccgaagcctacagcgagatcggcatgaagggcgagcggagaagaggcaagggccacgatggcctgtaccagggcctgagcaccgccaccaaggacacctatgacgccctgcacatgcaggccctgcctccaagaagggccaagcgatctggatctggagcaacaaacttctcactactcaaacaagcaggtgacgtggaggagaatcccgggcctactagtatggactggatttggcgcatccttttccttgtcggcgctgctaccggcgcccattccgggccccaggttcagctgcaagagtctggcggaggacttgctcaagctggcggaagcctgagactgtcttgtgccgcctctggcagaaccttcagcatgggctggtttagacaggcccctggcaaagagagagagttcgtcgccgccatcacatacagcggcggcagcccttactacgcctcttctgtcagaggccggttcaccatcagccgggacaacgccaagaacaccgtgtacctccagatgaacagcctgaagccagaggacaccgccgtgtactactgtgccgccaatccaacctacggcagcgactggaatgccgagaattggggccagggcacccaagtgacagtgtctagtggatccggcggcggaggatctggcggaggcggatctgggggcggaggctctttcgaacaagttcagcttcaacagcctggcgctgagctggtcaaacctggcgcttctgtgaagatgagctgcaaagccagcggctacgccttcagcagctactggatcaactggatgaagcagaaacccggccagggactcgaatggatcggccaaatctatcccggcgacggcgacaccaactacaacggcaagttcaagggcagagccacactgaccgccgatacctctagcagcacagcctacatgcagctgagcagcctgaccagcgaagatagcgccgtgtacttctgtgcccggtccatcacaacagtcgtgggctgcgctatggactattggggccagggaacaagcgtgaccgtgtctagtacgcgtcagagttttgggttgttggaccctaaattgtgctatctgttggacggaatcctgttcatttacggagtgatcctgaccgcattgttcctgcgggttaagttttccagatccgcagacgcacccgcttaccaacaagggcagaaccaactctacaatgaacttaatttggggcggagggaagagtacgacgttctggacaaaaggaggggacgagatcccgagatgggcggaaagcctcagcgaaggaagaatccgcaagaggggctttataacgaactccagaaagataaaatggcagaagcctatagtgagattgggatgaagggagaaaggaggaggggtaaaggtcacgatgggttgtaccaaggattgagcacagccactaaagatacctatgatgcgctccacatgcaggccctgccgccaagacgcgccaagagaagcggatctggcgtgaagcagaccctgaatttcgacctgctgaagctggctggcgacgtggaatccaacccaggcccttctagaggccatatgaccgagtacaagcccacggtgcgcctcgccacccgcgacgacgtccccagggccgtacgcaccctcgccgccgcgttcgccgactaccccgccacgcgccacaccgtcgatccggaccgccacatcgagcgggtcaccgagctgcaagaactcttcctcacgcgcgtcgggctcgacatcggcaaggtgtgggtcgcggacgacggcgccgcggtggcggtctggaccacgccggagagcgtcgaagcgggggcggtgttcgccgagatcggcccgcgcatggccgagttgagcggttcccggctggccgcgcagcaacagatggaaggcctcctggcgccgcaccggcccaaggagcccgcgtggttcctggccaccgtcggcgtctcgcccgaccaccagggcaagggtctgggcagcgccgtcgtgctccccggagtggaggcggccgagcgcgccggggtgcccgccttcctggagacctccgcgccccgcaacctccccttctacgagcggctcggcttcaccgtcaccgccgacgtcgaggtgcccgaaggaccgcgcacctggtgcatgacccgcaagcccggtgcctga

SEQ ID NO: 5315 - DNA, 2778 bp, Artificial Sequence
  Synthetic Polynucloetide
atggccttaccagtgaccgccttgctcctgccgctggccttgctgctccacgccgccaggccggaagttcagctgcttgagtctggcggaggactggttcaacctggcggaagcctgagactgtcttgtgccgccagcggcttcatcttcagcagctacgccatgagctgggtccgacaggctcctggaaagggccaagaatgggtttccggcgttagcggcacaggcgtgaacacctactacgccgatagcgtgaagggcagattcaccatcagccgggacaacagcaagaacaccctgtacctccagatgaacagcctgagagccgaggacaccgccgtgtactattgtgcctctggcaaaggctgggacagcggctcttggtacgaggactatagaggccagggcaccctggtcacagtttcttcaggtaccggcggaggcggatctggcggcggaggtagcggtggcggaggatctgaattcgacatccagatgacacagagccctagcagcctgtctgccagcgtgggagacagagtgaccatcacatgcaaggccagcgaccacatcaacaactggctggcctggtatcagcagaagcctggacaggcccctaagctgctgatctacggcgctaccacactggaaacaggcgtgcccagcagattttctggcagcggctctggcaccgactacaccctgacaatatccagcctccagcctgaggacttcgccacctactactgtcagcagagctggaacaccccttggacattcggccagggcaccaagctggaaatcaagagactcgagggacagcctaaggccaatcctaccgtgacactgttccctccaagcagcgaagaactccaggccaacaaggccacacttgtgtgcctgatctccgacttctaccctggggctgtgacagtggcttggaaggccgatggatctcctgtgaaagccggcgtggaaaccaccaagccatccaagcagagcaacaacaaatacgccgccagctcctacctgagcctgacacctgagcagtggaagtcccacagatcctacagctgccaagtgacccacgaaggcagcaccgtggaaaagacagtggcccctacagagtgcagccccatcaagaccgatgtgattacaatggaccccaaggacaactgctccaaggacgccaacgataccctgctgctccagctgaccaacaccagcgcctactacatgtacttgttgctgctgctgaagtccgtggtgtacttcgccatcatcacatgctgcctgctgcggagaaccgccttctgctgcaacggcgagaagtctagggccaagcgatctggatctggagcaacaaacttctcactactcaaacaagcaggtgacgtggaggagaatcccgggcctactagtatggactggatttggcgcatccttttccttgtcggcgctgctaccggcgcccattccgggccccaggttcagctgcaagagtctggcggaggacttgctcaagctggcggaagcctgagactgtcttgtgccgcctctggcagaaccttcagcatgggctggtttagacaggcccctggcaaagagagagagttcgtcgccgccatcacatacagcggcggcagcccttactacgcctcttctgtcagaggccggttcaccatcagccgggacaacgccaagaacaccgtgtacctccagatgaacagcctgaagccagaggacaccgccgtgtactactgtgccgccaatccaacctacggcagcgactggaatgccgagaattggggccagggcacccaagtgacagtgtctagtggatccggcggcggaggatctggcggaggcggatctgggggcggaggctctttcgaacaagttcagcttcaacagcctggcgctgagctggtcaaacctggcgcttctgtgaagatgagctgcaaagccagcggctacgccttcagcagctactggatcaactggatgaagcagaaacccggccagggactcgaatggatcggccaaatctatcccggcgacggcgacaccaactacaacggcaagttcaagggcagagccacactgaccgccgatacctctagcagcacagcctacatgcagctgagcagcctgaccagcgaagatagcgccgtgtacttctgtgcccggtccatcacaacagtcgtgggctgcgctatggactattggggccagggaacaagcgtgaccgtgtctagtacgcgtgcctctacaaagggaccctccgtgtttcctctggctcccagcagcaagtctacaagcggaggaacagccgctctgggctgcctggtcaaggattactttcccgagcctgtgaccgtgtcctggaatagcggagcactgacaagcggcgtgcacacctttccagccgtgctgcaaagcagcggcctgtactctctgagcagcgtggtcacagtgcctagctctagcctgggcacccagacctacatctgcaatgtgaaccacaagcctagcaacaccaaggtggacaagagagtggaacccaagagctgtgaagtgaaaaccgactccaccgaccacgtgaagcccaaagagacagagaacaccaagcagcccagcaagagctgccacaagcccaaggccatcgtgcacaccgagaaagtgaacatgatgagcctgaccgtgctgggcctgcggatgctgttcgccaaaaccgtggccgtgaacttcctgctgaccgccaagctgttcttcctc

SEQ ID NO: 5316 - DNA, 2712 bp, Artificial Sequence
  Synthetic Polynucloetide
atggccttaccagtgaccgccttgctcctgccgctggccttgctgctccacgccgccaggccggaagttcagctgcttgagtctggcggaggactggttcaacctggcggaagcctgagactgtcttgtgccgccagcggcttcatcttcagcagctacgccatgagctgggtccgacaggctcctggaaagggccaagaatgggtttccggcgttagcggcacaggcgtgaacacctactacgccgatagcgtgaagggcagattcaccatcagccgggacaacagcaagaacaccctgtacctccagatgaacagcctgagagccgaggacaccgccgtgtactattgtgcctctggcaaaggctgggacagcggctcttggtacgaggactatagaggccagggcaccctggtcacagtttcttcaggtaccggcggaggcggatctggcggcggaggtagcggtggcggaggatctgaattcgacatccagatgacacagagccctagcagcctgtctgccagcgtgggagacagagtgaccatcacatgcaaggccagcgaccacatcaacaactggctggcctggtatcagcagaagcctggacaggcccctaagctgctgatctacggcgctaccacactggaaacaggcgtgcccagcagattttctggcagcggctctggcaccgactacaccctgacaatatccagcctccagcctgaggacttcgccacctactactgtcagcagagctggaacaccccttggacattcggccagggcaccaagctggaaatcaagagactcgagggacagcctaaggccaatcctaccgtgacactgttccctccaagcagcgaagaactccaggccaacaaggccacacttgtgtgcctgatctccgacttctaccctggggctgtgacagtggcttggaaggccgatggatctcctgtgaaagccggcgtggaaaccaccaagccatccaagcagagcaacaacaaatacgccgccagctcctacctgagcctgacacctgagcagtggaagtcccacagatcctacagctgccaagtgacccacgaaggcagcaccgtggaaaagacagtggcccctacagagtgcagcggcagagccgattgcggcatcaccagcgccagctaccaccagggcgtgctgagcgccaccatcctgtacgagatcctgctgggcaaggccaccctgtacgccgtgctggtgtctgccctggtgctgatggctatggtcaagcggaaggacagccggggaagggccaagcgatctggatctggagcaacaaacttctcactactcaaacaagcaggtgacgtggaggagaatcccgggcctactagtatggactggatttggcgcatccttttccttgtcggcgctgctaccggcgcccattccgggccccaggttcagctgcaagagtctggcggaggacttgctcaagctggcggaagcctgagactgtcttgtgccgcctctggcagaaccttcagcatgggctggtttagacaggcccctggcaaagagagagagttcgtcgccgccatcacatacagcggcggcagcccttactacgcctcttctgtcagaggccggttcaccatcagccgggacaacgccaagaacaccgtgtacctccagatgaacagcctgaagccagaggacaccgccgtgtactactgtgccgccaatccaacctacggcagcgactggaatgccgagaattggggccagggcacccaagtgacagtgtctagtggatccggcggcggaggatctggcggaggcggatctgggggcggaggctctttcgaacaagttcagcttcaacagcctggcgctgagctggtcaaacctggcgcttctgtgaagatgagctgcaaagccagcggctacgccttcagcagctactggatcaactggatgaagcagaaacccggccagggactcgaatggatcggccaaatctatcccggcgacggcgacaccaactacaacggcaagttcaagggcagagccacactgaccgccgatacctctagcagcacagcctacatgcagctgagcagcctgaccagcgaagatagcgccgtgtacttctgtgcccggtccatcacaacagtcgtgggctgcgctatggactattggggccagggaacaagcgtgaccgtgtctagtacgcgtgcctctacaaagggaccctccgtgtttcctctggctcccagcagcaagtctacaagcggaggaacagccgctctgggctgcctggtcaaggattactttcccgagcctgtgaccgtgtcctggaatagcggagcactgacaagcggcgtgcacacctttccagccgtgctgcaaagcagcggcctgtactctctgagcagcgtggtcacagtgcctagctctagcctgggcacccagacctacatctgcaatgtgaaccacaagcctagcaacaccaaggtggacaagagagtggaacccaagagctgtatccccgaggacacattcttcccaagcagcgacgtgccctgcgacgtgaagctggtggaaaagagcttcgagacagacaccaacctgaacttccagaacctgagcgtgatcggcttcagaatcctgctgctgaaagtggccggctttaacctgctgatgaccctgcggctgtggtccagc

SEQ ID NO: 5317 - DNA, 2712 bp, Artificial Sequence
  Synthetic Polynucloetide
atggccttaccagtgaccgccttgctcctgccgctggccttgctgctccacgccgccaggccggaagttcagctgcttgagtctggcggaggactggttcaacctggcggaagcctgagactgtcttgtgccgccagcggcttcatcttcagcagctacgccatgagctgggtccgacaggctcctggaaagggccaagaatgggtttccggcgttagcggcacaggcgtgaacacctactacgccgatagcgtgaagggcagattcaccatcagccgggacaacagcaagaacaccctgtacctccagatgaacagcctgagagccgaggacaccgccgtgtactattgtgcctctggcaaaggctgggacagcggctcttggtacgaggactatagaggccagggcaccctggtcacagtttcttcaggtaccggcggaggcggatctggcggcggaggtagcggtggcggaggatctgaattcgacatccagatgacacagagccctagcagcctgtctgccagcgtgggagacagagtgaccatcacatgcaaggccagcgaccacatcaacaactggctggcctggtatcagcagaagcctggacaggcccctaagctgctgatctacggcgctaccacactggaaacaggcgtgcccagcagattttctggcagcggctctggcaccgactacaccctgacaatatccagcctccagcctgaggacttcgccacctactactgtcagcagagctggaacaccccttggacattcggccagggcaccaagctggaaatcaagagactcgagggacagcctaaggccaatcctaccgtgacactgttccctccaagcagcgaagaactccaggccaacaaggccacacttgtgtgcctgatctccgacttctaccctggggctgtgacagtggcttggaaggccgatggatctcctgtgaaagccggcgtggaaaccaccaagccatccaagcagagcaacaacaaatacgccgccagctcctacctgagcctgacacctgagcagtggaagtcccacagatcctacagctgccaagtgacccacgaaggcagcaccgtggaaaagacagtggcccctacagagtgcagcggcagagccgattgcggctttaccagcgagagctaccagcagggcgtgctgagcgccaccatcctgtacgagatcctgctgggcaaggccaccctgtacgccgtgctggtgtctgccctggtgctgatggctatggtcaagcggaaggacagccggggaagggccaagcgatctggatctggagcaacaaacttctcactactcaaacaagcaggtgacgtggaggagaatcccgggcctactagtatggactggatttggcgcatccttttccttgtcggcgctgctaccggcgcccattccgggccccaggttcagctgcaagagtctggcggaggacttgctcaagctggcggaagcctgagactgtcttgtgccgcctctggcagaaccttcagcatgggctggtttagacaggcccctggcaaagagagagagttcgtcgccgccatcacatacagcggcggcagcccttactacgcctcttctgtcagaggccggttcaccatcagccgggacaacgccaagaacaccgtgtacctccagatgaacagcctgaagccagaggacaccgccgtgtactactgtgccgccaatccaacctacggcagcgactggaatgccgagaattggggccagggcacccaagtgacagtgtctagtggatccggcggcggaggatctggcggaggcggatctgggggcggaggctctttcgaacaagttcagcttcaacagcctggcgctgagctggtcaaacctggcgcttctgtgaagatgagctgcaaagccagcggctacgccttcagcagctactggatcaactggatgaagcagaaacccggccagggactcgaatggatcggccaaatctatcccggcgacggcgacaccaactacaacggcaagttcaagggcagagccacactgaccgccgatacctctagcagcacagcctacatgcagctgagcagcctgaccagcgaagatagcgccgtgtacttctgtgcccggtccatcacaacagtcgtgggctgcgctatggactattggggccagggaacaagcgtgaccgtgtctagtacgcgtgcctctacaaagggaccctccgtgtttcctctggctcccagcagcaagtctacaagcggaggaacagccgctctgggctgcctggtcaaggattactttcccgagcctgtgaccgtgtcctggaatagcggagcactgacaagcggcgtgcacacctttccagccgtgctgcaaagcagcggcctgtactctctgagcagcgtggtcacagtgcctagctctagcctgggcacccagacctacatctgcaatgtgaaccacaagcctagcaacaccaaggtggacaagagagtggaacccaagagctgtatccccgaggacacattcttcccaagccccgagagcagctgcgacgtgaagctggtggaaaagagcttcgagacagacaccaacctgaacttccagaacctgagcgtgatcggcttcagaatcctgctgctgaaagtggccggctttaacctgctgatgaccctgcggctgtggtccagc

SEQ ID NO: 5318 - DNA, 2301 bp, Artificial Sequence
  Synthetic Polynucloetide
atggccttaccagtgaccgccttgctcctgccgctggccttgctgctccacgccgccaggccggaggttcagctgcttgagtctggcggaggactggttcaacctggcggaagcctgagactgtcttgtgccgccagcggcttcacctttagcagctacgccatgagctgggtccgacaggctcctggcaaaggactggaatgggtgtccagcatcagcggcagcggcgactacatctactacgccgatagcgtgaagggcagattcaccatcagccgggacatcagcaagaacaccctgtacctccagatgaacagcctgagagccgaggacaccgccgtgtactactgtgccaaagaaggcaccggcgctaacagcagcctggccgattatagaggccagggcacactggtcaccgtgtctagtggcggaggaagcggcggaggatctgaagttcagctgcttgagtctggcggaggactggttcaacctggcggaagcctgagactgtcttgtgccgccagcggcttcatcttcagcagctacgccatgagctgggtccgacaggctcctggaaagggccaagaatgggtttccggcgttagcggcacaggcgtgaacacctactacgccgatagcgtgaagggcagattcaccatcagccgggacaacagcaagaacaccctgtacctccagatgaacagcctgagagccgaggacaccgccgtgtactattgtgcctctggcaaaggctgggacagcggctcttggtacgaggactatagaggccagggcaccctggtcacagtttcttcaggtaccggcggaggcggatctggcggcggaggtagcggtggcggaggatctgaattcgacatccagatgacacagagccctagcagcctgtctgccagcgtgggagacagagtgaccatcacatgcaaggccagcgaccacatcaacaactggctggcctggtatcagcagaagcctggacaggcccctaagctgctgatctacggcgctaccacactggaaacaggcgtgcccagcagattttctggcagcggctctggcaccgactacaccctgacaatatccagcctccagcctgaggacttcgccacctactactgtcagcagagctggaacaccccttggacattcggccagggcaccaagctggaaatcaagagaggcggaggcggaagtggaggcggaggatctggcggcggaggctctcaagttcagcttcaacagcctggcgctgagctggtcaaacctggcgcttctgtgaagatgagctgcaaagccagcggctacgccttcagcagctactggatcaactggatgaagcagaaacccggccagggactcgaatggatcggccaaatctatcccggcgacggcgacaccaactacaacggcaagttcaagggcagagccacactgaccgccgatacctctagcagcacagcctacatgcagctgagcagcctgaccagcgaagatagcgccgtgtacttctgtgcccggtccatcacaacagtcgtgggctgcgctatggactattggggccagggaacaagcgtgaccgtgtctagtacgcgtgagcagaaactgatctcggaagaggatctgaaaattgaagttatgtatcctcctccttacctagacaatgagaagagcaatggaaccattatccatgtgaaagggaaacacctttgtccaagtcccctatttcccggaccttctaagcccttttgggtgctggtggtggttgggggagtcctggcttgctatagcttgctagtaacagtggcctttattattttctgggtgaggagtaagaggagcaggctcctgcacagtgactacatgaacatgactccacgccgccccggacccacccgcaagcattaccagccctatgccccaccacgcgacttcgcagcctatcgctccagagtgaagttcagcaggagcgcagacgcccccgcgtaccagcagggccagaaccagctctataacgagctcaatctaggacgaagagaggagtacgatgttttggacaagagacgtggccgggaccctgagatggggggaaagccgagaaggaagaaccctcaggaaggcctgtacaatgaactgcagaaagataagatggcggaggcctacagtgagattgggatgaaaggcgagcgccggaggggcaaggggcacgatggcctttaccagggtctcagtacagccaccaaggacacctacgacgcccttcacatgcaggccctgccccctcgc

SEQ ID NO: 5319 - DNA, 2322 bp, Artificial Sequence
  Synthetic Polynucloetide
atggccttaccagtgaccgccttgctcctgccgctggccttgctgctccacgccgccaggccggaggttcagctgcttgagtctggcggaggactggttcaacctggcggaagcctgagactgtcttgtgccgccagcggcttcacctttagcagctacgccatgagctgggtccgacaggctcctggcaaaggactggaatgggtgtccagcatcagcggcagcggcgactacatctactacgccgatagcgtgaagggcagattcaccatcagccgggacatcagcaagaacaccctgtacctccagatgaacagcctgagagccgaggacaccgccgtgtactactgtgccaaagaaggcaccggcgctaacagcagcctggccgattatagaggccagggcacactggtcaccgtgtctagtggcggaggaagcggcggaggatctgaagttcagctgcttgagtctggcggaggactggttcaacctggcggaagcctgagactgtcttgtgccgccagcggcttcatcttcagcagctacgccatgagctgggtccgacaggctcctggaaagggccaagaatgggtttccggcgttagcggcacaggcgtgaacacctactacgccgatagcgtgaagggcagattcaccatcagccgggacaacagcaagaacaccctgtacctccagatgaacagcctgagagccgaggacaccgccgtgtactattgtgcctctggcaaaggctgggacagcggctcttggtacgaggactatagaggccagggcaccctggtcacagtttcttcaggtaccggcggaggcggatctggcggcggaggtagcggtggcggaggatctgaattcgacatccagatgacacagagccctagcagcctgtctgccagcgtgggagacagagtgaccatcacatgcaaggccagcgaccacatcaacaactggctggcctggtatcagcagaagcctggacaggcccctaagctgctgatctacggcgctaccacactggaaacaggcgtgcccagcagattttctggcagcggctctggcaccgactacaccctgacaatatccagcctccagcctgaggacttcgccacctactactgtcagcagagctggaacaccccttggacattcggccagggcaccaagctggaaatcaagagaggcggaggcggaagtggaggcggaggatctggcggcggaggctctcaagttcagcttcaacagcctggcgctgagctggtcaaacctggcgcttctgtgaagatgagctgcaaagccagcggctacgccttcagcagctactggatcaactggatgaagcagaaacccggccagggactcgaatggatcggccaaatctatcccggcgacggcgacaccaactacaacggcaagttcaagggcagagccacactgaccgccgatacctctagcagcacagcctacatgcagctgagcagcctgaccagcgaagatagcgccgtgtacttctgtgcccggtccatcacaacagtcgtgggctgcgctatggactattggggccagggaacaagcgtgaccgtgtctagtacgcgtgagcagaaactgatctcggaagaggatctggcgaagcccaccacgacgccagcgccgcgaccaccaacaccggcgcccaccatcgcgtcgcagcccctgtccctgcgcccagaggcgtgccggccagcggcggggggcgcagtgcacacgagggggctggacttcgcctgtgacatctacatctgggcgcccttggccgggacttgtggggtccttctcctgtcactggttatcaccctttactgcaaacggggcagaaagaaactcctgtatatattcaaacaaccatttatgagaccagtacaaactactcaagaggaagatggctgtagctgccgatttccagaagaagaagaaggaggatgtgaactgagagtgaagttcagcaggagcgcagacgcccccgcgtaccagcagggccagaaccagctctataacgagctgaatctaggacgaagagaggagtacgatgttttggacaagagacgtggccgggaccctgagatggggggaaagccgagaaggaagaaccctcaggaaggcctgtacaatgaactgcagaaagataagatggcggaggcctacagtgagattgggatgaaaggcgagcgccggaggggcaaggggcacgatggcctttaccagggtctcagtacagccaccaaggacacctacgacgcccttcacatgcaggccctgccccctcgctga

SEQ ID NO: 5320 - DNA, 3561 bp, Artificial Sequence
  Synthetic Polynucloetide
atggccttaccagtgaccgccttgctcctgccgctggccttgctgctccacgccgccaggccggaggttcagctgcttgagtctggcggaggactggttcaacctggcggaagcctgagactgtcttgtgccgccagcggcttcacctttagcagctacgccatgagctgggtccgacaggctcctggcaaaggactggaatgggtgtccagcatcagcggcagcggcgactacatctactacgccgatagcgtgaagggcagattcaccatcagccgggacatcagcaagaacaccctgtacctccagatgaacagcctgagagccgaggacaccgccgtgtactactgtgccaaagaaggcaccggcgctaacagcagcctggccgattatagaggccagggcacactggtcaccgtgtctagtggcggaggaagcggcggaggatctgaagttcagctgcttgagtctggcggaggactggttcaacctggcggaagcctgagactgtcttgtgccgccagcggcttcatcttcagcagctacgccatgagctgggtccgacaggctcctggaaagggccaagaatgggtttccggcgttagcggcacaggcgtgaacacctactacgccgatagcgtgaagggcagattcaccatcagccgggacaacagcaagaacaccctgtacctccagatgaacagcctgagagccgaggacaccgccgtgtactattgtgcctctggcaaaggctgggacagcggctcttggtacgaggactatagaggccagggcaccctggtcacagtttcttcaggtaccggcggaggcggatctggcggcggaggtagcggtggcggaggatctgaattcgacatccagatgacacagagccctagcagcctgtctgccagcgtgggagacagagtgaccatcacatgcaaggccagcgaccacatcaacaactggctggcctggtatcagcagaagcctggacaggcccctaagctgctgatctacggcgctaccacactggaaacaggcgtgcccagcagattttctggcagcggctctggcaccgactacaccctgacaatatccagcctccagcctgaggacttcgccacctactactgtcagcagagctggaacaccccttggacattcggccagggcaccaagctggaaatcaagagaggcggaggcggaagtggaggcggaggatctggcggcggaggctctcaagttcagcttcaacagcctggcgctgagctggtcaaacctggcgcttctgtgaagatgagctgcaaagccagcggctacgccttcagcagctactggatcaactggatgaagcagaaacccggccagggactcgaatggatcggccaaatctatcccggcgacggcgacaccaactacaacggcaagttcaagggcagagccacactgaccgccgatacctctagcagcacagcctacatgcagctgagcagcctgaccagcgaagatagcgccgtgtacttctgtgcccggtccatcacaacagtcgtgggctgcgctatggactattggggccagggaacaagcgtgaccgtgtctagtacgcgtgagcagaaactgatctcggaagaggatctggcgaagcccaccacgacgccagcgccgcgaccaccaacaccggcgcccaccatcgcgtcgcagcccctgtccctgcgcccagaggcgtgccggccagcggcggggggcgcagtgcacacgagggggctggacttcgcctgtgacatctacatctgggcgcccttggccgggacttgtggggtccttctcctgtcactggttatcaccctttactgcgggcgcgccagagtgaagttcagcaggagcgcagacgcccccgcgtaccagcagggccagaaccagctctataacgagctgaatctaggacgaagagaggagtacgatgttttggacaagagacgtggccgggaccctgagatggggggaaagccgagaaggaagaaccctcaggaaggcctgtacaatgaactgcagaaagataagatggcggaggcctacagtgagattgggatgaaaggcgagcgccggaggggcaaggggcacgatggcctttaccagggtctcagtacagccaccaaggacacctacgacgcccttcacatgcaggccctgccccctcgctctagaggatctggagcaacaaacttctcactactcaaacaagcaggtgacgtggaggagaatcccgggcctgggatccacatggccacttacgaggttctctgtgaggtggcgcggaaactgggcacggatgacagggaagtggtattgttcctcctaaacgtgttcatacctcaacccacactggcccaattaattggagctcttagagctttaaaggaggagggcaggttaacgtttcccctgttagcggaatgtctgtttcgtgcaggtcgcagagacctcttgcgcgacctgcttcacttagacccgcgttttttagagcgccacctagcgggcacaatgagttatttcagcccttatcagctcactgttctccacgtagacggggagctgtgtgcgagggatattaggtctttgatatttttaagcaaggacactatagggtctcgcagcacaccacagacattcttacactgggtgtactgtatggaaaacttagacctactgggtcccactgacgtggatgccctaatgtcaatgcttagatctttgtcaagagtagacctacagcgccaagtgcaaaccctaatgggccttcacctttccggcccatcacactcccaacactatcgccatacaccactcgagaccgatttctacgactacaaggacgacgatgacaagactagtggctccggcgagggcagaggaagtctactaacctgcggagatgtggaagaaaatcctggcccacatatgaccgagtacaagcccacggtgcgcctcgccacccgcgacgacgtccccagggccgtacgcaccctcgccgccgcgttcgccgactaccccgccacgcgccacaccgtcgatccggaccgccacatcgagcgggtcaccgagctgcaagaactcttcctcacgcgcgtcgggctcgacatcggcaaggtgtgggtcgcggacgacggcgccgcggtggcggtctggaccacgccggagagcgtcgaagcgggggcggtgttcgccgagatcggcccgcgcatggccgagttgagcggttcccggctggccgcgcagcaacagatggaaggcctcctggcgccgcaccggcccaaggagcccgcgtggttcctggccaccgtcggcgtctcgcccgaccaccagggcaagggtctgggcagcgccgtcgtgctccccggagtggaggcggccgagcgcgccggggtgcccgccttcctggagacctccgcgccccgcaacctccccttctacgagcggctcggcttcaccgtcaccgccgacgtcgaggtgcccgaaggaccgcgcacctggtgcatgacccgcaagcccggtgcctga

SEQ ID NO: 5321 - DNA, 3381 bp, Artificial Sequence
  Synthetic Polynucloetide
atggccttaccagtgaccgccttgctcctgccgctggccttgctgctccacgccgccaggccggaggttcagctgcttgagtctggcggaggactggttcaacctggcggaagcctgagactgtcttgtgccgccagcggcttcacctttagcagctacgccatgagctgggtccgacaggctcctggcaaaggactggaatgggtgtccagcatcagcggcagcggcgactacatctactacgccgatagcgtgaagggcagattcaccatcagccgggacatcagcaagaacaccctgtacctccagatgaacagcctgagagccgaggacaccgccgtgtactactgtgccaaagaaggcaccggcgctaacagcagcctggccgattatagaggccagggcacactggtcaccgtgtctagtggcggaggaagcggcggaggatctgaagttcagctgcttgagtctggcggaggactggttcaacctggcggaagcctgagactgtcttgtgccgccagcggcttcatcttcagcagctacgccatgagctgggtccgacaggctcctggaaagggccaagaatgggtttccggcgttagcggcacaggcgtgaacacctactacgccgatagcgtgaagggcagattcaccatcagccgggacaacagcaagaacaccctgtacctccagatgaacagcctgagagccgaggacaccgccgtgtactattgtgcctctggcaaaggctgggacagcggctcttggtacgaggactatagaggccagggcaccctggtcacagtttcttcaggtaccggcggaggcggatctggcggcggaggtagcggtggcggaggatctgaattcgacatccagatgacacagagccctagcagcctgtctgccagcgtgggagacagagtgaccatcacatgcaaggccagcgaccacatcaacaactggctggcctggtatcagcagaagcctggacaggcccctaagctgctgatctacggcgctaccacactggaaacaggcgtgcccagcagattttctggcagcggctctggcaccgactacaccctgacaatatccagcctccagcctgaggacttcgccacctactactgtcagcagagctggaacaccccttggacattcggccagggcaccaagctggaaatcaagagactcgagatccagaaccctgatcctgccgtgtaccagctgcgggatagcaagagcagcgacaagagcgtgtgtctgttcaccgacttcgacagccagaccaacgtgtcccagagcaaggactccgacgtgtacatcaccgataagtgcgtgctggacatgcggagcatggacttcaagagcaactccgccgtggcctggtccaacaagtccgatttcgcctgcgccaacgccttcaacaacagcattatccccgaggacacattcttcccaagcagcgacgtgccctgcgacgtgaagctggtggaaaagagcttcgagacagacaccaacctgaacttccagaacctgagcgtgatcggcttcagaatcctgctgctgaaagtggccggctttaacctgctgatgaccctgcggctgtggtccagccgcgccaagagaagcggatctggcgtgaagcagaccctgaatttcgacctgctgaagctggctggcgacgtggaatccaacccaggccctactagtatggactggatttggcgcatccttttccttgtcggcgctgctaccggcgcgcattccttcgaacaagttcagcttcaacagcctggcgctgagctggtcaaacctggcgcttctgtgaagatgagctgcaaagccagcggctacgccttcagcagctactggatcaactggatgaagcagaaacccggccagggactcgaatggatcggccaaatctatcccggcgacggcgacaccaactacaacggcaagttcaagggcagagccacactgaccgccgatacctctagcagcacagcctacatgcagctgagcagcctgaccagcgaagatagcgccgtgtacttctgtgcccggtccatcacaacagtcgtgggctgcgctatggactattggggccagggaacaagcgtgaccgtgtctagtacgcgtgaggacctgaagaacgtgttcccacctgaggtggccgtgttcgagcctagcaaggccgagatcgcccacacccagaaagccaccctcgtgtgcctggctaccggcttctaccccgaccatgtggaactgtcttggtgggtcaacggcaaagaggtgcacagcggcgtgtgtaccgacccccagccactgaaagaacagcccgccctgaacgacagccggtactgcctgagcagcagactgagagtgtccgccaccttctggcagaacccccggaaccacttcagatgccaggtgcagttctacggcctgagcgagaacgacgagtggacccaggacagagccaagcccgtgacccagatcgtgtctgccgaagcctggggcagagccgattgcggcatcaccagcgccagctaccaccagggcgtgctgagcgccaccatcctgtacgagatcctgctgggcaaggccaccctgtacgccgtgctggtgtctgccctggtgctgatggctatggtcaagcggaaggacagccggggaagggccaagcgatctggatctggagcaacaaacttctcactactcaaacaagcaggtgacgtggaggagaatcccgggccttctagaggccatatgaccgagtacaagcccacggtgcgcctcgccacccgcgacgacgtccccagggccgtacgcaccctcgccgccgcgttcgccgactaccccgccacgcgccacaccgtcgatccggaccgccacatcgagcgggtcaccgagctgcaagaactcttcctcacgcgcgtcgggctcgacatcggcaaggtgtgggtcgcggacgacggcgccgcggtggcggtctggaccacgccggagagcgtcgaagcgggggcggtgttcgccgagatcggcccgcgcatggccgagttgagcggttcccggctggccgcgcagcaacagatggaaggcctcctggcgccgcaccggcccaaggagcccgcgtggttcctggccaccgtcggcgtctcgcccgaccaccagggcaagggtctgggcagcgccgtcgtgctccccggagtggaggcggccgagcgcgccggggtgcccgccttcctggagacctccgcgccccgcaacctccccttctacgagcggctcggcttcaccgtcaccgccgacgtcgaggtgcccgaaggaccgcgcacctggtgcatgacccgcaagcccggtgcctga

SEQ ID NO: 5322 - DNA, 3378 bp, Artificial Sequence
  Synthetic Polynucloetide
atggccttaccagtgaccgccttgctcctgccgctggccttgctgctccacgccgccaggccggaggttcagctgcttgagtctggcggaggactggttcaacctggcggaagcctgagactgtcttgtgccgccagcggcttcacctttagcagctacgccatgagctgggtccgacaggctcctggcaaaggactggaatgggtgtccagcatcagcggcagcggcgactacatctactacgccgatagcgtgaagggcagattcaccatcagccgggacatcagcaagaacaccctgtacctccagatgaacagcctgagagccgaggacaccgccgtgtactactgtgccaaagaaggcaccggcgctaacagcagcctggccgattatagaggccagggcacactggtcaccgtgtctagtggcggaggaagcggcggaggatctgaagttcagctgcttgagtctggcggaggactggttcaacctggcggaagcctgagactgtcttgtgccgccagcggcttcatcttcagcagctacgccatgagctgggtccgacaggctcctggaaagggccaagaatgggtttccggcgttagcggcacaggcgtgaacacctactacgccgatagcgtgaagggcagattcaccatcagccgggacaacagcaagaacaccctgtacctccagatgaacagcctgagagccgaggacaccgccgtgtactattgtgcctctggcaaaggctgggacagcggctcttggtacgaggactatagaggccagggcaccctggtcacagtttcttcaggtaccggcggaggcggatctggcggcggaggtagcggtggcggaggatctgaattcgacatccagatgacacagagccctagcagcctgtctgccagcgtgggagacagagtgaccatcacatgcaaggccagcgaccacatcaacaactggctggcctggtatcagcagaagcctggacaggcccctaagctgctgatctacggcgctaccacactggaaacaggcgtgcccagcagattttctggcagcggctctggcaccgactacaccctgacaatatccagcctccagcctgaggacttcgccacctactactgtcagcagagctggaacaccccttggacattcggccagggcaccaagctggaaatcaagagactcgaggacctgaagaacgtgttcccacctgaggtggccgtgttcgagcctagcaaggccgagatcgcccacacccagaaagccaccctcgtgtgcctggctaccggcttctaccccgaccatgtggaactgtcttggtgggtcaacggcaaagaggtgcacagcggcgtgtgtaccgacccccagccactgaaagaacagcccgccctgaacgacagccggtactgcctgagcagcagactgagagtgtccgccaccttctggcagaacccccggaaccacttcagatgccaggtgcagttctacggcctgagcgagaacgacgagtggacccaggacagagccaagcccgtgacccagatcgtgtctgccgaagcctggggcagagccgattgcggcatcaccagcgccagctaccaccagggcgtgctgagcgccaccatcctgtacgagatcctgctgggcaaggccaccctgtacgccgtgctggtgtctgccctggtgctgatggctatggtcaagcggaaggacagccggggaagggccaagcgatctggatctggagcaacaaacttctcactactcaaacaagcaggtgacgtggaggagaatcccgggcctactagtatggactggatttggcgcatccttttccttgtcggcgctgctaccggcgcgcattccttcgaacaagttcagcttcaacagcctggcgctgagctggtcaaacctggcgcttctgtgaagatgagctgcaaagccagcggctacgccttcagcagctactggatcaactggatgaagcagaaacccggccagggactcgaatggatcggccaaatctatcccggcgacggcgacaccaactacaacggcaagttcaagggcagagccacactgaccgccgatacctctagcagcacagcctacatgcagctgagcagcctgaccagcgaagatagcgccgtgtacttctgtgcccggtccatcacaacagtcgtgggctgcgctatggactattggggccagggaacaagcgtgaccgtgtctagtacgcgtatccagaaccctgatcctgccgtgtaccagctgcgggatagcaagagcagcgacaagagcgtgtgtctgttcaccgacttcgacagccagaccaacgtgtcccagagcaaggactccgacgtgtacatcaccgataagtgcgtgctggacatgcggagcatggacttcaagagcaactccgccgtggcctggtccaacaagtccgatttcgcctgcgccaacgccttcaacaacagcattatccccgaggacacattcttcccaagcagcgacgtgccctgcgacgtgaagctggtggaaaagagcttcgagacagacaccaacctgaacttccagaacctgagcgtgatcggcttcagaatcctgctgctgaaagtggccggctttaacctgctgatgaccctgcggctgtggtccagccgcgccaagagaagcggatctggcgtgaagcagaccctgaatttcgacctgctgaagctggctggcgacgtggaatccaacccaggcccttctagaggccatatgaccgagtacaagcccacggtgcgcctcgccacccgcgacgacgtccccagggccgtacgcaccctcgccgccgcgttcgccgactaccccgccacgcgccacaccgtcgatccggaccgccacatcgagcgggtcaccgagctgcaagaactcttcctcacgcgcgtcgggctcgacatcggcaaggtgtgggtcgcggacgacggcgccgcggtggcggtctggaccacgccggagagcgtcgaagcgggggcggtgttcgccgagatcggcccgcgcatggccgagttgagcggttcccggctggccgcgcagcaacagatggaaggcctcctggcgccgcaccggcccaaggagcccgcgtggttcctggccaccgtcggcgtctcgcccgaccaccagggcaagggtctgggcagcgccgtcgtgctccccggagtggaggcggccgagcgcgccggggtgcccgccttcctggagacctccgcgccccgcaacctccccttctacgagcggctcggcttcaccgtcaccgccgacgtcgaggtgcccgaaggaccgcgcacctggtgcatgacccgcaagcccggtgcctga

SEQ ID NO: 5323 - DNA, 2676 bp, Artificial Sequence
  Synthetic Polynucloetide
atggccttaccagtgaccgccttgctcctgccgctggccttgctgctccacgccgccaggccggaggttcagctgcttgagtctggcggaggactggttcaacctggcggaagcctgagactgtcttgtgccgccagcggcttcacctttagcagctacgccatgagctgggtccgacaggctcctggcaaaggactggaatgggtgtccagcatcagcggcagcggcgactacatctactacgccgatagcgtgaagggcagattcaccatcagccgggacatcagcaagaacaccctgtacctccagatgaacagcctgagagccgaggacaccgccgtgtactactgtgccaaagaaggcaccggcgctaacagcagcctggccgattatagaggccagggcacactggtcaccgtgtctagtggcggaggaagcggcggaggatctgaagttcagctgcttgagtctggcggaggactggttcaacctggcggaagcctgagactgtcttgtgccgccagcggcttcatcttcagcagctacgccatgagctgggtccgacaggctcctggaaagggccaagaatgggtttccggcgttagcggcacaggcgtgaacacctactacgccgatagcgtgaagggcagattcaccatcagccgggacaacagcaagaacaccctgtacctccagatgaacagcctgagagccgaggacaccgccgtgtactattgtgcctctggcaaaggctgggacagcggctcttggtacgaggactatagaggccagggcaccctggtcacagtttcttcaggtaccggcggaggcggatctggcggcggaggtagcggtggcggaggatctgaattcgacatccagatgacacagagccctagcagcctgtctgccagcgtgggagacagagtgaccatcacatgcaaggccagcgaccacatcaacaactggctggcctggtatcagcagaagcctggacaggcccctaagctgctgatctacggcgctaccacactggaaacaggcgtgcccagcagattttctggcagcggctctggcaccgactacaccctgacaatatccagcctccagcctgaggacttcgccacctactactgtcagcagagctggaacaccccttggacattcggccagggcaccaagctggaaatcaagagactcgaggacctgaagaacgtgttcccacctgaggtggccgtgttcgagcctagcgaggccgagatcagccacacccagaaagccaccctcgtgtgcctggctaccggcttctaccccgaccatgtggaactgtcttggtgggtcaacggcaaagaggtgcacagcggcgtgtgtaccgacccccagccactgaaagaacagcccgccctgaacgacagccggtactgcctgagcagcagactgagagtgtccgccaccttctggcagaacccccggaaccacttcagatgccaggtgcagttctacggcctgagcgagaacgacgagtggacccaggacagagccaagcccgtgacccagatcgtgtctgccgaagcctggggcagagccgattgcggctttaccagcgagagctaccagcagggcgtgctgagcgccaccatcctgtacgagatcctgctgggcaaggccaccctgtacgccgtgctggtgtctgccctggtgctgatggctatggtcaagcggaaggacagccggggaagggccaagcgatctggatctggagcaacaaacttctcactactcaaacaagcaggtgacgtggaggagaatcccgggcctactagtatggactggatttggcgcatccttttccttgtcggcgctgctaccggcgcgcattccttcgaacaagttcagcttcaacagcctggcgctgagctggtcaaacctggcgcttctgtgaagatgagctgcaaagccagcggctacgccttcagcagctactggatcaactggatgaagcagaaacccggccagggactcgaatggatcggccaaatctatcccggcgacggcgacaccaactacaacggcaagttcaagggcagagccacactgaccgccgatacctctagcagcacagcctacatgcagctgagcagcctgaccagcgaagatagcgccgtgtacttctgtgcccggtccatcacaacagtcgtgggctgcgctatggactattggggccagggaacaagcgtgaccgtgtctagtacgcgtatccagaaccctgatcctgccgtgtaccagctgcgggatagcaagagcagcgacaagagcgtgtgtctgttcaccgacttcgacagccagaccaacgtgtcccagagcaaggactccgacgtgtacatcaccgataagtgcgtgctggacatgcggagcatggacttcaagagcaactccgccgtggcctggtccaacaagtccgatttcgcctgcgccaacgccttcaacaacagcattatccccgaggacacattcttcccaagccccgagagcagctgcgacgtgaagctggtggaaaagagcttcgagacagacaccaacctgaacttccagaacctgagcgtgatcggcttcagaatcctgctgctgaaagtggccggctttaacctgctgatgaccctgcggctgtggtccagc

SEQ ID NO: 5324 - DNA, 3351 bp, Artificial Sequence
  Synthetic Polynucloetide
atggccttaccagtgaccgccttgctcctgccgctggccttgctgctccacgccgccaggccggaggttcagctgcttgagtctggcggaggactggttcaacctggcggaagcctgagactgtcttgtgccgccagcggcttcacctttagcagctacgccatgagctgggtccgacaggctcctggcaaaggactggaatgggtgtccagcatcagcggcagcggcgactacatctactacgccgatagcgtgaagggcagattcaccatcagccgggacatcagcaagaacaccctgtacctccagatgaacagcctgagagccgaggacaccgccgtgtactactgtgccaaagaaggcaccggcgctaacagcagcctggccgattatagaggccagggcacactggtcaccgtgtctagtggcggaggaagcggcggaggatctgaagttcagctgcttgagtctggcggaggactggttcaacctggcggaagcctgagactgtcttgtgccgccagcggcttcatcttcagcagctacgccatgagctgggtccgacaggctcctggaaagggccaagaatgggtttccggcgttagcggcacaggcgtgaacacctactacgccgatagcgtgaagggcagattcaccatcagccgggacaacagcaagaacaccctgtacctccagatgaacagcctgagagccgaggacaccgccgtgtactattgtgcctctggcaaaggctgggacagcggctcttggtacgaggactatagaggccagggcaccctggtcacagtttcttcaggtaccggcggaggcggatctggcggcggaggtagcggtggcggaggatctgaattcgacatccagatgacacagagccctagcagcctgtctgccagcgtgggagacagagtgaccatcacatgcaaggccagcgaccacatcaacaactggctggcctggtatcagcagaagcctggacaggcccctaagctgctgatctacggcgctaccacactggaaacaggcgtgcccagcagattttctggcagcggctctggcaccgactacaccctgacaatatccagcctccagcctgaggacttcgccacctactactgtcagcagagctggaacaccccttggacattcggccagggcaccaagctggaaatcaagagactcgaggacctgaagaacgtgttcccacctgaggtggccgtgttcgagcctagcgaggccgagatcagccacacccagaaagccaccctcgtgtgcctggctaccggcttctaccccgaccatgtggaactgtcttggtgggtcaacggcaaagaggtgcacagcggcgtgtgtaccgacccccagccactgaaagaacagcccgccctgaacgacagccggtactgcctgagcagcagactgagagtgtccgccaccttctggcagaacccccggaaccacttcagatgccaggtgcagttctacggcctgagcgagaacgacgagtggacccaggacagagccaagcccgtgacccagatcgtgtctgccgaagcctggggcagagccgattgcggctttaccagcgagagctaccagcagggcgtgctgagcgccaccatcctgtacgagatcctgctgggcaaggccaccctgtacgccgtgctggtgtctgccctggtgctgatggctatggtcaagcggaaggacagccggggaagggccaagcgatctggatctggagcaacaaacttctcactactcaaacaagcaggtgacgtggaggagaatcccgggcctactagtatggactggatttggcgcatccttttccttgtcggcgctgctaccggcgcgcattccttcgaacaagttcagcttcaacagcctggcgctgagctggtcaaacctggcgcttctgtgaagatgagctgcaaagccagcggctacgccttcagcagctactggatcaactggatgaagcagaaacccggccagggactcgaatggatcggccaaatctatcccggcgacggcgacaccaactacaacggcaagttcaagggcagagccacactgaccgccgatacctctagcagcacagcctacatgcagctgagcagcctgaccagcgaagatagcgccgtgtacttctgtgcccggtccatcacaacagtcgtgggctgcgctatggactattggggccagggaacaagcgtgaccgtgtctagtacgcgtatccagaaccctgatcctgccgtgtaccagctgcgggatagcaagagcagcgacaagagcgtgtgtctgttcaccgacttcgacagccagaccaacgtgtcccagagcaaggactccgacgtgtacatcaccgataagtgcgtgctggacatgcggagcatggacttcaagagcaactccgccgtggcctggtccaacaagtccgatttcgcctgcgccaacgccttcaacaacagcattatccccgaggacacattcttcccaagccccgagagcagctgcgacgtgaagctggtggaaaagagcttcgagacagacaccaacctgaacttccagaacctgagcgtgatcggcttcagaatcctgctgctgaaagtggccggctttaacctgctgatgaccctgcggctgtggtccagccgcgccaagagaagcggatctggcgtgaagcagaccctgaatttcgacctgctgaagctggctggcgacgtggaatccaacccaggcccttctagaggcgggatccacaccatggctacctacgaggtgctgtgcgaggtggcaagaaagctgggcaccgacgacagagaagtggtgctgttcctgctgaacgtgttcatccctcagcctacactggcccagctgatcggtgcactgagagccctgaaagaggaaggccggctgacctttcctctgctggccgaatgcctgttcagagccggaagaagggatctgctgcgggacctgctgcatctggaccccagatttctggaaagacacctggccggcaccatgagctacttcagcccttaccagctgaccgtgctgcacgttgacggcgaactgtgcgccagagatattcggagcctgatcttcctgagcaaggacaccatcggcagccggtctacccctcagacatttctgcactgggtgtactgcatggaaaacctggacctgctcggccccacagatgtggatgccctgatgtccatgctgagaagcctgagcagagtggacctccagagacaggtgcagacactgatgggactgcacctgagcggacctagccacagccagcactacagacacacccct

SEQ ID NO: 5325 - DNA, 2688 bp, Artificial Sequence
  Synthetic Polynucloetide
atggccttaccagtgaccgccttgctcctgccgctggccttgctgctccacgccgccaggccggaggttcagctgcttgagtctggcggaggactggttcaacctggcggaagcctgagactgtcttgtgccgccagcggcttcacctttagcagctacgccatgagctgggtccgacaggctcctggcaaaggactggaatgggtgtccagcatcagcggcagcggcgactacatctactacgccgatagcgtgaagggcagattcaccatcagccgggacatcagcaagaacaccctgtacctccagatgaacagcctgagagccgaggacaccgccgtgtactactgtgccaaagaaggcaccggcgctaacagcagcctggccgattatagaggccagggcacactggtcaccgtgtctagtggcggaggaagcggcggaggatctgaagttcagctgcttgagtctggcggaggactggttcaacctggcggaagcctgagactgtcttgtgccgccagcggcttcatcttcagcagctacgccatgagctgggtccgacaggctcctggaaagggccaagaatgggtttccggcgttagcggcacaggcgtgaacacctactacgccgatagcgtgaagggcagattcaccatcagccgggacaacagcaagaacaccctgtacctccagatgaacagcctgagagccgaggacaccgccgtgtactattgtgcctctggcaaaggctgggacagcggctcttggtacgaggactatagaggccagggcaccctggtcacagtttcttcaggtaccggcggaggcggatctggcggcggaggtagcggtggcggaggatctgaattcgacatccagatgacacagagccctagcagcctgtctgccagcgtgggagacagagtgaccatcacatgcaaggccagcgaccacatcaacaactggctggcctggtatcagcagaagcctggacaggcccctaagctgctgatctacggcgctaccacactggaaacaggcgtgcccagcagattttctggcagcggctctggcaccgactacaccctgacaatatccagcctccagcctgaggacttcgccacctactactgtcagcagagctggaacaccccttggacattcggccagggcaccaagctggaaatcaagagactcgagatccagaaccctgatcctgccgtgtaccagctgcgggatagcaagagcagcgacaagagcgtgtgtctgttcaccgacttcgacagccagaccaacgtgtcccagagcaaggactccgacgtgtacatcaccgataagtgcgtgctggacatgcggagcatggacttcaagagcaactccgccgtggcctggtccaacaagtccgatttcgcctgcgccaacgccttcaacaacagcattatccccgaggacacattcttcccaagccccgagagcagctgcgacgtgaagctggtggaaaagagcttcgagacagacaccaacctgaacttccagaacctgagcgtgatcggcttcagaatcctgctgctgaaagtggccggctttaacctgctgatgaccctgcggctgtggtccagccgcgccaagagaagcggatctggcgtgaagcagaccctgaatttcgacctgctgaagctggctggcgacgtggaatccaacccaggccctactagtatggactggatttggcgcatccttttccttgtcggcgctgctaccggcgcgcattccttcgaacaagttcagcttcaacagcctggcgctgagctggtcaaacctggcgcttctgtgaagatgagctgcaaagccagcggctacgccttcagcagctactggatcaactggatgaagcagaaacccggccagggactcgaatggatcggccaaatctatcccggcgacggcgacaccaactacaacggcaagttcaagggcagagccacactgaccgccgatacctctagcagcacagcctacatgcagctgagcagcctgaccagcgaagatagcgccgtgtacttctgtgcccggtccatcacaacagtcgtgggctgcgctatggactattggggccagggaacaagcgtgaccgtgtctagtacgcgtgaggacctgaagaacgtgttcccacctgaggtggccgtgttcgagcctagcgaggccgagatcagccacacccagaaagccaccctcgtgtgcctggctaccggcttctaccccgaccatgtggaactgtcttggtgggtcaacggcaaagaggtgcacagcggcgtgtgtaccgacccccagccactgaaagaacagcccgccctgaacgacagccggtactgcctgagcagcagactgagagtgtccgccaccttctggcagaacccccggaaccacttcagatgccaggtgcagttctacggcctgagcgagaacgacgagtggacccaggacagagccaagcccgtgacccagatcgtgtctgccgaagcctggggcagagccgattgcggctttaccagcgagagctaccagcagggcgtgctgagcgccaccatcctgtacgagatcctgctgggcaaggccaccctgtacgccgtgctggtgtctgccctggtgctgatggctatggtcaagcggaaggacagccgggga

SEQ ID NO: 5326 - DNA, 3354 bp, Artificial Sequence
  Synthetic Polynucloetide
atggccttaccagtgaccgccttgctcctgccgctggccttgctgctccacgccgccaggccggaggttcagctgcttgagtctggcggaggactggttcaacctggcggaagcctgagactgtcttgtgccgccagcggcttcacctttagcagctacgccatgagctgggtccgacaggctcctggcaaaggactggaatgggtgtccagcatcagcggcagcggcgactacatctactacgccgatagcgtgaagggcagattcaccatcagccgggacatcagcaagaacaccctgtacctccagatgaacagcctgagagccgaggacaccgccgtgtactactgtgccaaagaaggcaccggcgctaacagcagcctggccgattatagaggccagggcacactggtcaccgtgtctagtggcggaggaagcggcggaggatctgaagttcagctgcttgagtctggcggaggactggttcaacctggcggaagcctgagactgtcttgtgccgccagcggcttcatcttcagcagctacgccatgagctgggtccgacaggctcctggaaagggccaagaatgggtttccggcgttagcggcacaggcgtgaacacctactacgccgatagcgtgaagggcagattcaccatcagccgggacaacagcaagaacaccctgtacctccagatgaacagcctgagagccgaggacaccgccgtgtactattgtgcctctggcaaaggctgggacagcggctcttggtacgaggactatagaggccagggcaccctggtcacagtttcttcaggtaccggcggaggcggatctggcggcggaggtagcggtggcggaggatctgaattcgacatccagatgacacagagccctagcagcctgtctgccagcgtgggagacagagtgaccatcacatgcaaggccagcgaccacatcaacaactggctggcctggtatcagcagaagcctggacaggcccctaagctgctgatctacggcgctaccacactggaaacaggcgtgcccagcagattttctggcagcggctctggcaccgactacaccctgacaatatccagcctccagcctgaggacttcgccacctactactgtcagcagagctggaacaccccttggacattcggccagggcaccaagctggaaatcaagagactcgagatccagaaccctgatcctgccgtgtaccagctgcgggatagcaagagcagcgacaagagcgtgtgtctgttcaccgacttcgacagccagaccaacgtgtcccagagcaaggactccgacgtgtacatcaccgataagtgcgtgctggacatgcggagcatggacttcaagagcaactccgccgtggcctggtccaacaagtccgatttcgcctgcgccaacgccttcaacaacagcattatccccgaggacacattcttcccaagccccgagagcagctgcgacgtgaagctggtggaaaagagcttcgagacagacaccaacctgaacttccagaacctgagcgtgatcggcttcagaatcctgctgctgaaagtggccggctttaacctgctgatgaccctgcggctgtggtccagccgcgccaagagaagcggatctggcgtgaagcagaccctgaatttcgacctgctgaagctggctggcgacgtggaatccaacccaggccctactagtatggactggatttggcgcatccttttccttgtcggcgctgctaccggcgcgcattccttcgaacaagttcagcttcaacagcctggcgctgagctggtcaaacctggcgcttctgtgaagatgagctgcaaagccagcggctacgccttcagcagctactggatcaactggatgaagcagaaacccggccagggactcgaatggatcggccaaatctatcccggcgacggcgacaccaactacaacggcaagttcaagggcagagccacactgaccgccgatacctctagcagcacagcctacatgcagctgagcagcctgaccagcgaagatagcgccgtgtacttctgtgcccggtccatcacaacagtcgtgggctgcgctatggactattggggccagggaacaagcgtgaccgtgtctagtacgcgtgaggacctgaagaacgtgttcccacctgaggtggccgtgttcgagcctagcgaggccgagatcagccacacccagaaagccaccctcgtgtgcctggctaccggcttctaccccgaccatgtggaactgtcttggtgggtcaacggcaaagaggtgcacagcggcgtgtgtaccgacccccagccactgaaagaacagcccgccctgaacgacagccggtactgcctgagcagcagactgagagtgtccgccaccttctggcagaacccccggaaccacttcagatgccaggtgcagttctacggcctgagcgagaacgacgagtggacccaggacagagccaagcccgtgacccagatcgtgtctgccgaagcctggggcagagccgattgcggctttaccagcgagagctaccagcagggcgtgctgagcgccaccatcctgtacgagatcctgctgggcaaggccaccctgtacgccgtgctggtgtctgccctggtgctgatggctatggtcaagcggaaggacagccggggaagggccaagcgatctggatctggagcaacaaacttctcactactcaaacaagcaggtgacgtggaggagaatcccgggccttctagaggcgggatccacaccatggctacctacgaggtgctgtgcgaggtggcaagaaagctgggcaccgacgacagagaagtggtgctgttcctgctgaacgtgttcatccctcagcctacactggcccagctgatcggtgcactgagagccctgaaagaggaaggccggctgacctttcctctgctggccgaatgcctgttcagagccggaagaagggatctgctgcgggacctgctgcatctggaccccagatttctggaaagacacctggccggcaccatgagctacttcagcccttaccagctgaccgtgctgcacgttgacggcgaactgtgcgccagagatattcggagcctgatcttcctgagcaaggacaccatcggcagccggtctacccctcagacatttctgcactgggtgtactgcatggaaaacctggacctgctcggccccacagatgtggatgccctgatgtccatgctgagaagcctgagcagagtggacctccagagacaggtgcagacactgatgggactgcacctgagcggacctagccacagccagcactacagacacacccct

SEQ ID NO: 5327 - DNA, 3513 bp, Artificial Sequence
  Synthetic Polynucloetide
atggccttaccagtgaccgccttgctcctgccgctggccttgctgctccacgccgccaggccgctcgaggggaaaccaattcccaaccctcttctgggactggattcaaccggcagcggcgaggacctgaagaacgtgttcccacctgaggtggccgtgttcgagcctagcaaggccgagatcgcccacacccagaaagccaccctcgtgtgcctggctaccggcttctaccccgaccatgtggaactgtcttggtgggtcaacggcaaagaggtgcacagcggcgtgtgtaccgacccccagccactgaaagaacagcccgccctgaacgacagccggtactgcctgagcagcagactgagagtgtccgccaccttctggcagaacccccggaaccacttcagatgccaggtgcagttctacggcctgagcgagaacgacgagtggacccaggacagagccaagcccgtgacccagatcgtgtctgccgaagcctggggcagagccgattgcggcatcaccagcgccagctaccaccagggcgtgctgagcgccaccatcctgtacgagatcctgctgggcaaggccaccctgtacgccgtgctggtgtctgccctggtgctgatggctatggtcaagcggaaggacagccggggaagggccaagcgatctggatctggagcaacaaacttctcactactcaaacaagcaggtgacgtggaggagaatcccgggcctactagcatggccttaccagtgaccgccttgctcctgccgctggccttgctgctccacgccgccaggccggaggttcagctgcttgagtctggcggaggactggttcaacctggcggaagcctgagactgtcttgtgccgccagcggcttcacctttagcagctacgccatgagctgggtccgacaggctcctggcaaaggactggaatgggtgtccagcatcagcggcagcggcgactacatctactacgccgatagcgtgaagggcagattcaccatcagccgggacatcagcaagaacaccctgtacctccagatgaacagcctgagagccgaggacaccgccgtgtactactgtgccaaagaaggcaccggcgctaacagcagcctggccgattatagaggccagggcacactggtcaccgtgtctagtggcggaggaagcggcggaggatctgaagttcagctgcttgagtctggcggaggactggttcaacctggcggaagcctgagactgtcttgtgccgccagcggcttcatcttcagcagctacgccatgagctgggtccgacaggctcctggaaagggccaagaatgggtttccggcgttagcggcacaggcgtgaacacctactacgccgatagcgtgaagggcagattcaccatcagccgggacaacagcaagaacaccctgtacctccagatgaacagcctgagagccgaggacaccgccgtgtactattgtgcctctggcaaaggctgggacagcggctcttggtacgaggactatagaggccagggcaccctggtcacagtttcttcaggtaccggcggaggcggatctggcggcggaggtagcggtggcggaggatctgaattcgacatccagatgacacagagccctagcagcctgtctgccagcgtgggagacagagtgaccatcacatgcaaggccagcgaccacatcaacaactggctggcctggtatcagcagaagcctggacaggcccctaagctgctgatctacggcgctaccacactggaaacaggcgtgcccagcagattttctggcagcggctctggcaccgactacaccctgacaatatccagcctccagcctgaggacttcgccacctactactgtcagcagagctggaacaccccttggacattcggccagggcaccaagctggaaatcaagagaggcggaggcggaagtggaggcggaggatctggcggcggaggctctcaagttcagcttcaacagcctggcgctgagctggtcaaacctggcgcttctgtgaagatgagctgcaaagccagcggctacgccttcagcagctactggatcaactggatgaagcagaaacccggccagggactcgaatggatcggccaaatctatcccggcgacggcgacaccaactacaacggcaagttcaagggcagagccacactgaccgccgatacctctagcagcacagcctacatgcagctgagcagcctgaccagcgaagatagcgccgtgtacttctgtgcccggtccatcacaacagtcgtgggctgcgctatggactattggggccagggaacaagcgtgaccgtgtctagtacgcgtgagcagaaactgatctcggaagaggatgggagcggcatccagaaccctgatcctgccgtgtaccagctgcgggatagcaagagcagcgacaagagcgtgtgtctgttcaccgacttcgacagccagaccaacgtgtcccagagcaaggactccgacgtgtacatcaccgataagtgcgtgctggacatgcggagcatggacttcaagagcaactccgccgtggcctggtccaacaagtccgatttcgcctgcgccaacgccttcaacaacagcattatccccgaggacacattcttcccaagcagcgacgtgccctgcgacgtgaagctggtggaaaagagcttcgagacagacaccaacctgaacttccagaacctgagcgtgatcggcttcagaatcctgctgctgaaagtggccggctttaacctgctgatgaccctgcggctgtggtccagccgcgccaagagaagcggatctggcgtgaagcagaccctgaatttcgacctgctgaagctggctggcgacgtggaatccaacccaggcccttctagaggccatatgaccgagtacaagcccacggtgcgcctcgccacccgcgacgacgtccccagggccgtacgcaccctcgccgccgcgttcgccgactaccccgccacgcgccacaccgtcgatccggaccgccacatcgagcgggtcaccgagctgcaagaactcttcctcacgcgcgtcgggctcgacatcggcaaggtgtgggtcgcggacgacggcgccgcggtggcggtctggaccacgccggagagcgtcgaagcgggggcggtgttcgccgagatcggcccgcgcatggccgagttgagcggttcccggctggccgcgcagcaacagatggaaggcctcctggcgccgcaccggcccaaggagcccgcgtggttcctggccaccgtcggcgtctcgcccgaccaccagggcaagggtctgggcagcgccgtcgtgctccccggagtggaggcggccgagcgcgccggggtgcccgccttcctggagacctccgcgccccgcaacctccccttctacgagcggctcggcttcaccgtcaccgccgacgtcgaggtgcccgaaggaccgcgcacctggtgcatgacccgcaagcccggtgcctga

SEQ ID NO: 5328 - DNA, 3516 bp, Artificial Sequence
  Synthetic Polynucloetide
atggccttaccagtgaccgccttgctcctgccgctggccttgctgctccacgccgccaggccgctcgagcagaaactgatctcggaagaggatctgggctccggcgatcgccctgatcctgccgtgtaccagctgcgggatagcaagagcagcgacaagagcgtgtgtctgttcaccgacttcgacagccagaccaacgtgtcccagagcaaggactccgacgtgtacatcaccgataagtgcgtgctggacatgcggagcatggacttcaagagcaactccgccgtggcctggtccaacaagtccgatttcgcctgcgccaacgccttcaacaacagcattatccccgaggacacattcttcccaagccccgagagcagctgcgacgtgaagctggtggaaaagagcttcgagacagacaccaacctgaacttccagaacctgagcgtgatcggcttcagaatcctgctgctgaaagtggccggctttaacctgctgatgaccctgcggctgtggtccagctctagtcgcgccaagagaagcggatctggcgtgaagcagaccctgaatttcgacctgctgaagctggctggcgacgtggaatccaacccaggccccactagcatggccttaccagtgaccgccttgctcctgccgctggccttgctgctccacgccgccaggccggaggttcagctgcttgagtctggcggaggactggttcaacctggcggaagcctgagactgtcttgtgccgccagcggcttcacctttagcagctacgccatgagctgggtccgacaggctcctggcaaaggactggaatgggtgtccagcatcagcggcagcggcgactacatctactacgccgatagcgtgaagggcagattcaccatcagccgggacatcagcaagaacaccctgtacctccagatgaacagcctgagagccgaggacaccgccgtgtactactgtgccaaagaaggcaccggcgctaacagcagcctggccgattatagaggccagggcacactggtcaccgtgtctagtggcggaggaagcggcggaggatctgaagttcagctgcttgagtctggcggaggactggttcaacctggcggaagcctgagactgtcttgtgccgccagcggcttcatcttcagcagctacgccatgagctgggtccgacaggctcctggaaagggccaagaatgggtttccggcgttagcggcacaggcgtgaacacctactacgccgatagcgtgaagggcagattcaccatcagccgggacaacagcaagaacaccctgtacctccagatgaacagcctgagagccgaggacaccgccgtgtactattgtgcctctggcaaaggctgggacagcggctcttggtacgaggactatagaggccagggcaccctggtcacagtttcttcaggtaccggcggaggcggatctggcggcggaggtagcggtggcggaggatctgaattcgacatccagatgacacagagccctagcagcctgtctgccagcgtgggagacagagtgaccatcacatgcaaggccagcgaccacatcaacaactggctggcctggtatcagcagaagcctggacaggcccctaagctgctgatctacggcgctaccacactggaaacaggcgtgcccagcagattttctggcagcggctctggcaccgactacaccctgacaatatccagcctccagcctgaggacttcgccacctactactgtcagcagagctggaacaccccttggacattcggccagggcaccaagctggaaatcaagagaggcggaggcggaagtggaggcggaggatctggcggcggaggctctcaagttcagcttcaacagcctggcgctgagctggtcaaacctggcgcttctgtgaagatgagctgcaaagccagcggctacgccttcagcagctactggatcaactggatgaagcagaaacccggccagggactcgaatggatcggccaaatctatcccggcgacggcgacaccaactacaacggcaagttcaagggcagagccacactgaccgccgatacctctagcagcacagcctacatgcagctgagcagcctgaccagcgaagatagcgccgtgtacttctgtgcccggtccatcacaacagtcgtgggctgcgctatggactattggggccagggaacaagcgtgaccgtgtctagtacgcgtgggaaaccaattcccaaccctcttctgggactggattcaaccggcagcggcgaggacctgaagaacgtgttcccacctgaggtggccgtgttcgagcctagcgaggccgagatcagccacacccagaaagccaccctcgtgtgcctggctaccggcttctaccccgaccatgtggaactgtcttggtgggtcaacggcaaagaggtgcacagcggcgtgtgtaccgacccccagccactgaaagaacagcccgccctgaacgacagccggtactgcctgagcagcagactgagagtgtccgccaccttctggcagaacccccggaaccacttcagatgccaggtgcagttctacggcctgagcgagaacgacgagtggacccaggacagagccaagcccgtgacccagatcgtgtctgccgaagcctggggcagagccgattgcggctttaccagcgagagctaccagcagggcgtgctgagcgccaccatcctgtacgagatcctgctgggcaaggccaccctgtacgccgtgctggtgtctgccctggtgctgatggctatggtcaagcggaaggacagccggggaagggccaagcgatctggatctggagcaacaaacttctcactactcaaacaagcaggtgacgtggaggagaatcccgggccttctagaggccatatgaccgagtacaagcccacggtgcgcctcgccacccgcgacgacgtccccagggccgtacgcaccctcgccgccgcgttcgccgactaccccgccacgcgccacaccgtcgatccggaccgccacatcgagcgggtcaccgagctgcaagaactcttcctcacgcgcgtcgggctcgacatcggcaaggtgtgggtcgcggacgacggcgccgcggtggcggtctggaccacgccggagagcgtcgaagcgggggcggtgttcgccgagatcggcccgcgcatggccgagttgagcggttcccggctggccgcgcagcaacagatggaaggcctcctggcgccgcaccggcccaaggagcccgcgtggttcctggccaccgtcggcgtctcgcccgaccaccagggcaagggtctgggcagcgccgtcgtgctccccggagtggaggcggccgagcgcgccggggtgcccgccttcctggagacctccgcgccccgcaacctccccttctacgagcggctcggcttcaccgtcaccgccgacgtcgaggtgcccgaaggaccgcgcacctggtgcatgacccgcaagcccggtgcctga

SEQ ID NO: 5329 - DNA, 3378 bp, Artificial Sequence
  Synthetic Polynucloetide
atggccttaccagtgaccgccttgctcctgccgctggccttgctgctccacgccgccaggccggaggttcagctgcttgagtctggcggaggactggttcaacctggcggaagcctgagactgtcttgtgccgccagcggcttcacctttagcagctacgccatgagctgggtccgacaggctcctggcaaaggactggaatgggtgtccagcatcagcggcagcggcgactacatctactacgccgatagcgtgaagggcagattcaccatcagccgggacatcagcaagaacaccctgtacctccagatgaacagcctgagagccgaggacaccgccgtgtactactgtgccaaagaaggcaccggcgctaacagcagcctggccgattatagaggccagggcacactggtcaccgtgtctagtggcggaggaagcggcggaggatctgaagttcagctgcttgagtctggcggaggactggttcaacctggcggaagcctgagactgtcttgtgccgccagcggcttcatcttcagcagctacgccatgagctgggtccgacaggctcctggaaagggccaagaatgggtttccggcgttagcggcacaggcgtgaacacctactacgccgatagcgtgaagggcagattcaccatcagccgggacaacagcaagaacaccctgtacctccagatgaacagcctgagagccgaggacaccgccgtgtactattgtgcctctggcaaaggctgggacagcggctcttggtacgaggactatagaggccagggcaccctggtcacagtttcttcaggtaccggcggaggcggatctggcggcggaggtagcggtggcggaggatctgaattcgacatccagatgacacagagccctagcagcctgtctgccagcgtgggagacagagtgaccatcacatgcaaggccagcgaccacatcaacaactggctggcctggtatcagcagaagcctggacaggcccctaagctgctgatctacggcgctaccacactggaaacaggcgtgcccagcagattttctggcagcggctctggcaccgactacaccctgacaatatccagcctccagcctgaggacttcgccacctactactgtcagcagagctggaacaccccttggacattcggccagggcaccaagctggaaatcaagagactcgaggacctgaagaacgtgttcccacctgaggtggccgtgttcgagcctagcgaggccgagatcagccacacccagaaagccaccctcgtgtgcctggctaccggcttctaccccgaccatgtggaactgtcttggtgggtcaacggcaaagaggtgcacagcggcgtgtctaccgacccccagccactgaaagaacagcccgccctgaacgacagccggtactgcctgagcagcagactgagagtgtccgccaccttctggcagaacccccggaaccacttcagatgccaggtgcagttctacggcctgagcgagaacgacgagtggacccaggacagagccaagcccgtgacccagatcgtgtctgccgaagcctggggcagagccgattgcggctttaccagcgagagctaccagcagggcgtgctgagcgccaccatcctgtacgagatcctgctgggcaaggccaccctgtacgccgtgctggtgtctgccctggtgctgatggctatggtcaagcggaaggacagccggggaagggccaagcgatctggatctggagcaacaaacttctcactactcaaacaagcaggtgacgtggaggagaatcccgggcctactagtatggactggatttggcgcatccttttccttgtcggcgctgctaccggcgcgcattccttcgaacaagttcagcttcaacagcctggcgctgagctggtcaaacctggcgcttctgtgaagatgagctgcaaagccagcggctacgccttcagcagctactggatcaactggatgaagcagaaacccggccagggactcgaatggatcggccaaatctatcccggcgacggcgacaccaactacaacggcaagttcaagggcagagccacactgaccgccgatacctctagcagcacagcctacatgcagctgagcagcctgaccagcgaagatagcgccgtgtacttctgtgcccggtccatcacaacagtcgtgggctgcgctatggactattggggccagggaacaagcgtgaccgtgtctagtacgcgtatccagaaccctgatcctgccgtgtaccagctgcgggatagcaagagcagcgacaagagcgtgtgtctgttcaccgacttcgacagccagaccaacgtgtcccagagcaaggactccgacgtgtacatcaccgataagaccgtgctggacatgcggagcatggacttcaagagcaactccgccgtggcctggtccaacaagtccgatttcgcctgcgccaacgccttcaacaacagcattatccccgaggacacattcttcccaagccccgagagcagctgcgacgtgaagctggtggaaaagagcttcgagacagacaccaacctgaacttccagaacctgagcgtgatcggcttcagaatcctgctgctgaaagtggccggctttaacctgctgatgaccctgcggctgtggtccagccgcgccaagagaagcggatctggcgtgaagcagaccctgaatttcgacctgctgaagctggctggcgacgtggaatccaacccaggcccttctagaggccatatgaccgagtacaagcccacggtgcgcctcgccacccgcgacgacgtccccagggccgtacgcaccctcgccgccgcgttcgccgactaccccgccacgcgccacaccgtcgatccggaccgccacatcgagcgggtcaccgagctgcaagaactcttcctcacgcgcgtcgggctcgacatcggcaaggtgtgggtcgcggacgacggcgccgcggtggcggtctggaccacgccggagagcgtcgaagcgggggcggtgttcgccgagatcggcccgcgcatggccgagttgagcggttcccggctggccgcgcagcaacagatggaaggcctcctggcgccgcaccggcccaaggagcccgcgtggttcctggccaccgtcggcgtctcgcccgaccaccagggcaagggtctgggcagcgccgtcgtgctccccggagtggaggcggccgagcgcgccggggtgcccgccttcctggagacctccgcgccccgcaacctccccttctacgagcggctcggcttcaccgtcaccgccgacgtcgaggtgcccgaaggaccgcgcacctggtgcatgacccgcaagcccggtgcctga

SEQ ID NO: 5330 - DNA, 3624 bp, Artificial Sequence
  Synthetic Polynucloetide
atggccttaccagtgaccgccttgctcctgccgctggccttgctgctccacgccgccaggccggaggttcagctgcttgagtctggcggaggactggttcaacctggcggaagcctgagactgtcttgtgccgccagcggcttcacctttagcagctacgccatgagctgggtccgacaggctcctggcaaaggactggaatgggtgtccagcatcagcggcagcggcgactacatctactacgccgatagcgtgaagggcagattcaccatcagccgggacatcagcaagaacaccctgtacctccagatgaacagcctgagagccgaggacaccgccgtgtactactgtgccaaagaaggcaccggcgctaacagcagcctggccgattatagaggccagggcacactggtcaccgtgtctagtggcggaggaagcggcggaggatctgaagttcagctgcttgagtctggcggaggactggttcaacctggcggaagcctgagactgtcttgtgccgccagcggcttcatcttcagcagctacgccatgagctgggtccgacaggctcctggaaagggccaagaatgggtttccggcgttagcggcacaggcgtgaacacctactacgccgatagcgtgaagggcagattcaccatcagccgggacaacagcaagaacaccctgtacctccagatgaacagcctgagagccgaggacaccgccgtgtactattgtgcctctggcaaaggctgggacagcggctcttggtacgaggactatagaggccagggcaccctggtcacagtttcttcaggtaccggcggaggcggatctggcggcggaggtagcggtggcggaggatctgaattcgacatccagatgacacagagccctagcagcctgtctgccagcgtgggagacagagtgaccatcacatgcaaggccagcgaccacatcaacaactggctggcctggtatcagcagaagcctggacaggcccctaagctgctgatctacggcgctaccacactggaaacaggcgtgcccagcagattttctggcagcggctctggcaccgactacaccctgacaatatccagcctccagcctgaggacttcgccacctactactgtcagcagagctggaacaccccttggacattcggccagggcaccaagctggaaatcaagagactcgaggacctgaagaacgtgttcccacctgaggtggccgtgttcgagcctagcgaggccgagatcagccacacccagaaagccaccctcgtgtgcctggctaccggcttctaccccgaccatgtggaactgtcttggtgggtcaacggcaaagaggtgcacagcggcgtgtctaccgacccccagccactgaaagaacagcccgccctgaacgacagccggtactgcctgagcagcagactgagagtgtccgccaccttctggcagaacccccggaaccacttcagatgccaggtgcagttctacggcctgagcgagaacgacgagtggacccaggacagagccaagcccgtgacccagatcgtgtctgccgaagcctggggcagagccgattgcggctttaccagcgagagctaccagcagggcgtgctgagcgccaccatcctgtacgagatcctgctgggcaaggccaccctgtacgccgtgctggtgtctgccctggtgctgatggctatggtcaagcggaaggacagccggggaagggccaagcgatctggatctggagcaacaaacttctcactactcaaacaagcaggtgacgtggaggagaatcccgggcctactagtatggactggatttggcgcatccttttccttgtcggcgctgctaccggcgcgcattccttcgaacaagttcagcttcaacagcctggcgctgagctggtcaaacctggcgcttctgtgaagatgagctgcaaagccagcggctacgccttcagcagctactggatcaactggatgaagcagaaacccggccagggactcgaatggatcggccaaatctatcccggcgacggcgacaccaactacaacggcaagttcaagggcagagccacactgaccgccgatacctctagcagcacagcctacatgcagctgagcagcctgaccagcgaagatagcgccgtgtacttctgtgcccggtccatcacaacagtcgtgggctgcgctatggactattggggccagggaacaagcgtgaccgtgtctagtacgcgtgagcagaaactgatctcggaagaggatgggagcggcaccccattcccttctctggcccctcccatcatgctgctggtggacggcaagcagcagatggtggtcgtgtgcctggtgctggatgtggccccacctggactggacagccccatctggtttagcgccggcaatggctctgccctggacgcctttacctacggcccaagccctgccaccgatggcacctggacaaatctggcccacctgagcctgcccagcgaggaactggcttcttgggagcctctcgtgtgccacacaggacctggcgctgagggacacagcagatccacccagcctatgcacctgtctggcgaggccagcaccgccagaacctgtcctcaggaacctctgagaggcacccctggcggagcactgtggctgggagtgctgagactgctgctgttcaagctgctgctgtttgacctgctgctgacctgctcctgtctgtgcgatcctgccggccctctgccttctcctgccaccaccacaagactgagagccctgggcagccacagactgcaccctgccacagagacaggcggcagagaggccacaagcagccctagaccccagcccagagacagaagatggggcgataccccccctggcagaaagcctggatctccagtccgcgccaagagaagcggatctggcgtgaagcagaccctgaatttcgacctgctgaagctggctggcgacgtggaatccaacccaggcccttctagaggccatatgaccgagtacaagcccacggtgcgcctcgccacccgcgacgacgtccccagggccgtacgcaccctcgccgccgcgttcgccgactaccccgccacgcgccacaccgtcgatccggaccgccacatcgagcgggtcaccgagctgcaagaactcttcctcacgcgcgtcgggctcgacatcggcaaggtgtgggtcgcggacgacggcgccgcggtggcggtctggaccacgccggagagcgtcgaagcgggggcggtgttcgccgagatcggcccgcgcatggccgagttgagcggttcccggctggccgcgcagcaacagatggaaggcctcctggcgccgcaccggcccaaggagcccgcgtggttcctggccaccgtcggcgtctcgcccgaccaccagggcaagggtctgggcagcgccgtcgtgctccccggagtggaggcggccgagcgcgccggggtgcccgccttcctggagacctccgcgccccgcaacctccccttctacgagcggctcggcttcaccgtcaccgccgacgtcgaggtgcccgaaggaccgcgcacctggtgcatgacccgcaagcccggtgcctga

SEQ ID NO: 5331 - DNA, 3678 bp, Artificial Sequence
  Synthetic Polynucloetide
atggccttaccagtgaccgccttgctcctgccgctggccttgctgctccacgccgccaggccgctcgaggacctgaagaacgtgttcccacctgaggtggccgtgttcgagcctagcgaggccgagatcagccacacccagaaagccaccctcgtgtgcctggctaccggcttctaccccgaccatgtggaactgtcttggtgggtcaacggcaaagaggtgcacagcggcgtgtctaccgacccccagccactgaaagaacagcccgccctgaacgacagccggtactgcctgagcagcagactgagagtgtccgccaccttctggcagaacccccggaaccacttcagatgccaggtgcagttctacggcctgagcgagaacgacgagtggacccaggacagagccaagcccgtgacccagatcgtgtctgccgaagcctggggcagagccgattgcggctttaccagcgagagctaccagcagggcgtgctgagcgccaccatcctgtacgagatcctgctgggcaaggccaccctgtacgccgtgctggtgtctgccctggtgctgatggctatggtcaagcggaaggacagccggggaagggccaagcgatctggatctggagcaacaaacttctcactactcaaacaagcaggtgacgtggaggagaatcccgggcctactagcatggccttaccagtgaccgccttgctcctgccgctggccttgctgctccacgccgccaggccggaggttcagctgcttgagtctggcggaggactggttcaacctggcggaagcctgagactgtcttgtgccgccagcggcttcacctttagcagctacgccatgagctgggtccgacaggctcctggcaaaggactggaatgggtgtccagcatcagcggcagcggcgactacatctactacgccgatagcgtgaagggcagattcaccatcagccgggacatcagcaagaacaccctgtacctccagatgaacagcctgagagccgaggacaccgccgtgtactactgtgccaaagaaggcaccggcgctaacagcagcctggccgattatagaggccagggcacactggtcaccgtgtctagtggcggaggaagcggcggaggatctgaagttcagctgcttgagtctggcggaggactggttcaacctggcggaagcctgagactgtcttgtgccgccagcggcttcatcttcagcagctacgccatgagctgggtccgacaggctcctggaaagggccaagaatgggtttccggcgttagcggcacaggcgtgaacacctactacgccgatagcgtgaagggcagattcaccatcagccgggacaacagcaagaacaccctgtacctccagatgaacagcctgagagccgaggacaccgccgtgtactattgtgcctctggcaaaggctgggacagcggctcttggtacgaggactatagaggccagggcaccctggtcacagtttcttcaggtaccggcggaggcggatctggcggcggaggtagcggtggcggaggatctgaattcgacatccagatgacacagagccctagcagcctgtctgccagcgtgggagacagagtgaccatcacatgcaaggccagcgaccacatcaacaactggctggcctggtatcagcagaagcctggacaggcccctaagctgctgatctacggcgctaccacactggaaacaggcgtgcccagcagattttctggcagcggctctggcaccgactacaccctgacaatatccagcctccagcctgaggacttcgccacctactactgtcagcagagctggaacaccccttggacattcggccagggcaccaagctggaaatcaagagaggcggaggcggaagtggaggcggaggatctggcggcggaggctctcaagttcagcttcaacagcctggcgctgagctggtcaaacctggcgcttctgtgaagatgagctgcaaagccagcggctacgccttcagcagctactggatcaactggatgaagcagaaacccggccagggactcgaatggatcggccaaatctatcccggcgacggcgacaccaactacaacggcaagttcaagggcagagccacactgaccgccgatacctctagcagcacagcctacatgcagctgagcagcctgaccagcgaagatagcgccgtgtacttctgtgcccggtccatcacaacagtcgtgggctgcgctatggactattggggccagggaacaagcgtgaccgtgtctagtacgcgtgagcagaaactgatctcggaagaggatctggggagcggcaccccattcccttctctggcccctcccatcatgctgctggtggacggcaagcagcagatggtggtcgtgtgcctggtgctggatgtggccccacctggactggacagccccatctggtttagcgccggcaatggctctgccctggacgcctttacctacggcccaagccctgccaccgatggcacctggacaaatctggcccacctgagcctgcccagcgaggaactggcttcttgggagcctctcgtgtgccacacaggacctggcgctgagggacacagcagatccacccagcctatgcacctgtctggcgaggccagcaccgccagaacctgtcctcaggaacctctgagaggcacccctggcggagcactgtggctgggagtgctgagactgctgctgttcaagctgctgctgtttgacctgctgctgacctgctcctgtctgtgcgatcctgccggccctctgccttctcctgccaccaccacaagactgagagccctgggcagccacagactgcaccctgccacagagacaggcggcagagaggccacaagcagccctagaccccagcccagagacagaagatggggcgataccccccctggcagaaagcctggatctccagtccgcgccaagagaagcggatctggcgtgaagcagaccctgaatttcgacctgctgaagctggctggcgacgtggaatccaacccaggcccttctagatctagaggccatatgaccgagtacaagcccacggtgcgcctcgccacccgcgacgacgtccccagggccgtacgcaccctcgccgccgcgttcgccgactaccccgccacgcgccacaccgtcgatccggaccgccacatcgagcgggtcaccgagctgcaagaactcttcctcacgcgcgtcgggctcgacatcggcaaggtgtgggtcgcggacgacggcgccgcggtggcggtctggaccacgccggagagcgtcgaagcgggggcggtgttcgccgagatcggcccgcgcatggccgagttgagcggttcccggctggccgcgcagcaacagatggaaggcctcctggcgccgcaccggcccaaggagcccgcgtggttcctggccaccgtcggcgtctcgcccgaccaccagggcaagggtctgggcagcgccgtcgtgctccccggagtggaggcggccgagcgcgccggggtgcccgccttcctggagacctccgcgccccgcaacctccccttctacgagcggctcggcttcaccgtcaccgccgacgtcgaggtgcccgaaggaccgcgcacctggtgcatgacccgcaagcccggtgcctga

SEQ ID NO: 5332 - DNA, 3489 bp, Artificial Sequence
  Synthetic Polynucloetide
atggccttaccagtgaccgccttgctcctgccgctggccttgctgctccacgccgccaggccggaggttcagctgcttgagtctggcggaggactggttcaacctggcggaagcctgagactgtcttgtgccgccagcggcttcacctttagcagctacgccatgagctgggtccgacaggctcctggcaaaggactggaatgggtgtccagcatcagcggcagcggcgactacatctactacgccgatagcgtgaagggcagattcaccatcagccgggacatcagcaagaacaccctgtacctccagatgaacagcctgagagccgaggacaccgccgtgtactactgtgccaaagaaggcaccggcgctaacagcagcctggccgattatagaggccagggcacactggtcaccgtgtctagtggcggaggaagcggcggaggatctgaagttcagctgcttgagtctggcggaggactggttcaacctggcggaagcctgagactgtcttgtgccgccagcggcttcatcttcagcagctacgccatgagctgggtccgacaggctcctggaaagggccaagaatgggtttccggcgttagcggcacaggcgtgaacacctactacgccgatagcgtgaagggcagattcaccatcagccgggacaacagcaagaacaccctgtacctccagatgaacagcctgagagccgaggacaccgccgtgtactattgtgcctctggcaaaggctgggacagcggctcttggtacgaggactatagaggccagggcaccctggtcacagtttcttcaggtaccggcggaggcggatctggcggcggaggtagcggtggcggaggatctgaattcgacatccagatgacacagagccctagcagcctgtctgccagcgtgggagacagagtgaccatcacatgcaaggccagcgaccacatcaacaactggctggcctggtatcagcagaagcctggacaggcccctaagctgctgatctacggcgctaccacactggaaacaggcgtgcccagcagattttctggcagcggctctggcaccgactacaccctgacaatatccagcctccagcctgaggacttcgccacctactactgtcagcagagctggaacaccccttggacattcggccagggcaccaagctggaaatcaagagactcgaggggaaaccaattcccaaccctcttctgggactggattcaaccggcagcggcgacaagcagctggacgccgacgtgtcccccaagcctaccatcttcctgccctctatcgccgagacaaagctccagaaggccggcacctacctgtgcctgctggaaaagttcttcccagatgtgattaagatccactggcaggaaaagaagtccaacaccatcctgggcagccaggaaggcaacaccatgaagaccaacgacacctacatgaagttcagctggctgaccgtgcccgagaagtccctggacaaagaacacagatgcatcgtgcggcacgaaaacaacaagaacggcgtggaccaggaaatcatcttcccacccatcaagaccgatgtgattacaatggaccccaaggacaactgctccaaggacgccaacgataccctgctgctccagctgaccaacaccagcgcctactacatgtacttgttgctgctgctgaagtccgtggtgtacttcgccatcatcacatgctgcctgctgcggagaaccgccttctgctgcaacggcgagaagtctagggccaagcgatctggatctggagcaacaaacttctcactactcaaacaagcaggtgacgtggaggagaatcccgggcctactagtatggactggatttggcgcatccttttccttgtcggcgctgctaccggcgcgcattccttcgaacaagttcagcttcaacagcctggcgctgagctggtcaaacctggcgcttctgtgaagatgagctgcaaagccagcggctacgccttcagcagctactggatcaactggatgaagcagaaacccggccagggactcgaatggatcggccaaatctatcccggcgacggcgacaccaactacaacggcaagttcaagggcagagccacactgaccgccgatacctctagcagcacagcctacatgcagctgagcagcctgaccagcgaagatagcgccgtgtacttctgtgcccggtccatcacaacagtcgtgggctgcgctatggactattggggccagggaacaagcgtgaccgtgtctagtacgcgtgagcagaaactgatctcggaagaggatgggagcggcagccagcctcacaccaagcccagcgtgttcgtgatgaagaacggcaccaacgtggcctgcctcgtgaaagagttctaccccaaggacatcaggatcaacctggtgtccagcaagaagatcaccgagttcgaccccgccatcgtgatctcccccagcggcaagtacaacgccgtgaagctggggaagtacgaggacagcaacagcgtgacctgctccgtgcagcacgacaacaagaccgtgcacagcaccgactttgaagtgaaaaccgactccaccgaccacgtgaagcccaaagagacagagaacaccaagcagcccagcaagagctgccacaagcccaaggccatcgtgcacaccgagaaagtgaacatgatgagcctgaccgtgctgggcctgcggatgctgttcgccaaaaccgtggccgtgaacttcctgctgaccgccaagctgttcttcctccgcgccaagagaagcggatctggcgtgaagcagaccctgaatttcgacctgctgaagctggctggcgacgtggaatccaacccaggcccttctagaggccatatgaccgagtacaagcccacggtgcgcctcgccacccgcgacgacgtccccagggccgtacgcaccctcgccgccgcgttcgccgactaccccgccacgcgccacaccgtcgatccggaccgccacatcgagcgggtcaccgagctgcaagaactcttcctcacgcgcgtcgggctcgacatcggcaaggtgtgggtcgcggacgacggcgccgcggtggcggtctggaccacgccggagagcgtcgaagcgggggcggtgttcgccgagatcggcccgcgcatggccgagttgagcggttcccggctggccgcgcagcaacagatggaaggcctcctggcgccgcaccggcccaaggagcccgcgtggttcctggccaccgtcggcgtctcgcccgaccaccagggcaagggtctgggcagcgccgtcgtgctccccggagtggaggcggccgagcgcgccggggtgcccgccttcctggagacctccgcgccccgcaacctccccttctacgagcggctcggcttcaccgtcaccgccgacgtcgaggtgcccgaaggaccgcgcacctggtgcatgacccgcaagcccggtgcctga

SEQ ID NO: 5333 - DNA, 2700 bp, Artificial Sequence
  Synthetic Polynucloetide
atggccttaccagtgaccgccttgctcctgccgctggccttgctgctccacgccgccaggccggaggttcagctgcttgagtctggcggaggactggttcaacctggcggaagcctgagactgtcttgtgccgccagcggcttcacctttagcagctacgccatgagctgggtccgacaggctcctggcaaaggactggaatgggtgtccagcatcagcggcagcggcgactacatctactacgccgatagcgtgaagggcagattcaccatcagccgggacatcagcaagaacaccctgtacctccagatgaacagcctgagagccgaggacaccgccgtgtactactgtgccaaagaaggcaccggcgctaacagcagcctggccgattatagaggccagggcacactggtcaccgtgtctagtggcggaggaagcggcggaggatctgaagttcagctgcttgagtctggcggaggactggttcaacctggcggaagcctgagactgtcttgtgccgccagcggcttcatcttcagcagctacgccatgagctgggtccgacaggctcctggaaagggccaagaatgggtttccggcgttagcggcacaggcgtgaacacctactacgccgatagcgtgaagggcagattcaccatcagccgggacaacagcaagaacaccctgtacctccagatgaacagcctgagagccgaggacaccgccgtgtactattgtgcctctggcaaaggctgggacagcggctcttggtacgaggactatagaggccagggcaccctggtcacagtttcttcaggtaccggcggaggcggatctggcggcggaggtagcggtggcggaggatctgaattcgacatccagatgacacagagccctagcagcctgtctgccagcgtgggagacagagtgaccatcacatgcaaggccagcgaccacatcaacaactggctggcctggtatcagcagaagcctggacaggcccctaagctgctgatctacggcgctaccacactggaaacaggcgtgcccagcagattttctggcagcggctctggcaccgactacaccctgacaatatccagcctccagcctgaggacttcgccacctactactgtcagcagagctggaacaccccttggacattcggccagggcaccaagctggaaatcaagagactcgagagccagcctcacaccaagcccagcgtgttcgtgatgaagaacggcaccaacgtggcctgcctcgtgaaagagttctaccccaaggacatcaggatcaacctggtgtccagcaagaagatcaccgagttcgaccccgccatcgtgatctcccccagcggcaagtacaacgccgtgaagctggggaagtacgaggacagcaacagcgtgacctgctccgtgcagcacgacaacaagaccgtgcacagcaccgactttgaagtgaaaaccgactccaccgaccacgtgaagcccaaagagacagagaacaccaagcagcccagcaagagctgccacaagcccaaggccatcgtgcacaccgagaaagtgaacatgatgagcctgaccgtgctgggcctgcggatgctgttcgccaaaaccgtggccgtgaacttcctgctgaccgccaagctgttcttcctcagggccaagcgatctggatctggagcaacaaacttctcactactcaaacaagcaggtgacgtggaggagaatcccgggcctactagtatggactggatttggcgcatccttttccttgtcggcgctgctaccggcgcgcattccttcgaacaagttcagcttcaacagcctggcgctgagctggtcaaacctggcgcttctgtgaagatgagctgcaaagccagcggctacgccttcagcagctactggatcaactggatgaagcagaaacccggccagggactcgaatggatcggccaaatctatcccggcgacggcgacaccaactacaacggcaagttcaagggcagagccacactgaccgccgatacctctagcagcacagcctacatgcagctgagcagcctgaccagcgaagatagcgccgtgtacttctgtgcccggtccatcacaacagtcgtgggctgcgctatggactattggggccagggaacaagcgtgaccgtgtctagtacgcgtgacaagcagctggacgccgacgtgtcccccaagcctaccatcttcctgccctctatcgccgagacaaagctccagaaggccggcacctacctgtgcctgctggaaaagttcttcccagatgtgattaagatccactggcaggaaaagaagtccaacaccatcctgggcagccaggaaggcaacaccatgaagaccaacgacacctacatgaagttcagctggctgaccgtgcccgagaagtccctggacaaagaacacagatgcatcgtgcggcacgaaaacaacaagaacggcgtggaccaggaaatcatcttcccacccatcaagaccgatgtgattacaatggaccccaaggacaactgctccaaggacgccaacgataccctgctgctccagctgaccaacaccagcgcctactacatgtacttgttgctgctgctgaagtccgtggtgtacttcgccatcatcacatgctgcctgctgcggagaaccgccttctgctgcaacggcgagaagtct

SEQ ID NO: 5334 - DNA, 3534 bp, Artificial Sequence
  Synthetic Polynucloetide
atggccttaccagtgaccgccttgctcctgccgctggccttgctgctccacgccgccaggccgctcgaggggaaaccaattcccaaccctcttctgggactggattcaaccggcagcggcgacaagcagctggacgccgacgtgtcccccaagcctaccatcttcctgccctctatcgccgagacaaagctccagaaggccggcacctacctgtgcctgctggaaaagttcttcccagatgtgattaagatccactggcaggaaaagaagtccaacaccatcctgggcagccaggaaggcaacaccatgaagaccaacgacacctacatgaagttcagctggctgaccgtgcccgagaagtccctggacaaagaacacagatgcatcgtgcggcacgaaaacaacaagaacggcgtggaccaggaaatcatcttcccacccatcaagaccgatgtgattacaatggaccccaaggacaactgctccaaggacgccaacgataccctgctgctccagctgaccaacaccagcgcctactacatgtacttgttgctgctgctgaagtccgtggtgtacttcgccatcatcacatgctgcctgctgcggagaaccgccttctgctgcaacggcgagaagtctagggccaagcgatctggatctggagcaacaaacttctcactactcaaacaagcaggtgacgtggaggagaatcccgggcctactagcatggccttaccagtgaccgccttgctcctgccgctggccttgctgctccacgccgccaggccggaggttcagctgcttgagtctggcggaggactggttcaacctggcggaagcctgagactgtcttgtgccgccagcggcttcacctttagcagctacgccatgagctgggtccgacaggctcctggcaaaggactggaatgggtgtccagcatcagcggcagcggcgactacatctactacgccgatagcgtgaagggcagattcaccatcagccgggacatcagcaagaacaccctgtacctccagatgaacagcctgagagccgaggacaccgccgtgtactactgtgccaaagaaggcaccggcgctaacagcagcctggccgattatagaggccagggcacactggtcaccgtgtctagtggcggaggaagcggcggaggatctgaagttcagctgcttgagtctggcggaggactggttcaacctggcggaagcctgagactgtcttgtgccgccagcggcttcatcttcagcagctacgccatgagctgggtccgacaggctcctggaaagggccaagaatgggtttccggcgttagcggcacaggcgtgaacacctactacgccgatagcgtgaagggcagattcaccatcagccgggacaacagcaagaacaccctgtacctccagatgaacagcctgagagccgaggacaccgccgtgtactattgtgcctctggcaaaggctgggacagcggctcttggtacgaggactatagaggccagggcaccctggtcacagtttcttcaggtaccggcggaggcggatctggcggcggaggtagcggtggcggaggatctgaattcgacatccagatgacacagagccctagcagcctgtctgccagcgtgggagacagagtgaccatcacatgcaaggccagcgaccacatcaacaactggctggcctggtatcagcagaagcctggacaggcccctaagctgctgatctacggcgctaccacactggaaacaggcgtgcccagcagattttctggcagcggctctggcaccgactacaccctgacaatatccagcctccagcctgaggacttcgccacctactactgtcagcagagctggaacaccccttggacattcggccagggcaccaagctggaaatcaagagaggcggaggcggaagtggaggcggaggatctggcggcggaggctctcaagttcagcttcaacagcctggcgctgagctggtcaaacctggcgcttctgtgaagatgagctgcaaagccagcggctacgccttcagcagctactggatcaactggatgaagcagaaacccggccagggactcgaatggatcggccaaatctatcccggcgacggcgacaccaactacaacggcaagttcaagggcagagccacactgaccgccgatacctctagcagcacagcctacatgcagctgagcagcctgaccagcgaagatagcgccgtgtacttctgtgcccggtccatcacaacagtcgtgggctgcgctatggactattggggccagggaacaagcgtgaccgtgtctagtacgcgtgagcagaaactgatctcggaagaggatgggagcggcagccagcctcacaccaagcccagcgtgttcgtgatgaagaacggcaccaacgtggcctgcctcgtgaaagagttctaccccaaggacatcaggatcaacctggtgtccagcaagaagatcaccgagttcgaccccgccatcgtgatctcccccagcggcaagtacaacgccgtgaagctggggaagtacgaggacagcaacagcgtgacctgctccgtgcagcacgacaacaagaccgtgcacagcaccgactttgaagtgaaaaccgactccaccgaccacgtgaagcccaaagagacagagaacaccaagcagcccagcaagagctgccacaagcccaaggccatcgtgcacaccgagaaagtgaacatgatgagcctgaccgtgctgggcctgcggatgctgttcgccaaaaccgtggccgtgaacttcctgctgaccgccaagctgttcttcctccgcgccaagagaagcggatctggcgtgaagcagaccctgaatttcgacctgctgaagctggctggcgacgtggaatccaacccaggcccttctagaggccatatgaccgagtacaagcccacggtgcgcctcgccacccgcgacgacgtccccagggccgtacgcaccctcgccgccgcgttcgccgactaccccgccacgcgccacaccgtcgatccggaccgccacatcgagcgggtcaccgagctgcaagaactcttcctcacgcgcgtcgggctcgacatcggcaaggtgtgggtcgcggacgacggcgccgcggtggcggtctggaccacgccggagagcgtcgaagcgggggcggtgttcgccgagatcggcccgcgcatggccgagttgagcggttcccggctggccgcgcagcaacagatggaaggcctcctggcgccgcaccggcccaaggagcccgcgtggttcctggccaccgtcggcgtctcgcccgaccaccagggcaagggtctgggcagcgccgtcgtgctccccggagtggaggcggccgagcgcgccggggtgcccgccttcctggagacctccgcgccccgcaacctccccttctacgagcggctcggcttcaccgtcaccgccgacgtcgaggtgcccgaaggaccgcgcacctggtgcatgacccgcaagcccggtgcctga

SEQ ID NO: 5335 - DNA, 3909 bp, Artificial Sequence
  Synthetic Polynucloetide
atggccttaccagtgaccgccttgctcctgccgctggccttgctgctccacgccgccaggccggaggttcagctgcttgagtctggcggaggactggttcaacctggcggaagcctgagactgtcttgtgccgccagcggcttcacctttagcagctacgccatgagctgggtccgacaggctcctggcaaaggactggaatgggtgtccagcatcagcggcagcggcgactacatctactacgccgatagcgtgaagggcagattcaccatcagccgggacatcagcaagaacaccctgtacctccagatgaacagcctgagagccgaggacaccgccgtgtactactgtgccaaagaaggcaccggcgctaacagcagcctggccgattatagaggccagggcacactggtcaccgtgtctagtggcggaggaagcggcggaggatctgaagttcagctgcttgagtctggcggaggactggttcaacctggcggaagcctgagactgtcttgtgccgccagcggcttcatcttcagcagctacgccatgagctgggtccgacaggctcctggaaagggccaagaatgggtttccggcgttagcggcacaggcgtgaacacctactacgccgatagcgtgaagggcagattcaccatcagccgggacaacagcaagaacaccctgtacctccagatgaacagcctgagagccgaggacaccgccgtgtactattgtgcctctggcaaaggctgggacagcggctcttggtacgaggactatagaggccagggcaccctggtcacagtttcttcaggtaccggcggaggcggatctggcggcggaggtagcggtggcggaggatctgaattcgacatccagatgacacagagccctagcagcctgtctgccagcgtgggagacagagtgaccatcacatgcaaggccagcgaccacatcaacaactggctggcctggtatcagcagaagcctggacaggcccctaagctgctgatctacggcgctaccacactggaaacaggcgtgcccagcagattttctggcagcggctctggcaccgactacaccctgacaatatccagcctccagcctgaggacttcgccacctactactgtcagcagagctggaacaccccttggacattcggccagggcaccaagctggaaatcaagagaggacagcctaaggccaatcctaccgtgacactgttccctccaagcagcgaagaactccaggccaacaaggccacacttgtgtgcctgatctccgacttctaccctggggctgtgacagtggcttggaaggccgatggatctcctgtgaaagccggcgtggaaaccaccaagccatccaagcagagcaacaacaaatacgccgccagctcctacctgagcctgacacctgagcagtggaagtcccacagatcctacagctgccaagtgacccacgaaggcagcaccgtggaaaagacagtggcccctacagagtgcagcggatcccagagcttcggcctgctggaccccaagctgtgctacctgctggatggcatcctgttcatctacggcgtgatcctgaccgccctgttcctgagagtgaagttcagcagaagcgccgacgcccctgcctaccagcagggacagaaccaactgtacaacgagctgaacctgggcagacgggaagagtacgacgtgctggacaagcggagaggcagggaccctgagatgggcggaaagccccagcggagaaagaacccccaggaaggactgtataacgaactccagaaagacaagatggccgaagcctacagcgagatcggcatgaagggcgagcggagaagaggcaagggccacgatggcctgtaccagggcctgagcaccgccaccaaggacacctatgacgccctgcacatgcaggccctgcctccaagaagggccaagcgatctggatctggagcaacaaacttctcactactcaaacaagcaggtgacgtggaggagaatcccgggcctactagtatggactggatttggcgcatccttttccttgtcggcgctgctaccggcgcgcattccttcgaacaagttcagcttcaacagcctggcgctgagctggtcaaacctggcgcttctgtgaagatgagctgcaaagccagcggctacgccttcagcagctactggatcaactggatgaagcagaaacccggccagggactcgaatggatcggccaaatctatcccggcgacggcgacaccaactacaacggcaagttcaagggcagagccacactgaccgccgatacctctagcagcacagcctacatgcagctgagcagcctgaccagcgaagatagcgccgtgtacttctgtgcccggtccatcacaacagtcgtgggctgcgctatggactattggggccagggaacaagcgtgaccgtgtctagtgcctctacaaagggaccctccgtgtttcctctggctcccagcagcaagtctacaagcggaggaacagccgctctgggctgcctggtcaaggattactttcccgagcctgtgaccgtgtcctggaatagcggagcactgacaagcggcgtgcacacctttccagccgtgctgcaaagcagcggcctgtactctctgagcagcgtggtcacagtgcctagctctagcctgggcacccagacctacatctgcaatgtgaaccacaagcctagcaacaccaaggtggacaagagagtggaacccaagagctgtggtacccagagttttgggttgttggaccctaaattgtgctatctgttggacggaatcctgttcatttacggagtgatcctgaccgcattgttcctgcgggttaagttttccagatccgcagacgcacccgcttaccaacaagggcagaaccaactctacaatgaacttaatttggggcggagggaagagtacgacgttctggacaaaaggaggggacgagatcccgagatgggcggaaagcctcagcgaaggaagaatccgcaagaggggctttataacgaactccagaaagataaaatggcagaagcctatagtgagattgggatgaagggagaaaggaggaggggtaaaggtcacgatgggttgtaccaaggattgagcacagccactaaagatacctatgatgcgctccacatgcaggccctgccgccaagacgcgccaagagaagcggatctggcgtgaagcagaccctgaatttcgacctgctgaagctggctggcgacgtggaatccaacccaggcccttctagaggccatatgaccgagtacaagcccacggtgcgcctcgccacccgcgacgacgtccccagggccgtacgcaccctcgccgccgcgttcgccgactaccccgccacgcgccacaccgtcgatccggaccgccacatcgagcgggtcaccgagctgcaagaactcttcctcacgcgcgtcgggctcgacatcggcaaggtgtgggtcgcggacgacggcgccgcggtggcggtctggaccacgccggagagcgtcgaagcgggggcggtgttcgccgagatcggcccgcgcatggccgagttgagcggttcccggctggccgcgcagcaacagatggaaggcctcctggcgccgcaccggcccaaggagcccgcgtggttcctggccaccgtcggcgtctcgcccgaccaccagggcaagggtctgggcagcgccgtcgtgctccccggagtggaggcggccgagcgcgccggggtgcccgccttcctggagacctccgcgccccgcaacctccccttctacgagcggctcggcttcaccgtcaccgccgacgtcgaggtgcccgaaggaccgcgcacctggtgcatgacccgcaagcccggtgcctga

SEQ ID NO: 5336 - DNA, 3264 bp, Artificial Sequence
  Synthetic Polynucloetide
atggccttaccagtgaccgccttgctcctgccgctggccttgctgctccacgccgccaggccggaggttcagctgcttgagtctggcggaggactggttcaacctggcggaagcctgagactgtcttgtgccgccagcggcttcacctttagcagctacgccatgagctgggtccgacaggctcctggcaaaggactggaatgggtgtccagcatcagcggcagcggcgactacatctactacgccgatagcgtgaagggcagattcaccatcagccgggacatcagcaagaacaccctgtacctccagatgaacagcctgagagccgaggacaccgccgtgtactactgtgccaaagaaggcaccggcgctaacagcagcctggccgattatagaggccagggcacactggtcaccgtgtctagtggcggaggaagcggcggaggatctgaagttcagctgcttgagtctggcggaggactggttcaacctggcggaagcctgagactgtcttgtgccgccagcggcttcatcttcagcagctacgccatgagctgggtccgacaggctcctggaaagggccaagaatgggtttccggcgttagcggcacaggcgtgaacacctactacgccgatagcgtgaagggcagattcaccatcagccgggacaacagcaagaacaccctgtacctccagatgaacagcctgagagccgaggacaccgccgtgtactattgtgcctctggcaaaggctgggacagcggctcttggtacgaggactatagaggccagggcaccctggtcacagtttcttcaggtaccggcggaggcggatctggcggcggaggtagcggtggcggaggatctgaattcgacatccagatgacacagagccctagcagcctgtctgccagcgtgggagacagagtgaccatcacatgcaaggccagcgaccacatcaacaactggctggcctggtatcagcagaagcctggacaggcccctaagctgctgatctacggcgctaccacactggaaacaggcgtgcccagcagattttctggcagcggctctggcaccgactacaccctgacaatatccagcctccagcctgaggacttcgccacctactactgtcagcagagctggaacaccccttggacattcggccagggcaccaagctggaaatcaagagactcgaggacctgaagaacgtgttcccacctgaggtggccgtgttcgagcctagcgaggccgagatcagccacacccagaaagccaccctcgtgtgcctggctaccggcttctaccccgaccatgtggaactgtcttggtgggtcaacggcaaagaggtgcacagcggcgtgtctaccgacccccagccactgaaagaacagcccgccctgaacgacagccggtactgcctgagcagcagactgagagtgtccgccaccttctggcagaacccccggaaccacttcagatgccaggtgcagttctacggcctgagcgagaacgacgagtggacccaggacagagccaagcccgtgacccagatcgtgtctgccgaagcctggggcagagccgattgcggatcccagagcttcggcctgctggaccccaagctgtgctacctgctggatggcatcctgttcatctacggcgtgatcctgaccgccctgttcctgagagtgaagttcagcagaagcgccgacgcccctgcctaccagcagggacagaaccaactgtacaacgagctgaacctgggcagacgggaagagtacgacgtgctggacaagcggagaggcagggaccctgagatgggcggaaagccccagcggagaaagaacccccaggaaggactgtataacgaactccagaaagacaagatggccgaagcctacagcgagatcggcatgaagggcgagcggagaagaggcaagggccacgatggcctgtaccagggcctgagcaccgccaccaaggacacctatgacgccctgcacatgcaggccctgcctccaagaagggccaagcgatctggatctggagcaacaaacttctcactactcaaacaagcaggtgacgtggaggagaatcccgggcctactagtatggactggatttggcgcatccttttccttgtcggcgctgctaccggcgcgcattccttcgaacaagttcagcttcaacagcctggcgctgagctggtcaaacctggcgcttctgtgaagatgagctgcaaagccagcggctacgccttcagcagctactggatcaactggatgaagcagaaacccggccagggactcgaatggatcggccaaatctatcccggcgacggcgacaccaactacaacggcaagttcaagggcagagccacactgaccgccgatacctctagcagcacagcctacatgcagctgagcagcctgaccagcgaagatagcgccgtgtacttctgtgcccggtccatcacaacagtcgtgggctgcgctatggactattggggccagggaacaagcgtgaccgtgtctagtacgcgtatccagaaccctgatcctgccgtgtaccagctgcgggatagcaagagcagcgacaagagcgtgtgtctgttcaccgacttcgacagccagaccaacgtgtcccagagcaaggactccgacgtgtacatcaccgataagaccgtgctggacatgcggagcatggacttcaagagcaactccgccgtggcctggtccaacaagtccgatttcgcctgcgccaacgccttcaacaacagcattatccccgaggacacattcttcccaagccccgagagcagctgcggtacccagagttttgggttgttggaccctaaattgtgctatctgttggacggaatcctgttcatttacggagtgatcctgaccgcattgttcctgcgggttaagttttccagatccgcagacgcacccgcttaccaacaagggcagaaccaactctacaatgaacttaatttggggcggagggaagagtacgacgttctggacaaaaggaggggacgagatcccgagatgggcggaaagcctcagcgaaggaagaatccgcaagaggggctttataacgaactccagaaagataaaatggcagaagcctatagtgagattgggatgaagggagaaaggaggaggggtaaaggtcacgatgggttgtaccaaggattgagcacagccactaaagatacctatgatgcgctccacatgcaggccctgccgccaaga

SEQ ID NO: 5337 - DNA, 3264 bp, Artificial Sequence
  Synthetic Polynucloetide
atggccttaccagtgaccgccttgctcctgccgctggccttgctgctccacgccgccaggccggaggttcagctgcttgagtctggcggaggactggttcaacctggcggaagcctgagactgtcttgtgccgccagcggcttcacctttagcagctacgccatgagctgggtccgacaggctcctggcaaaggactggaatgggtgtccagcatcagcggcagcggcgactacatctactacgccgatagcgtgaagggcagattcaccatcagccgggacatcagcaagaacaccctgtacctccagatgaacagcctgagagccgaggacaccgccgtgtactactgtgccaaagaaggcaccggcgctaacagcagcctggccgattatagaggccagggcacactggtcaccgtgtctagtggcggaggaagcggcggaggatctgaagttcagctgcttgagtctggcggaggactggttcaacctggcggaagcctgagactgtcttgtgccgccagcggcttcatcttcagcagctacgccatgagctgggtccgacaggctcctggaaagggccaagaatgggtttccggcgttagcggcacaggcgtgaacacctactacgccgatagcgtgaagggcagattcaccatcagccgggacaacagcaagaacaccctgtacctccagatgaacagcctgagagccgaggacaccgccgtgtactattgtgcctctggcaaaggctgggacagcggctcttggtacgaggactatagaggccagggcaccctggtcacagtttcttcaggtaccggcggaggcggatctggcggcggaggtagcggtggcggaggatctgaattcgacatccagatgacacagagccctagcagcctgtctgccagcgtgggagacagagtgaccatcacatgcaaggccagcgaccacatcaacaactggctggcctggtatcagcagaagcctggacaggcccctaagctgctgatctacggcgctaccacactggaaacaggcgtgcccagcagattttctggcagcggctctggcaccgactacaccctgacaatatccagcctccagcctgaggacttcgccacctactactgtcagcagagctggaacaccccttggacattcggccagggcaccaagctggaaatcaagagactcgaggacctgaagaacgtgttcccacctgaggtggccgtgttcgagcctagcaaggccgagatcgcccacacccagaaagccaccctcgtgtgcctggctaccggcttctaccccgaccatgtggaactgtcttggtgggtcaacggcaaagaggtgcacagcggcgtgtgtaccgacccccagccactgaaagaacagcccgccctgaacgacagccggtactgcctgagcagcagactgagagtgtccgccaccttctggcagaacccccggaaccacttcagatgccaggtgcagttctacggcctgagcgagaacgacgagtggacccaggacagagccaagcccgtgacccagatcgtgtctgccgaagcctggggcagagccgattgcggatcccagagcttcggcctgctggaccccaagctgtgctacctgctggatggcatcctgttcatctacggcgtgatcctgaccgccctgttcctgagagtgaagttcagcagaagcgccgacgcccctgcctaccagcagggacagaaccaactgtacaacgagctgaacctgggcagacgggaagagtacgacgtgctggacaagcggagaggcagggaccctgagatgggcggaaagccccagcggagaaagaacccccaggaaggactgtataacgaactccagaaagacaagatggccgaagcctacagcgagatcggcatgaagggcgagcggagaagaggcaagggccacgatggcctgtaccagggcctgagcaccgccaccaaggacacctatgacgccctgcacatgcaggccctgcctccaagaagggccaagcgatctggatctggagcaacaaacttctcactactcaaacaagcaggtgacgtggaggagaatcccgggcctactagtatggactggatttggcgcatccttttccttgtcggcgctgctaccggcgcgcattccttcgaacaagttcagcttcaacagcctggcgctgagctggtcaaacctggcgcttctgtgaagatgagctgcaaagccagcggctacgccttcagcagctactggatcaactggatgaagcagaaacccggccagggactcgaatggatcggccaaatctatcccggcgacggcgacaccaactacaacggcaagttcaagggcagagccacactgaccgccgatacctctagcagcacagcctacatgcagctgagcagcctgaccagcgaagatagcgccgtgtacttctgtgcccggtccatcacaacagtcgtgggctgcgctatggactattggggccagggaacaagcgtgaccgtgtctagtacgcgtatccagaaccctgatcctgccgtgtaccagctgcgggatagcaagagcagcgacaagagcgtgtgtctgttcaccgacttcgacagccagaccaacgtgtcccagagcaaggactccgacgtgtacatcaccgataagtgcgtgctggacatgcggagcatggacttcaagagcaactccgccgtggcctggtccaacaagtccgatttcgcctgcgccaacgccttcaacaacagcattatccccgaggacacattcttcccaagcagcgacgtgccctgcggtacccagagttttgggttgttggaccctaaattgtgctatctgttggacggaatcctgttcatttacggagtgatcctgaccgcattgttcctgcgggttaagttttccagatccgcagacgcacccgcttaccaacaagggcagaaccaactctacaatgaacttaatttggggcggagggaagagtacgacgttctggacaaaaggaggggacgagatcccgagatgggcggaaagcctcagcgaaggaagaatccgcaagaggggctttataacgaactccagaaagataaaatggcagaagcctatagtgagattgggatgaagggagaaaggaggaggggtaaaggtcacgatgggttgtaccaaggattgagcacagccactaaagatacctatgatgcgctccacatgcaggccctgccgccaaga

SEQ ID NO: 5338 - DNA, 3477 bp, Artificial Sequence
  Synthetic Polynucloetide
atggccttaccagtgaccgccttgctcctgccgctggccttgctgctccacgccgccaggccggaggttcagctgcttgagtctggcggaggactggttcaacctggcggaagcctgagactgtcttgtgccgccagcggcttcacctttagcagctacgccatgagctgggtccgacaggctcctggcaaaggactggaatgggtgtccagcatcagcggcagcggcgactacatctactacgccgatagcgtgaagggcagattcaccatcagccgggacatcagcaagaacaccctgtacctccagatgaacagcctgagagccgaggacaccgccgtgtactactgtgccaaagaaggcaccggcgctaacagcagcctggccgattatagaggccagggcacactggtcaccgtgtctagtggcggaggaagcggcggaggatctgaagttcagctgcttgagtctggcggaggactggttcaacctggcggaagcctgagactgtcttgtgccgccagcggcttcatcttcagcagctacgccatgagctgggtccgacaggctcctggaaagggccaagaatgggtttccggcgttagcggcacaggcgtgaacacctactacgccgatagcgtgaagggcagattcaccatcagccgggacaacagcaagaacaccctgtacctccagatgaacagcctgagagccgaggacaccgccgtgtactattgtgcctctggcaaaggctgggacagcggctcttggtacgaggactatagaggccagggcaccctggtcacagtttcttcaggtaccggcggaggcggatctggcggcggaggtagcggtggcggaggatctgaattcgacatccagatgacacagagccctagcagcctgtctgccagcgtgggagacagagtgaccatcacatgcaaggccagcgaccacatcaacaactggctggcctggtatcagcagaagcctggacaggcccctaagctgctgatctacggcgctaccacactggaaacaggcgtgcccagcagattttctggcagcggctctggcaccgactacaccctgacaatatccagcctccagcctgaggacttcgccacctactactgtcagcagagctggaacaccccttggacattcggccagggcaccaagctggaaatcaagagactcgaggggaaaccaattcccaaccctcttctgggactggattcaaccggcagcggcgaggacctgaagaacgtgttcccacctgaggtggccgtgttcgagcctagcgaggccgagatcagccacacccagaaagccaccctcgtgtgcctggctaccggcttctaccccgaccatgtggaactgtcttggtgggtcaacggcaaagaggtgcacagcggcgtgtctaccgacccccagccactgaaagaacagcccgccctgaacgacagccggtactgcctgagcagcagactgagagtgtccgccaccttctggcagaacccccggaaccacttcagatgccaggtgcagttctacggcctgagcgagaacgacgagtggacccaggacagagccaagcccgtgacccagatcgtgtctgccgaagcctggggcagagccgattgcggatcccagagcttcggcctgctggaccccaagctgtgctacctgctggatggcatcctgttcatctacggcgtgatcctgaccgccctgttcctgagagtgaagttcagcagaagcgccgacgcccctgcctaccagcagggacagaaccaactgtacaacgagctgaacctgggcagacgggaagagtacgacgtgctggacaagcggagaggcagggaccctgagatgggcggaaagccccagcggagaaagaacccccaggaaggactgtataacgaactccagaaagacaagatggccgaagcctacagcgagatcggcatgaagggcgagcggagaagaggcaagggccacgatggcctgtaccagggcctgagcaccgccaccaaggacacctatgacgccctgcacatgcaggccctgcctccaagaagggccaagcgatctggatctggagcaacaaacttctcactactcaaacaagcaggtgacgtggaggagaatcccgggcctactagtatggactggatttggcgcatccttttccttgtcggcgctgctaccggcgcgcattccttcgaacaagttcagcttcaacagcctggcgctgagctggtcaaacctggcgcttctgtgaagatgagctgcaaagccagcggctacgccttcagcagctactggatcaactggatgaagcagaaacccggccagggactcgaatggatcggccaaatctatcccggcgacggcgacaccaactacaacggcaagttcaagggcagagccacactgaccgccgatacctctagcagcacagcctacatgcagctgagcagcctgaccagcgaagatagcgccgtgtacttctgtgcccggtccatcacaacagtcgtgggctgcgctatggactattggggccagggaacaagcgtgaccgtgtctagtacgcgtgagcagaaactgatctcggaagaggatgggagcggcatccagaaccctgatcctgccgtgtaccagctgcgggatagcaagagcagcgacaagagcgtgtgtctgttcaccgacttcgacagccagaccaacgtgtcccagagcaaggactccgacgtgtacatcaccgataagaccgtgctggacatgcggagcatggacttcaagagcaactccgccgtggcctggtccaacaagtccgatttcgcctgcgccaacgccttcaacaacagcattatccccgaggacacattcttcccaagccccgagagcagctgcggtacccagagttttgggttgttggaccctaaattgtgctatctgttggacggaatcctgttcatttacggagtgatcctgaccgcattgttcctgaggagcaagcggtcacggctgctccacagcgattacatgaatatgacaccacgaagaccgggtcctactcgcaaacactaccaaccctacgcacctccccgcgactttgcagcgtaccgatctcgggttaagttttccagatccgcagacgcacccgcttaccaacaagggcagaaccaactctacaatgaacttaatttggggcggagggaagagtacgacgttctggacaaaaggaggggacgagatcccgagatgggcggaaagcctcagcgaaggaagaatccgcaagaggggctttataacgaactccagaaagataaaatggcagaagcctatagtgagattgggatgaagggagaaaggaggaggggtaaaggtcacgatgggttgtaccaaggattgagcacagccactaaagatacctatgatgcgctccacatgcaggccctgccgccaaga

SEQ ID NO: 5339 - DNA, 3600 bp, Artificial Sequence
  Synthetic Polynucloetide
atggccttaccagtgaccgccttgctcctgccgctggccttgctgctccacgccgccaggccggaggttcagctgcttgagtctggcggaggactggttcaacctggcggaagcctgagactgtcttgtgccgccagcggcttcacctttagcagctacgccatgagctgggtccgacaggctcctggcaaaggactggaatgggtgtccagcatcagcggcagcggcgactacatctactacgccgatagcgtgaagggcagattcaccatcagccgggacatcagcaagaacaccctgtacctccagatgaacagcctgagagccgaggacaccgccgtgtactactgtgccaaagaaggcaccggcgctaacagcagcctggccgattatagaggccagggcacactggtcaccgtgtctagtggcggaggaagcggcggaggatctgaagttcagctgcttgagtctggcggaggactggttcaacctggcggaagcctgagactgtcttgtgccgccagcggcttcatcttcagcagctacgccatgagctgggtccgacaggctcctggaaagggccaagaatgggtttccggcgttagcggcacaggcgtgaacacctactacgccgatagcgtgaagggcagattcaccatcagccgggacaacagcaagaacaccctgtacctccagatgaacagcctgagagccgaggacaccgccgtgtactattgtgcctctggcaaaggctgggacagcggctcttggtacgaggactatagaggccagggcaccctggtcacagtttcttcaggtaccggcggaggcggatctggcggcggaggtagcggtggcggaggatctgaattcgacatccagatgacacagagccctagcagcctgtctgccagcgtgggagacagagtgaccatcacatgcaaggccagcgaccacatcaacaactggctggcctggtatcagcagaagcctggacaggcccctaagctgctgatctacggcgctaccacactggaaacaggcgtgcccagcagattttctggcagcggctctggcaccgactacaccctgacaatatccagcctccagcctgaggacttcgccacctactactgtcagcagagctggaacaccccttggacattcggccagggcaccaagctggaaatcaagagactcgaggggaaaccaattcccaaccctcttctgggactggattcaaccggcagcggcgaggacctgaagaacgtgttcccacctgaggtggccgtgttcgagcctagcgaggccgagatcagccacacccagaaagccaccctcgtgtgcctggctaccggcttctaccccgaccatgtggaactgtcttggtgggtcaacggcaaagaggtgcacagcggcgtgtctaccgacccccagccactgaaagaacagcccgccctgaacgacagccggtactgcctgagcagcagactgagagtgtccgccaccttctggcagaacccccggaaccacttcagatgccaggtgcagttctacggcctgagcgagaacgacgagtggacccaggacagagccaagcccgtgacccagatcgtgtctgccgaagcctggggcagagccgattgcggatcccagagcttcggcctgctggaccccaagctgtgctacctgctggatggcatcctgttcatctacggcgtgatcctgaccgccctgttcctgaggagtaagaggagcaggctcctgcacagtgactacatgaacatgactccacgccgccccggacccacccgcaagcattaccagccctatgccccaccacgcgacttcgcagcctatcgctccagagtgaagttcagcagaagcgccgacgcccctgcctaccagcagggacagaaccaactgtacaacgagctgaacctgggcagacgggaagagtacgacgtgctggacaagcggagaggcagggaccctgagatgggcggaaagccccagcggagaaagaacccccaggaaggactgtataacgaactccagaaagacaagatggccgaagcctacagcgagatcggcatgaagggcgagcggagaagaggcaagggccacgatggcctgtaccagggcctgagcaccgccaccaaggacacctatgacgccctgcacatgcaggccctgcctccaagaagggccaagcgatctggatctggagcaacaaacttctcactactcaaacaagcaggtgacgtggaggagaatcccgggcctactagtatggactggatttggcgcatccttttccttgtcggcgctgctaccggcgcgcattccttcgaacaagttcagcttcaacagcctggcgctgagctggtcaaacctggcgcttctgtgaagatgagctgcaaagccagcggctacgccttcagcagctactggatcaactggatgaagcagaaacccggccagggactcgaatggatcggccaaatctatcccggcgacggcgacaccaactacaacggcaagttcaagggcagagccacactgaccgccgatacctctagcagcacagcctacatgcagctgagcagcctgaccagcgaagatagcgccgtgtacttctgtgcccggtccatcacaacagtcgtgggctgcgctatggactattggggccagggaacaagcgtgaccgtgtctagtacgcgtgagcagaaactgatctcggaagaggatgggagcggcatccagaaccctgatcctgccgtgtaccagctgcgggatagcaagagcagcgacaagagcgtgtgtctgttcaccgacttcgacagccagaccaacgtgtcccagagcaaggactccgacgtgtacatcaccgataagaccgtgctggacatgcggagcatggacttcaagagcaactccgccgtggcctggtccaacaagtccgatttcgcctgcgccaacgccttcaacaacagcattatccccgaggacacattcttcccaagccccgagagcagctgcggtacccagagttttgggttgttggaccctaaattgtgctatctgttggacggaatcctgttcatttacggagtgatcctgaccgcattgttcctgaggagcaagcggtcacggctgctccacagcgattacatgaatatgacaccacgaagaccgggtcctactcgcaaacactaccaaccctacgcacctccccgcgactttgcagcgtaccgatctcgggttaagttttccagatccgcagacgcacccgcttaccaacaagggcagaaccaactctacaatgaacttaatttggggcggagggaagagtacgacgttctggacaaaaggaggggacgagatcccgagatgggcggaaagcctcagcgaaggaagaatccgcaagaggggctttataacgaactccagaaagataaaatggcagaagcctatagtgagattgggatgaagggagaaaggaggaggggtaaaggtcacgatgggttgtaccaaggattgagcacagccactaaagatacctatgatgcgctccacatgcaggccctgccgccaaga

SEQ ID NO: 5340 - DNA, 3483 bp, Artificial Sequence
  Synthetic Polynucloetide
atggccttaccagtgaccgccttgctcctgccgctggccttgctgctccacgccgccaggccggaggttcagctgcttgagtctggcggaggactggttcaacctggcggaagcctgagactgtcttgtgccgccagcggcttcacctttagcagctacgccatgagctgggtccgacaggctcctggcaaaggactggaatgggtgtccagcatcagcggcagcggcgactacatctactacgccgatagcgtgaagggcagattcaccatcagccgggacatcagcaagaacaccctgtacctccagatgaacagcctgagagccgaggacaccgccgtgtactactgtgccaaagaaggcaccggcgctaacagcagcctggccgattatagaggccagggcacactggtcaccgtgtctagtggcggaggaagcggcggaggatctgaagttcagctgcttgagtctggcggaggactggttcaacctggcggaagcctgagactgtcttgtgccgccagcggcttcatcttcagcagctacgccatgagctgggtccgacaggctcctggaaagggccaagaatgggtttccggcgttagcggcacaggcgtgaacacctactacgccgatagcgtgaagggcagattcaccatcagccgggacaacagcaagaacaccctgtacctccagatgaacagcctgagagccgaggacaccgccgtgtactattgtgcctctggcaaaggctgggacagcggctcttggtacgaggactatagaggccagggcaccctggtcacagtttcttcaggtaccggcggaggcggatctggcggcggaggtagcggtggcggaggatctgaattcgacatccagatgacacagagccctagcagcctgtctgccagcgtgggagacagagtgaccatcacatgcaaggccagcgaccacatcaacaactggctggcctggtatcagcagaagcctggacaggcccctaagctgctgatctacggcgctaccacactggaaacaggcgtgcccagcagattttctggcagcggctctggcaccgactacaccctgacaatatccagcctccagcctgaggacttcgccacctactactgtcagcagagctggaacaccccttggacattcggccagggcaccaagctggaaatcaagagactcgaggggaaaccaattcccaaccctcttctgggactggattcaaccggcagcggcgaggacctgaagaacgtgttcccacctgaggtggccgtgttcgagcctagcgaggccgagatcagccacacccagaaagccaccctcgtgtgcctggctaccggcttctaccccgaccatgtggaactgtcttggtgggtcaacggcaaagaggtgcacagcggcgtgtctaccgacccccagccactgaaagaacagcccgccctgaacgacagccggtactgcctgagcagcagactgagagtgtccgccaccttctggcagaacccccggaaccacttcagatgccaggtgcagttctacggcctgagcgagaacgacgagtggacccaggacagagccaagcccgtgacccagatcgtgtctgccgaagcctggggcagagccgattgcggatcccagagcttcggcctgctggaccccaagctgtgctacctgctggatggcatcctgttcatctacggcgtgatcctgaccgccctgttcctgagagtgaagttcagcagaagcgccgacgcccctgcctaccagcagggacagaaccaactgtacaacgagctgaacctgggcagacgggaagagtacgacgtgctggacaagcggagaggcagggaccctgagatgggcggaaagccccagcggagaaagaacccccaggaaggactgtataacgaactccagaaagacaagatggccgaagcctacagcgagatcggcatgaagggcgagcggagaagaggcaagggccacgatggcctgtaccagggcctgagcaccgccaccaaggacacctatgacgccctgcacatgcaggccctgcctccaagaagggccaagcgatctggatctggagcaacaaacttctcactactcaaacaagcaggtgacgtggaggagaatcccgggcctactagtatggactggatttggcgcatccttttccttgtcggcgctgctaccggcgcgcattccttcgaacaagttcagcttcaacagcctggcgctgagctggtcaaacctggcgcttctgtgaagatgagctgcaaagccagcggctacgccttcagcagctactggatcaactggatgaagcagaaacccggccagggactcgaatggatcggccaaatctatcccggcgacggcgacaccaactacaacggcaagttcaagggcagagccacactgaccgccgatacctctagcagcacagcctacatgcagctgagcagcctgaccagcgaagatagcgccgtgtacttctgtgcccggtccatcacaacagtcgtgggctgcgctatggactattggggccagggaacaagcgtgaccgtgtctagtacgcgtgagcagaaactgatctcggaagaggatctggggagcggcatccagaaccctgatcctgccgtgtaccagctgcgggatagcaagagcagcgacaagagcgtgtgtctgttcaccgacttcgacagccagaccaacgtgtcccagagcaaggactccgacgtgtacatcaccgataagaccgtgctggacatgcggagcatggacttcaagagcaactccgccgtggcctggtccaacaagtccgatttcgcctgcgccaacgccttcaacaacagcattatccccgaggacacattcttcccaagccccgagagcagctgcggtacccagagttttgggttgttggaccctaaattgtgctatctgttggacggaatcctgttcatttacggagtgatcctgaccgcattgttcctgaagagaggccggaagaagctgctgtacatcttcaagcagcctttcatgcggcccgtgcagaccacccaggaagaggacggctgctcctgccggttccccgaggaagaagaaggcggctgcgagctgcgggttaagttttccagatccgcagacgcacccgcttaccaacaagggcagaaccaactctacaatgaacttaatttggggcggagggaagagtacgacgttctggacaaaaggaggggacgagatcccgagatgggcggaaagcctcagcgaaggaagaatccgcaagaggggctttataacgaactccagaaagataaaatggcagaagcctatagtgagattgggatgaagggagaaaggaggaggggtaaaggtcacgatgggttgtaccaaggattgagcacagccactaaagatacctatgatgcgctccacatgcaggccctgccgccaaga

SEQ ID NO: 5341 - DNA, 3609 bp, Artificial Sequence
  Synthetic Polynucloetide
atggccttaccagtgaccgccttgctcctgccgctggccttgctgctccacgccgccaggccggaggttcagctgcttgagtctggcggaggactggttcaacctggcggaagcctgagactgtcttgtgccgccagcggcttcacctttagcagctacgccatgagctgggtccgacaggctcctggcaaaggactggaatgggtgtccagcatcagcggcagcggcgactacatctactacgccgatagcgtgaagggcagattcaccatcagccgggacatcagcaagaacaccctgtacctccagatgaacagcctgagagccgaggacaccgccgtgtactactgtgccaaagaaggcaccggcgctaacagcagcctggccgattatagaggccagggcacactggtcaccgtgtctagtggcggaggaagcggcggaggatctgaagttcagctgcttgagtctggcggaggactggttcaacctggcggaagcctgagactgtcttgtgccgccagcggcttcatcttcagcagctacgccatgagctgggtccgacaggctcctggaaagggccaagaatgggtttccggcgttagcggcacaggcgtgaacacctactacgccgatagcgtgaagggcagattcaccatcagccgggacaacagcaagaacaccctgtacctccagatgaacagcctgagagccgaggacaccgccgtgtactattgtgcctctggcaaaggctgggacagcggctcttggtacgaggactatagaggccagggcaccctggtcacagtttcttcaggtaccggcggaggcggatctggcggcggaggtagcggtggcggaggatctgaattcgacatccagatgacacagagccctagcagcctgtctgccagcgtgggagacagagtgaccatcacatgcaaggccagcgaccacatcaacaactggctggcctggtatcagcagaagcctggacaggcccctaagctgctgatctacggcgctaccacactggaaacaggcgtgcccagcagattttctggcagcggctctggcaccgactacaccctgacaatatccagcctccagcctgaggacttcgccacctactactgtcagcagagctggaacaccccttggacattcggccagggcaccaagctggaaatcaagagactcgaggggaaaccaattcccaaccctcttctgggactggattcaaccggcagcggcgaggacctgaagaacgtgttcccacctgaggtggccgtgttcgagcctagcgaggccgagatcagccacacccagaaagccaccctcgtgtgcctggctaccggcttctaccccgaccatgtggaactgtcttggtgggtcaacggcaaagaggtgcacagcggcgtgtctaccgacccccagccactgaaagaacagcccgccctgaacgacagccggtactgcctgagcagcagactgagagtgtccgccaccttctggcagaacccccggaaccacttcagatgccaggtgcagttctacggcctgagcgagaacgacgagtggacccaggacagagccaagcccgtgacccagatcgtgtctgccgaagcctggggcagagccgattgcggatcccagagcttcggcctgctggaccccaagctgtgctacctgctggatggcatcctgttcatctacggcgtgatcctgaccgccctgttcctgaaacggggcagaaagaaactcctgtatatattcaaacaaccatttatgagaccagtacaaactactcaagaggaagatggctgtagctgccgatttccagaagaagaagaaggaggatgtgaactgagagtgaagttcagcagaagcgccgacgcccctgcctaccagcagggacagaaccaactgtacaacgagctgaacctgggcagacgggaagagtacgacgtgctggacaagcggagaggcagggaccctgagatgggcggaaagccccagcggagaaagaacccccaggaaggactgtataacgaactccagaaagacaagatggccgaagcctacagcgagatcggcatgaagggcgagcggagaagaggcaagggccacgatggcctgtaccagggcctgagcaccgccaccaaggacacctatgacgccctgcacatgcaggccctgcctccaagaagggccaagcgatctggatctggagcaacaaacttctcactactcaaacaagcaggtgacgtggaggagaatcccgggcctactagtatggactggatttggcgcatccttttccttgtcggcgctgctaccggcgcgcattccttcgaacaagttcagcttcaacagcctggcgctgagctggtcaaacctggcgcttctgtgaagatgagctgcaaagccagcggctacgccttcagcagctactggatcaactggatgaagcagaaacccggccagggactcgaatggatcggccaaatctatcccggcgacggcgacaccaactacaacggcaagttcaagggcagagccacactgaccgccgatacctctagcagcacagcctacatgcagctgagcagcctgaccagcgaagatagcgccgtgtacttctgtgcccggtccatcacaacagtcgtgggctgcgctatggactattggggccagggaacaagcgtgaccgtgtctagtacgcgtgagcagaaactgatctcggaagaggatctggggagcggcatccagaaccctgatcctgccgtgtaccagctgcgggatagcaagagcagcgacaagagcgtgtgtctgttcaccgacttcgacagccagaccaacgtgtcccagagcaaggactccgacgtgtacatcaccgataagaccgtgctggacatgcggagcatggacttcaagagcaactccgccgtggcctggtccaacaagtccgatttcgcctgcgccaacgccttcaacaacagcattatccccgaggacacattcttcccaagccccgagagcagctgcggtacccagagttttgggttgttggaccctaaattgtgctatctgttggacggaatcctgttcatttacggagtgatcctgaccgcattgttcctgaagagaggccggaagaagctgctgtacatcttcaagcagcctttcatgcggcccgtgcagaccacccaggaagaggacggctgctcctgccggttccccgaggaagaagaaggcggctgcgagctgcgggttaagttttccagatccgcagacgcacccgcttaccaacaagggcagaaccaactctacaatgaacttaatttggggcggagggaagagtacgacgttctggacaaaaggaggggacgagatcccgagatgggcggaaagcctcagcgaaggaagaatccgcaagaggggctttataacgaactccagaaagataaaatggcagaagcctatagtgagattgggatgaagggagaaaggaggaggggtaaaggtcacgatgggttgtaccaaggattgagcacagccactaaagatacctatgatgcgctccacatgcaggccctgccgccaaga

SEQ ID NO: 5342 - DNA, 3282 bp, Artificial Sequence
  Synthetic Polynucloetide
atggccttaccagtgaccgccttgctcctgccgctggccttgctgctccacgccgccaggccggaggttcagctgcttgagtctggcggaggactggttcaacctggcggaagcctgagactgtcttgtgccgccagcggcttcacctttagcagctacgccatgagctgggtccgacaggctcctggcaaaggactggaatgggtgtccagcatcagcggcagcggcgactacatctactacgccgatagcgtgaagggcagattcaccatcagccgggacatcagcaagaacaccctgtacctccagatgaacagcctgagagccgaggacaccgccgtgtactactgtgccaaagaaggcaccggcgctaacagcagcctggccgattatagaggccagggcacactggtcaccgtgtctagtggcggaggaagcggcggaggatctgaagttcagctgcttgagtctggcggaggactggttcaacctggcggaagcctgagactgtcttgtgccgccagcggcttcatcttcagcagctacgccatgagctgggtccgacaggctcctggaaagggccaagaatgggtttccggcgttagcggcacaggcgtgaacacctactacgccgatagcgtgaagggcagattcaccatcagccgggacaacagcaagaacaccctgtacctccagatgaacagcctgagagccgaggacaccgccgtgtactattgtgcctctggcaaaggctgggacagcggctcttggtacgaggactatagaggccagggcaccctggtcacagtttcttcaggtaccggcggaggcggatctggcggcggaggtagcggtggcggaggatctgaattcgacatccagatgacacagagccctagcagcctgtctgccagcgtgggagacagagtgaccatcacatgcaaggccagcgaccacatcaacaactggctggcctggtatcagcagaagcctggacaggcccctaagctgctgatctacggcgctaccacactggaaacaggcgtgcccagcagattttctggcagcggctctggcaccgactacaccctgacaatatccagcctccagcctgaggacttcgccacctactactgtcagcagagctggaacaccccttggacattcggccagggcaccaagctggaaatcaagagactcgagcagagcttcggcctgctggaccccaagctgtgctacctgctggatggcatcctgttcatctacggcgtgatcctgaccgccctgttcctgagagtgaagttcagcagaagcgccgacgcccctgcctaccagcagggacagaaccaactgtacaacgagctgaacctgggcagacgggaagagtacgacgtgctggacaagcggagaggcagggaccctgagatgggcggaaagccccagcggagaaagaacccccaggaaggactgtataacgaactccagaaagacaagatggccgaagcctacagcgagatcggcatgaagggcgagcggagaagaggcaagggccacgatggcctgtaccagggcctgagcaccgccaccaaggacacctatgacgccctgcacatgcaggccctgcctccaagaagggccaagcgatctggatctggagcaacaaacttctcactactcaaacaagcaggtgacgtggaggagaatcccgggcctactagtatggactggatttggcgcatccttttccttgtcggcgctgctaccggcgcgcattccttcgaacaagttcagcttcaacagcctggcgctgagctggtcaaacctggcgcttctgtgaagatgagctgcaaagccagcggctacgccttcagcagctactggatcaactggatgaagcagaaacccggccagggactcgaatggatcggccaaatctatcccggcgacggcgacaccaactacaacggcaagttcaagggcagagccacactgaccgccgatacctctagcagcacagcctacatgcagctgagcagcctgaccagcgaagatagcgccgtgtacttctgtgcccggtccatcacaacagtcgtgggctgcgctatggactattggggccagggaacaagcgtgaccgtgtctagtacgcgtcagagttttgggttgttggaccctaaattgtgctatctgttggacggaatcctgttcatttacggagtgatcctgaccgcattgttcctgcgggttaagttttccagatccgcagacgcacccgcttaccaacaagggcagaaccaactctacaatgaacttaatttggggcggagggaagagtacgacgttctggacaaaaggaggggacgagatcccgagatgggcggaaagcctcagcgaaggaagaatccgcaagaggggctttataacgaactccagaaagataaaatggcagaagcctatagtgagattgggatgaagggagaaaggaggaggggtaaaggtcacgatgggttgtaccaaggattgagcacagccactaaagatacctatgatgcgctccacatgcaggccctgccgccaagacgcgccaagagaagcggatctggcgtgaagcagaccctgaatttcgacctgctgaagctggctggcgacgtggaatccaacccaggcccttctagaggccatatgaccgagtacaagcccacggtgcgcctcgccacccgcgacgacgtccccagggccgtacgcaccctcgccgccgcgttcgccgactaccccgccacgcgccacaccgtcgatccggaccgccacatcgagcgggtcaccgagctgcaagaactcttcctcacgcgcgtcgggctcgacatcggcaaggtgtgggtcgcggacgacggcgccgcggtggcggtctggaccacgccggagagcgtcgaagcgggggcggtgttcgccgagatcggcccgcgcatggccgagttgagcggttcccggctggccgcgcagcaacagatggaaggcctcctggcgccgcaccggcccaaggagcccgcgtggttcctggccaccgtcggcgtctcgcccgaccaccagggcaagggtctgggcagcgccgtcgtgctccccggagtggaggcggccgagcgcgccggggtgcccgccttcctggagacctccgcgccccgcaacctccccttctacgagcggctcggcttcaccgtcaccgccgacgtcgaggtgcccgaaggaccgcgcacctggtgcatgacccgcaagcccggtgcctga

SEQ ID NO: 5343 - DNA, 2754 bp, Artificial Sequence
  Synthetic Polynucloetide
atggccttaccagtgaccgccttgctcctgccgctggccttgctgctccacgccgccaggccggaggttcagctgcttgagtctggcggaggactggttcaacctggcggaagcctgagactgtcttgtgccgccagcggcttcacctttagcagctacgccatgagctgggtccgacaggctcctggcaaaggactggaatgggtgtccagcatcagcggcagcggcgactacatctactacgccgatagcgtgaagggcagattcaccatcagccgggacatcagcaagaacaccctgtacctccagatgaacagcctgagagccgaggacaccgccgtgtactactgtgccaaagaaggcaccggcgctaacagcagcctggccgattatagaggccagggcacactggtcaccgtgtctagtggcggaggaagcggcggaggatctgaagttcagctgcttgagtctggcggaggactggttcaacctggcggaagcctgagactgtcttgtgccgccagcggcttcatcttcagcagctacgccatgagctgggtccgacaggctcctggaaagggccaagaatgggtttccggcgttagcggcacaggcgtgaacacctactacgccgatagcgtgaagggcagattcaccatcagccgggacaacagcaagaacaccctgtacctccagatgaacagcctgagagccgaggacaccgccgtgtactattgtgcctctggcaaaggctgggacagcggctcttggtacgaggactatagaggccagggcaccctggtcacagtttcttcaggtaccggcggaggcggatctggcggcggaggtagcggtggcggaggatctgaattcgacatccagatgacacagagccctagcagcctgtctgccagcgtgggagacagagtgaccatcacatgcaaggccagcgaccacatcaacaactggctggcctggtatcagcagaagcctggacaggcccctaagctgctgatctacggcgctaccacactggaaacaggcgtgcccagcagattttctggcagcggctctggcaccgactacaccctgacaatatccagcctccagcctgaggacttcgccacctactactgtcagcagagctggaacaccccttggacattcggccagggcaccaagctggaaatcaagagactcgagggacagcctaaggccaatcctaccgtgacactgttccctccaagcagcgaagaactccaggccaacaaggccacacttgtgtgcctgatctccgacttctaccctggggctgtgacagtggcttggaaggccgatggatctcctgtgaaagccggcgtggaaaccaccaagccatccaagcagagcaacaacaaatacgccgccagctcctacctgagcctgacacctgagcagtggaagtcccacagatcctacagctgccaagtgacccacgaaggcagcaccgtggaaaagacagtggcccctacagagtgcagccccatcaagaccgatgtgattacaatggaccccaaggacaactgctccaaggacgccaacgataccctgctgctccagctgaccaacaccagcgcctactacatgtacttgttgctgctgctgaagtccgtggtgtacttcgccatcatcacatgctgcctgctgcggagaaccgccttctgctgcaacggcgagaagtctagggccaagcgatctggatctggagcaacaaacttctcactactcaaacaagcaggtgacgtggaggagaatcccgggcctactagtatggactggatttggcgcatccttttccttgtcggcgctgctaccggcgcgcattccttcgaacaagttcagcttcaacagcctggcgctgagctggtcaaacctggcgcttctgtgaagatgagctgcaaagccagcggctacgccttcagcagctactggatcaactggatgaagcagaaacccggccagggactcgaatggatcggccaaatctatcccggcgacggcgacaccaactacaacggcaagttcaagggcagagccacactgaccgccgatacctctagcagcacagcctacatgcagctgagcagcctgaccagcgaagatagcgccgtgtacttctgtgcccggtccatcacaacagtcgtgggctgcgctatggactattggggccagggaacaagcgtgaccgtgtctagtacgcgtgcctctacaaagggaccctccgtgtttcctctggctcccagcagcaagtctacaagcggaggaacagccgctctgggctgcctggtcaaggattactttcccgagcctgtgaccgtgtcctggaatagcggagcactgacaagcggcgtgcacacctttccagccgtgctgcaaagcagcggcctgtactctctgagcagcgtggtcacagtgcctagctctagcctgggcacccagacctacatctgcaatgtgaaccacaagcctagcaacaccaaggtggacaagagagtggaacccaagagctgtgaagtgaaaaccgactccaccgaccacgtgaagcccaaagagacagagaacaccaagcagcccagcaagagctgccacaagcccaaggccatcgtgcacaccgagaaagtgaacatgatgagcctgaccgtgctgggcctgcggatgctgttcgccaaaaccgtggccgtgaacttcctgctgaccgccaagctgttcttcctc

SEQ ID NO: 5344 - DNA, 2688 bp, Artificial Sequence
  Synthetic Polynucloetide
atggccttaccagtgaccgccttgctcctgccgctggccttgctgctccacgccgccaggccggaggttcagctgcttgagtctggcggaggactggttcaacctggcggaagcctgagactgtcttgtgccgccagcggcttcacctttagcagctacgccatgagctgggtccgacaggctcctggcaaaggactggaatgggtgtccagcatcagcggcagcggcgactacatctactacgccgatagcgtgaagggcagattcaccatcagccgggacatcagcaagaacaccctgtacctccagatgaacagcctgagagccgaggacaccgccgtgtactactgtgccaaagaaggcaccggcgctaacagcagcctggccgattatagaggccagggcacactggtcaccgtgtctagtggcggaggaagcggcggaggatctgaagttcagctgcttgagtctggcggaggactggttcaacctggcggaagcctgagactgtcttgtgccgccagcggcttcatcttcagcagctacgccatgagctgggtccgacaggctcctggaaagggccaagaatgggtttccggcgttagcggcacaggcgtgaacacctactacgccgatagcgtgaagggcagattcaccatcagccgggacaacagcaagaacaccctgtacctccagatgaacagcctgagagccgaggacaccgccgtgtactattgtgcctctggcaaaggctgggacagcggctcttggtacgaggactatagaggccagggcaccctggtcacagtttcttcaggtaccggcggaggcggatctggcggcggaggtagcggtggcggaggatctgaattcgacatccagatgacacagagccctagcagcctgtctgccagcgtgggagacagagtgaccatcacatgcaaggccagcgaccacatcaacaactggctggcctggtatcagcagaagcctggacaggcccctaagctgctgatctacggcgctaccacactggaaacaggcgtgcccagcagattttctggcagcggctctggcaccgactacaccctgacaatatccagcctccagcctgaggacttcgccacctactactgtcagcagagctggaacaccccttggacattcggccagggcaccaagctggaaatcaagagactcgagggacagcctaaggccaatcctaccgtgacactgttccctccaagcagcgaagaactccaggccaacaaggccacacttgtgtgcctgatctccgacttctaccctggggctgtgacagtggcttggaaggccgatggatctcctgtgaaagccggcgtggaaaccaccaagccatccaagcagagcaacaacaaatacgccgccagctcctacctgagcctgacacctgagcagtggaagtcccacagatcctacagctgccaagtgacccacgaaggcagcaccgtggaaaagacagtggcccctacagagtgcagcggcagagccgattgcggcatcaccagcgccagctaccaccagggcgtgctgagcgccaccatcctgtacgagatcctgctgggcaaggccaccctgtacgccgtgctggtgtctgccctggtgctgatggctatggtcaagcggaaggacagccggggaagggccaagcgatctggatctggagcaacaaacttctcactactcaaacaagcaggtgacgtggaggagaatcccgggcctactagtatggactggatttggcgcatccttttccttgtcggcgctgctaccggcgcgcattccttcgaacaagttcagcttcaacagcctggcgctgagctggtcaaacctggcgcttctgtgaagatgagctgcaaagccagcggctacgccttcagcagctactggatcaactggatgaagcagaaacccggccagggactcgaatggatcggccaaatctatcccggcgacggcgacaccaactacaacggcaagttcaagggcagagccacactgaccgccgatacctctagcagcacagcctacatgcagctgagcagcctgaccagcgaagatagcgccgtgtacttctgtgcccggtccatcacaacagtcgtgggctgcgctatggactattggggccagggaacaagcgtgaccgtgtctagtacgcgtgcctctacaaagggaccctccgtgtttcctctggctcccagcagcaagtctacaagcggaggaacagccgctctgggctgcctggtcaaggattactttcccgagcctgtgaccgtgtcctggaatagcggagcactgacaagcggcgtgcacacctttccagccgtgctgcaaagcagcggcctgtactctctgagcagcgtggtcacagtgcctagctctagcctgggcacccagacctacatctgcaatgtgaaccacaagcctagcaacaccaaggtggacaagagagtggaacccaagagctgtatccccgaggacacattcttcccaagcagcgacgtgccctgcgacgtgaagctggtggaaaagagcttcgagacagacaccaacctgaacttccagaacctgagcgtgatcggcttcagaatcctgctgctgaaagtggccggctttaacctgctgatgaccctgcggctgtggtccagc

SEQ ID NO: 5345 - DNA, 2688 bp, Artificial Sequence
  Synthetic Polynucloetide
atggccttaccagtgaccgccttgctcctgccgctggccttgctgctccacgccgccaggccggaggttcagctgcttgagtctggcggaggactggttcaacctggcggaagcctgagactgtcttgtgccgccagcggcttcacctttagcagctacgccatgagctgggtccgacaggctcctggcaaaggactggaatgggtgtccagcatcagcggcagcggcgactacatctactacgccgatagcgtgaagggcagattcaccatcagccgggacatcagcaagaacaccctgtacctccagatgaacagcctgagagccgaggacaccgccgtgtactactgtgccaaagaaggcaccggcgctaacagcagcctggccgattatagaggccagggcacactggtcaccgtgtctagtggcggaggaagcggcggaggatctgaagttcagctgcttgagtctggcggaggactggttcaacctggcggaagcctgagactgtcttgtgccgccagcggcttcatcttcagcagctacgccatgagctgggtccgacaggctcctggaaagggccaagaatgggtttccggcgttagcggcacaggcgtgaacacctactacgccgatagcgtgaagggcagattcaccatcagccgggacaacagcaagaacaccctgtacctccagatgaacagcctgagagccgaggacaccgccgtgtactattgtgcctctggcaaaggctgggacagcggctcttggtacgaggactatagaggccagggcaccctggtcacagtttcttcaggtaccggcggaggcggatctggcggcggaggtagcggtggcggaggatctgaattcgacatccagatgacacagagccctagcagcctgtctgccagcgtgggagacagagtgaccatcacatgcaaggccagcgaccacatcaacaactggctggcctggtatcagcagaagcctggacaggcccctaagctgctgatctacggcgctaccacactggaaacaggcgtgcccagcagattttctggcagcggctctggcaccgactacaccctgacaatatccagcctccagcctgaggacttcgccacctactactgtcagcagagctggaacaccccttggacattcggccagggcaccaagctggaaatcaagagactcgagggacagcctaaggccaatcctaccgtgacactgttccctccaagcagcgaagaactccaggccaacaaggccacacttgtgtgcctgatctccgacttctaccctggggctgtgacagtggcttggaaggccgatggatctcctgtgaaagccggcgtggaaaccaccaagccatccaagcagagcaacaacaaatacgccgccagctcctacctgagcctgacacctgagcagtggaagtcccacagatcctacagctgccaagtgacccacgaaggcagcaccgtggaaaagacagtggcccctacagagtgcagcggcagagccgattgcggctttaccagcgagagctaccagcagggcgtgctgagcgccaccatcctgtacgagatcctgctgggcaaggccaccctgtacgccgtgctggtgtctgccctggtgctgatggctatggtcaagcggaaggacagccggggaagggccaagcgatctggatctggagcaacaaacttctcactactcaaacaagcaggtgacgtggaggagaatcccgggcctactagtatggactggatttggcgcatccttttccttgtcggcgctgctaccggcgcgcattccttcgaacaagttcagcttcaacagcctggcgctgagctggtcaaacctggcgcttctgtgaagatgagctgcaaagccagcggctacgccttcagcagctactggatcaactggatgaagcagaaacccggccagggactcgaatggatcggccaaatctatcccggcgacggcgacaccaactacaacggcaagttcaagggcagagccacactgaccgccgatacctctagcagcacagcctacatgcagctgagcagcctgaccagcgaagatagcgccgtgtacttctgtgcccggtccatcacaacagtcgtgggctgcgctatggactattggggccagggaacaagcgtgaccgtgtctagtacgcgtgcctctacaaagggaccctccgtgtttcctctggctcccagcagcaagtctacaagcggaggaacagccgctctgggctgcctggtcaaggattactttcccgagcctgtgaccgtgtcctggaatagcggagcactgacaagcggcgtgcacacctttccagccgtgctgcaaagcagcggcctgtactctctgagcagcgtggtcacagtgcctagctctagcctgggcacccagacctacatctgcaatgtgaaccacaagcctagcaacaccaaggtggacaagagagtggaacccaagagctgtatccccgaggacacattcttcccaagccccgagagcagctgcgacgtgaagctggtggaaaagagcttcgagacagacaccaacctgaacttccagaacctgagcgtgatcggcttcagaatcctgctgctgaaagtggccggctttaacctgctgatgaccctgcggctgtggtccagc

SEQ ID NO: 5346 - DNA, 2166 bp, Artificial Sequence
  Synthetic Polynucloetide
atggccttaccagtgaccgccttgctcctgccgctggccttgctgctccacgccgccaggccggaggttcagctgcttgagtctggcggaggactggttcaacctggcggaagcctgagactgtcttgtgccgccagcggcttcacctttagcagctacgccatgagctgggtccgacaggctcctggcaaaggactggaatgggtgtccagcatcagcggcagcggcgactacatctactacgccgatagcgtgaagggcagattcaccatcagccgggacatcagcaagaacaccctgtacctccagatgaacagcctgagagccgaggacaccgccgtgtactactgtgccaaagaaggcaccggcgctaacagcagcctggccgattatagaggccagggcacactggtcaccgtgtctagtggcggaggaagcggcggaggatctgaagttcagctgcttgagtctggcggaggactggttcaacctggcggaagcctgagactgtcttgtgccgccagcggcttcatcttcagcagctacgccatgagctgggtccgacaggctcctggaaagggccaagaatgggtttccggcgttagcggcacaggcgtgaacacctactacgccgatagcgtgaagggcagattcaccatcagccgggacaacagcaagaacaccctgtacctccagatgaacagcctgagagccgaggacaccgccgtgtactattgtgcctctggcaaaggctgggacagcggctcttggtacgaggactatagaggccagggcaccctggtcacagtttcttcaggtaccggcggaggcggatctggcggcggaggtagcggtggcggaggatctgaattcgacatccagatgacacagagccctagcagcctgtctgccagcgtgggagacagagtgaccatcacatgcaaggccagcgaccacatcaacaactggctggcctggtatcagcagaagcctggacaggcccctaagctgctgatctacggcgctaccacactggaaacaggcgtgcccagcagattttctggcagcggctctggcaccgactacaccctgacaatatccagcctccagcctgaggacttcgccacctactactgtcagcagagctggaacaccccttggacattcggccagggcaccaagctggaaatcaagagaggcggaggcggaagtggaggcggaggatctggcggcggaggctctcaagttcagcttcaacagcctggcgctgagctggtcaaacctggcgcttctgtgaagatgagctgcaaagccagcggctacgccttcagcagctactggatcaactggatgaagcagaaacccggccagggactcgaatggatcggccaaatctatcccggcgacggcgacaccaactacaacggcaagttcaagggcagagccacactgaccgccgatacctctagcagcacagcctacatgcagctgagcagcctgaccagcgaagatagcgccgtgtacttctgtgcccggtccatcacaacagtcgtgggctgcgctatggactattggggccagggaacaagcgtgaccgtgtctagtacgcgtgacggtaacgaggagatgggaggaatcactcaaaccccttacaaagtctcaatttcaggaacaactgttatccttacatgtccccagtatcctggcagcgagatcctttggcagcataacgacaagaatatagggggagatgaagacgataagaatatcggatctgacgaggatcacttgagcctgaaagagttctccgagcttgaacaaagcggatattatgtgtgctatccgcgcgggtcaaagccggaagacgctaacttttacctttatctccgagccagagtgtgcgaaaattgcatggaaatggacgttatgtccgttgctacaatagttatcgtagatatatgcatcacgggtggactgcttctgctggtttattattggtccaagaatagaaaggccaaagctaaacccgtgaccagaggcgctggcgcaggcggaaggcaaaggggacaaaacaaagaacggccaccaccagtgccaaatccagattatgagcctattcggaaaggacagagggacctgtactctggcctgaatcagagaagaatc

SEQ ID NO: 5347 - DNA, 2061 bp, Artificial Sequence
  Synthetic Polynucloetide
atggccttaccagtgaccgccttgctcctgccgctggccttgctgctccacgccgccaggccggaggttcagctgcttgagtctggcggaggactggttcaacctggcggaagcctgagactgtcttgtgccgccagcggcttcacctttagcagctacgccatgagctgggtccgacaggctcctggcaaaggactggaatgggtgtccagcatcagcggcagcggcgactacatctactacgccgatagcgtgaagggcagattcaccatcagccgggacatcagcaagaacaccctgtacctccagatgaacagcctgagagccgaggacaccgccgtgtactactgtgccaaagaaggcaccggcgctaacagcagcctggccgattatagaggccagggcacactggtcaccgtgtctagtggcggaggaagcggcggaggatctgaagttcagctgcttgagtctggcggaggactggttcaacctggcggaagcctgagactgtcttgtgccgccagcggcttcatcttcagcagctacgccatgagctgggtccgacaggctcctggaaagggccaagaatgggtttccggcgttagcggcacaggcgtgaacacctactacgccgatagcgtgaagggcagattcaccatcagccgggacaacagcaagaacaccctgtacctccagatgaacagcctgagagccgaggacaccgccgtgtactattgtgcctctggcaaaggctgggacagcggctcttggtacgaggactatagaggccagggcaccctggtcacagtttcttcaggtaccggcggaggcggatctggcggcggaggtagcggtggcggaggatctgaattcgacatccagatgacacagagccctagcagcctgtctgccagcgtgggagacagagtgaccatcacatgcaaggccagcgaccacatcaacaactggctggcctggtatcagcagaagcctggacaggcccctaagctgctgatctacggcgctaccacactggaaacaggcgtgcccagcagattttctggcagcggctctggcaccgactacaccctgacaatatccagcctccagcctgaggacttcgccacctactactgtcagcagagctggaacaccccttggacattcggccagggcaccaagctggaaatcaagagaggcggaggcggaagtggaggcggaggatctggcggcggaggctctcaagttcagcttcaacagcctggcgctgagctggtcaaacctggcgcttctgtgaagatgagctgcaaagccagcggctacgccttcagcagctactggatcaactggatgaagcagaaacccggccagggactcgaatggatcggccaaatctatcccggcgacggcgacaccaactacaacggcaagttcaagggcagagccacactgaccgccgatacctctagcagcacagcctacatgcagctgagcagcctgaccagcgaagatagcgccgtgtacttctgtgcccggtccatcacaacagtcgtgggctgcgctatggactattggggccagggaacaagcgtgaccgtgtctagtacgcgtttcaagatccccatcgaggaactggaagatcgggtgttcgtgaactgcaacacctctatcacctgggtggaaggcaccgtgggaacactgctgagcgacatcaccagactggacctcggcaagcggattctggaccctcggggcatctacagatgcaacggcaccgacatctacaaggacaaagaaagcaccgtgcaggtccactacagaatgtgccagtcctgcgtggaactggaccctgctacagtggccggcatcatcgtgaccgatgtgatcgctactctgctgctggctctgggagtgttctgcttcgccggacacgaaacaggcagactgtctggcgctgccgatacacaggccctgctgagaaacgaccaagtgtatcagcccctgcgcgacagagatgatgcccagtattctcacctcggcggcaactgggctagaaacaag

SEQ ID NO: 5348 - DNA, 2091 bp, Artificial Sequence
  Synthetic Polynucloetide
atggccttaccagtgaccgccttgctcctgccgctggccttgctgctccacgccgccaggccggaggttcagctgcttgagtctggcggaggactggttcaacctggcggaagcctgagactgtcttgtgccgccagcggcttcacctttagcagctacgccatgagctgggtccgacaggctcctggcaaaggactggaatgggtgtccagcatcagcggcagcggcgactacatctactacgccgatagcgtgaagggcagattcaccatcagccgggacatcagcaagaacaccctgtacctccagatgaacagcctgagagccgaggacaccgccgtgtactactgtgccaaagaaggcaccggcgctaacagcagcctggccgattatagaggccagggcacactggtcaccgtgtctagtggcggaggaagcggcggaggatctgaagttcagctgcttgagtctggcggaggactggttcaacctggcggaagcctgagactgtcttgtgccgccagcggcttcatcttcagcagctacgccatgagctgggtccgacaggctcctggaaagggccaagaatgggtttccggcgttagcggcacaggcgtgaacacctactacgccgatagcgtgaagggcagattcaccatcagccgggacaacagcaagaacaccctgtacctccagatgaacagcctgagagccgaggacaccgccgtgtactattgtgcctctggcaaaggctgggacagcggctcttggtacgaggactatagaggccagggcaccctggtcacagtttcttcaggtaccggcggaggcggatctggcggcggaggtagcggtggcggaggatctgaattcgacatccagatgacacagagccctagcagcctgtctgccagcgtgggagacagagtgaccatcacatgcaaggccagcgaccacatcaacaactggctggcctggtatcagcagaagcctggacaggcccctaagctgctgatctacggcgctaccacactggaaacaggcgtgcccagcagattttctggcagcggctctggcaccgactacaccctgacaatatccagcctccagcctgaggacttcgccacctactactgtcagcagagctggaacaccccttggacattcggccagggcaccaagctggaaatcaagagaggcggaggcggaagtggaggcggaggatctggcggcggaggctctcaagttcagcttcaacagcctggcgctgagctggtcaaacctggcgcttctgtgaagatgagctgcaaagccagcggctacgccttcagcagctactggatcaactggatgaagcagaaacccggccagggactcgaatggatcggccaaatctatcccggcgacggcgacaccaactacaacggcaagttcaagggcagagccacactgaccgccgatacctctagcagcacagcctacatgcagctgagcagcctgaccagcgaagatagcgccgtgtacttctgtgcccggtccatcacaacagtcgtgggctgcgctatggactattggggccagggaacaagcgtgaccgtgtctagtacgcgtcagagcatcaagggcaaccacctggtcaaggtgtacgactaccaagaggacggcagcgtgctgctgacatgtgatgccgaggccaagaacatcacctggtttaaggacggcaagatgatcggcttcctgaccgaggacaagaagaagtggaacctgggcagcaacgctaaggaccccagaggcatgtatcagtgcaagggcagccagaacaagagcaagcccctccaggtgtactaccggatgtgccagaactgcatcgagctgaacgccgctaccatcagcggctttctgttcgccgagatcgtgtccatcttcgtgctggccgtgggcgtgtactttatcgctggacaggatggcgtgcggcagagcagagcttccgataagcaaaccctgctgcctaacgaccagctgtaccagcctctgaaggacagagaggacgaccagtacagccacctccagggcaatcagctgagaagaaac

SEQ ID NO: 5349 - DNA, 2040 bp, Artificial Sequence
  Synthetic Polynucloetide
atggccttaccagtgaccgccttgctcctgccgctggccttgctgctccacgccgccaggccggaggttcagctgcttgagtctggcggaggactggttcaacctggcggaagcctgagactgtcttgtgccgccagcggcttcacctttagcagctacgccatgagctgggtccgacaggctcctggcaaaggactggaatgggtgtccagcatcagcggcagcggcgactacatctactacgccgatagcgtgaagggcagattcaccatcagccgggacatcagcaagaacaccctgtacctccagatgaacagcctgagagccgaggacaccgccgtgtactactgtgccaaagaaggcaccggcgctaacagcagcctggccgattatagaggccagggcacactggtcaccgtgtctagtggcggaggaagcggcggaggatctgaagttcagctgcttgagtctggcggaggactggttcaacctggcggaagcctgagactgtcttgtgccgccagcggcttcatcttcagcagctacgccatgagctgggtccgacaggctcctggaaagggccaagaatgggtttccggcgttagcggcacaggcgtgaacacctactacgccgatagcgtgaagggcagattcaccatcagccgggacaacagcaagaacaccctgtacctccagatgaacagcctgagagccgaggacaccgccgtgtactattgtgcctctggcaaaggctgggacagcggctcttggtacgaggactatagaggccagggcaccctggtcacagtttcttcaggtaccggcggaggcggatctggcggcggaggtagcggtggcggaggatctgaattcgacatccagatgacacagagccctagcagcctgtctgccagcgtgggagacagagtgaccatcacatgcaaggccagcgaccacatcaacaactggctggcctggtatcagcagaagcctggacaggcccctaagctgctgatctacggcgctaccacactggaaacaggcgtgcccagcagattttctggcagcggctctggcaccgactacaccctgacaatatccagcctccagcctgaggacttcgccacctactactgtcagcagagctggaacaccccttggacattcggccagggcaccaagctggaaatcaagagaggcggaggcggaagtggaggcggaggatctggcggcggaggctctcaagttcagcttcaacagcctggcgctgagctggtcaaacctggcgcttctgtgaagatgagctgcaaagccagcggctacgccttcagcagctactggatcaactggatgaagcagaaacccggccagggactcgaatggatcggccaaatctatcccggcgacggcgacaccaactacaacggcaagttcaagggcagagccacactgaccgccgatacctctagcagcacagcctacatgcagctgagcagcctgaccagcgaagatagcgccgtgtacttctgtgcccggtccatcacaacagtcgtgggctgcgctatggactattggggccagggaacaagcgtgaccgtgtctagtacgcgtcagagttttgggttgttggaccctaaattgtgctatctgttggacggaatcctgttcatttacggagtgatcctgaccgcattgttcctgcgggttaagttttccagatccgcagacgcacccgcttaccaacaagggcagaaccaactctacaatgaacttaatttggggcggagggaagagtacgacgttctggacaaaaggaggggacgagatcccgagatgggcggaaagcctcagcgaaggaagaatccgcaagaggggctttataacgaactccagaaagataaaatggcagaagcctatagtgagattgggatgaagggagaaaggaggaggggtaaaggtcacgatgggttgtaccaaggattgagcacagccactaaagatacctatgatgcgctccacatgcaggccctgccgccaaga

SEQ ID NO: 5350 - DNA, 2742 bp, Artificial Sequence
  Synthetic Polynucloetide
atggccttaccagtgaccgccttgctcctgccgctggccttgctgctccacgccgccaggccggaggttcagctgcttgagtctggcggaggactggttcaacctggcggaagcctgagactgtcttgtgccgccagcggcttcacctttagcagctacgccatgagctgggtccgacaggctcctggcaaaggactggaatgggtgtccagcatcagcggcagcggcgactacatctactacgccgatagcgtgaagggcagattcaccatcagccgggacatcagcaagaacaccctgtacctccagatgaacagcctgagagccgaggacaccgccgtgtactactgtgccaaagaaggcaccggcgctaacagcagcctggccgattatagaggccagggcacactggtcaccgtgtctagtggcggaggaagcggcggaggatctgaagttcagctgcttgagtctggcggaggactggttcaacctggcggaagcctgagactgtcttgtgccgccagcggcttcatcttcagcagctacgccatgagctgggtccgacaggctcctggaaagggccaagaatgggtttccggcgttagcggcacaggcgtgaacacctactacgccgatagcgtgaagggcagattcaccatcagccgggacaacagcaagaacaccctgtacctccagatgaacagcctgagagccgaggacaccgccgtgtactattgtgcctctggcaaaggctgggacagcggctcttggtacgaggactatagaggccagggcaccctggtcacagtttcttcaggtaccggcggaggcggatctggcggcggaggtagcggtggcggaggatctgaattcgacatccagatgacacagagccctagcagcctgtctgccagcgtgggagacagagtgaccatcacatgcaaggccagcgaccacatcaacaactggctggcctggtatcagcagaagcctggacaggcccctaagctgctgatctacggcgctaccacactggaaacaggcgtgcccagcagattttctggcagcggctctggcaccgactacaccctgacaatatccagcctccagcctgaggacttcgccacctactactgtcagcagagctggaacaccccttggacattcggccagggcaccaagctggaaatcaagagaggcggaggcggaagtggaggcggaggatctggcggcggaggctctcaagttcagcttcaacagcctggcgctgagctggtcaaacctggcgcttctgtgaagatgagctgcaaagccagcggctacgccttcagcagctactggatcaactggatgaagcagaaacccggccagggactcgaatggatcggccaaatctatcccggcgacggcgacaccaactacaacggcaagttcaagggcagagccacactgaccgccgatacctctagcagcacagcctacatgcagctgagcagcctgaccagcgaagatagcgccgtgtacttctgtgcccggtccatcacaacagtcgtgggctgcgctatggactattggggccagggaacaagcgtgaccgtgtctagtacgcgtgggagcggcatccagaaccctgatcctgccgtgtaccagctgcgggatagcaagagcagcgacaagagcgtgtgtctgttcaccgacttcgacagccagaccaacgtgtcccagagcaaggactccgacgtgtacatcaccgataagaccgtgctggacatgcggagcatggacttcaagagcaactccgccgtggcctggtccaacaagtccgatttcgcctgcgccaacgccttcaacaacagcattatccccgaggacacattcttcccaagccccgagagcagctgcgacgtgaagctggtggaaaagagcttcgagacagacaccaacctgaacttccagaacctgagcgtgatcggcttcagaatcctgctgctgaaagtggccggctttaacctgctgatgaccctgcggctgtggtccagccgcgccaagagaagcggatctggcgtgaagcagaccctgaatttcgacctgctgaagctggctggcgacgtggaatccaacccaggcccttctagaggccatatgaccgagtacaagcccacggtgcgcctcgccacccgcgacgacgtccccagggccgtacgcaccctcgccgccgcgttcgccgactaccccgccacgcgccacaccgtcgatccggaccgccacatcgagcgggtcaccgagctgcaagaactcttcctcacgcgcgtcgggctcgacatcggcaaggtgtgggtcgcggacgacggcgccgcggtggcggtctggaccacgccggagagcgtcgaagcgggggcggtgttcgccgagatcggcccgcgcatggccgagttgagcggttcccggctggccgcgcagcaacagatggaaggcctcctggcgccgcaccggcccaaggagcccgcgtggttcctggccaccgtcggcgtctcgcccgaccaccagggcaagggtctgggcagcgccgtcgtgctccccggagtggaggcggccgagcgcgccggggtgcccgccttcctggagacctccgcgccccgcaacctccccttctacgagcggctcggcttcaccgtcaccgccgacgtcgaggtgcccgaaggaccgcgcacctggtgcatgacccgcaagcccggtgcctga

SEQ ID NO: 5351 - DNA, 2838 bp, Artificial Sequence
  Synthetic Polynucloetide
atggccttaccagtgaccgccttgctcctgccgctggccttgctgctccacgccgccaggccggaggttcagctgcttgagtctggcggaggactggttcaacctggcggaagcctgagactgtcttgtgccgccagcggcttcacctttagcagctacgccatgagctgggtccgacaggctcctggcaaaggactggaatgggtgtccagcatcagcggcagcggcgactacatctactacgccgatagcgtgaagggcagattcaccatcagccgggacatcagcaagaacaccctgtacctccagatgaacagcctgagagccgaggacaccgccgtgtactactgtgccaaagaaggcaccggcgctaacagcagcctggccgattatagaggccagggcacactggtcaccgtgtctagtggcggaggaagcggcggaggatctgaagttcagctgcttgagtctggcggaggactggttcaacctggcggaagcctgagactgtcttgtgccgccagcggcttcatcttcagcagctacgccatgagctgggtccgacaggctcctggaaagggccaagaatgggtttccggcgttagcggcacaggcgtgaacacctactacgccgatagcgtgaagggcagattcaccatcagccgggacaacagcaagaacaccctgtacctccagatgaacagcctgagagccgaggacaccgccgtgtactattgtgcctctggcaaaggctgggacagcggctcttggtacgaggactatagaggccagggcaccctggtcacagtttcttcaggtaccggcggaggcggatctggcggcggaggtagcggtggcggaggatctgaattcgacatccagatgacacagagccctagcagcctgtctgccagcgtgggagacagagtgaccatcacatgcaaggccagcgaccacatcaacaactggctggcctggtatcagcagaagcctggacaggcccctaagctgctgatctacggcgctaccacactggaaacaggcgtgcccagcagattttctggcagcggctctggcaccgactacaccctgacaatatccagcctccagcctgaggacttcgccacctactactgtcagcagagctggaacaccccttggacattcggccagggcaccaagctggaaatcaagagaggcggaggcggaagtggaggcggaggatctggcggcggaggctctcaagttcagcttcaacagcctggcgctgagctggtcaaacctggcgcttctgtgaagatgagctgcaaagccagcggctacgccttcagcagctactggatcaactggatgaagcagaaacccggccagggactcgaatggatcggccaaatctatcccggcgacggcgacaccaactacaacggcaagttcaagggcagagccacactgaccgccgatacctctagcagcacagcctacatgcagctgagcagcctgaccagcgaagatagcgccgtgtacttctgtgcccggtccatcacaacagtcgtgggctgcgctatggactattggggccagggaacaagcgtgaccgtgtctagtctcgaggacctgaagaacgtgttcccacctgaggtggccgtgttcgagcctagcgaggccgagatcagccacacccagaaagccaccctcgtgtgcctggctaccggcttctaccccgaccatgtggaactgtcttggtgggtcaacggcaaagaggtgcacagcggcgtgtctaccgacccccagccactgaaagaacagcccgccctgaacgacagccggtactgcctgagcagcagactgagagtgtccgccaccttctggcagaacccccggaaccacttcagatgccaggtgcagttctacggcctgagcgagaacgacgagtggacccaggacagagccaagcccgtgacccagatcgtgtctgccgaagcctggggcagagccgattgcggctttaccagcgagagctaccagcagggcgtgctgagcgccaccatcctgtacgagatcctgctgggcaaggccaccctgtacgccgtgctggtgtctgccctggtgctgatggctatggtcaagcggaaggacagccggggaagggccaagcgatctggatctggagcaacaaacttctcactactcaaacaagcaggtgacgtggaggagaatcccgggcctactagaggccatatgaccgagtacaagcccacggtgcgcctcgccacccgcgacgacgtccccagggccgtacgcaccctcgccgccgcgttcgccgactaccccgccacgcgccacaccgtcgatccggaccgccacatcgagcgggtcaccgagctgcaagaactcttcctcacgcgcgtcgggctcgacatcggcaaggtgtgggtcgcggacgacggcgccgcggtggcggtctggaccacgccggagagcgtcgaagcgggggcggtgttcgccgagatcggcccgcgcatggccgagttgagcggttcccggctggccgcgcagcaacagatggaaggcctcctggcgccgcaccggcccaaggagcccgcgtggttcctggccaccgtcggcgtctcgcccgaccaccagggcaagggtctgggcagcgccgtcgtgctccccggagtggaggcggccgagcgcgccggggtgcccgccttcctggagacctccgcgccccgcaacctccccttctacgagcggctcggcttcaccgtcaccgccgacgtcgaggtgcccgaaggaccgcgcacctggtgcatgacccgcaagcccggtgcctga

SEQ ID NO: 5352 - DNA, 2988 bp, Artificial Sequence
  Synthetic Polynucloetide
atggccttaccagtgaccgccttgctcctgccgctggccttgctgctccacgccgccaggccggaggttcagctgcttgagtctggcggaggactggttcaacctggcggaagcctgagactgtcttgtgccgccagcggcttcacctttagcagctacgccatgagctgggtccgacaggctcctggcaaaggactggaatgggtgtccagcatcagcggcagcggcgactacatctactacgccgatagcgtgaagggcagattcaccatcagccgggacatcagcaagaacaccctgtacctccagatgaacagcctgagagccgaggacaccgccgtgtactactgtgccaaagaaggcaccggcgctaacagcagcctggccgattatagaggccagggcacactggtcaccgtgtctagtggcggaggaagcggcggaggatctgaagttcagctgcttgagtctggcggaggactggttcaacctggcggaagcctgagactgtcttgtgccgccagcggcttcatcttcagcagctacgccatgagctgggtccgacaggctcctggaaagggccaagaatgggtttccggcgttagcggcacaggcgtgaacacctactacgccgatagcgtgaagggcagattcaccatcagccgggacaacagcaagaacaccctgtacctccagatgaacagcctgagagccgaggacaccgccgtgtactattgtgcctctggcaaaggctgggacagcggctcttggtacgaggactatagaggccagggcaccctggtcacagtttcttcaggtaccggcggaggcggatctggcggcggaggtagcggtggcggaggatctgaattcgacatccagatgacacagagccctagcagcctgtctgccagcgtgggagacagagtgaccatcacatgcaaggccagcgaccacatcaacaactggctggcctggtatcagcagaagcctggacaggcccctaagctgctgatctacggcgctaccacactggaaacaggcgtgcccagcagattttctggcagcggctctggcaccgactacaccctgacaatatccagcctccagcctgaggacttcgccacctactactgtcagcagagctggaacaccccttggacattcggccagggcaccaagctggaaatcaagagaggcggaggcggaagtggaggcggaggatctggcggcggaggctctcaagttcagcttcaacagcctggcgctgagctggtcaaacctggcgcttctgtgaagatgagctgcaaagccagcggctacgccttcagcagctactggatcaactggatgaagcagaaacccggccagggactcgaatggatcggccaaatctatcccggcgacggcgacaccaactacaacggcaagttcaagggcagagccacactgaccgccgatacctctagcagcacagcctacatgcagctgagcagcctgaccagcgaagatagcgccgtgtacttctgtgcccggtccatcacaacagtcgtgggctgcgctatggactattggggccagggaacaagcgtgaccgtgtctagtacgcgtgagcagaaactgatctcggaagaggatctggggagcggcaccccattcccttctctggcccctcccatcatgctgctggtggacggcaagcagcagatggtggtcgtgtgcctggtgctggatgtggccccacctggactggacagccccatctggtttagcgccggcaatggctctgccctggacgcctttacctacggcccaagccctgccaccgatggcacctggacaaatctggcccacctgagcctgcccagcgaggaactggcttcttgggagcctctcgtgtgccacacaggacctggcgctgagggacacagcagatccacccagcctatgcacctgtctggcgaggccagcaccgccagaacctgtcctcaggaacctctgagaggcacccctggcggagcactgtggctgggagtgctgagactgctgctgttcaagctgctgctgtttgacctgctgctgacctgctcctgtctgtgcgatcctgccggccctctgccttctcctgccaccaccacaagactgagagccctgggcagccacagactgcaccctgccacagagacaggcggcagagaggccacaagcagccctagaccccagcccagagacagaagatggggcgataccccccctggcagaaagcctggatctccagtccgcgccaagagaagcggatctggcgtgaagcagaccctgaatttcgacctgctgaagctggctggcgacgtggaatccaacccaggcccttctagatctagaggccatatgaccgagtacaagcccacggtgcgcctcgccacccgcgacgacgtccccagggccgtacgcaccctcgccgccgcgttcgccgactaccccgccacgcgccacaccgtcgatccggaccgccacatcgagcgggtcaccgagctgcaagaactcttcctcacgcgcgtcgggctcgacatcggcaaggtgtgggtcgcggacgacggcgccgcggtggcggtctggaccacgccggagagcgtcgaagcgggggcggtgttcgccgagatcggcccgcgcatggccgagttgagcggttcccggctggccgcgcagcaacagatggaaggcctcctggcgccgcaccggcccaaggagcccgcgtggttcctggccaccgtcggcgtctcgcccgaccaccagggcaagggtctgggcagcgccgtcgtgctccccggagtggaggcggccgagcgcgccggggtgcccgccttcctggagacctccgcgccccgcaacctccccttctacgagcggctcggcttcaccgtcaccgccgacgtcgaggtgcccgaaggaccgcgcacctggtgcatgacccgcaagcccggtgcctga

SEQ ID NO: 5353 - DNA, 2430 bp, Artificial Sequence
  Synthetic Polynucloetide
atggccttaccagtgaccgccttgctcctgccgctggccttgctgctccacgccgccaggccggaggttcagctgcttgagtctggcggaggactggttcaacctggcggaagcctgagactgtcttgtgccgccagcggcttcacctttagcagctacgccatgagctgggtccgacaggctcctggcaaaggactggaatgggtgtccagcatcagcggcagcggcgactacatctactacgccgatagcgtgaagggcagattcaccatcagccgggacatcagcaagaacaccctgtacctccagatgaacagcctgagagccgaggacaccgccgtgtactactgtgccaaagaaggcaccggcgctaacagcagcctggccgattatagaggccagggcacactggtcaccgtgtctagtggcggaggaagcggcggaggatctgaagttcagctgcttgagtctggcggaggactggttcaacctggcggaagcctgagactgtcttgtgccgccagcggcttcatcttcagcagctacgccatgagctgggtccgacaggctcctggaaagggccaagaatgggtttccggcgttagcggcacaggcgtgaacacctactacgccgatagcgtgaagggcagattcaccatcagccgggacaacagcaagaacaccctgtacctccagatgaacagcctgagagccgaggacaccgccgtgtactattgtgcctctggcaaaggctgggacagcggctcttggtacgaggactatagaggccagggcaccctggtcacagtttcttcaggtaccggcggaggcggatctggcggcggaggtagcggtggcggaggatctgaattcgacatccagatgacacagagccctagcagcctgtctgccagcgtgggagacagagtgaccatcacatgcaaggccagcgaccacatcaacaactggctggcctggtatcagcagaagcctggacaggcccctaagctgctgatctacggcgctaccacactggaaacaggcgtgcccagcagattttctggcagcggctctggcaccgactacaccctgacaatatccagcctccagcctgaggacttcgccacctactactgtcagcagagctggaacaccccttggacattcggccagggcaccaagctggaaatcaagagactcgaggacctgaagaacgtgttcccacctgaggtggccgtgttcgagcctagcgaggccgagatcagccacacccagaaagccaccctcgtgtgcctggctaccggcttctaccccgaccatgtggaactgtcttggtgggtcaacggcaaagaggtgcacagcggcgtgtctaccgacccccagccactgaaagaacagcccgccctgaacgacagccggtactgcctgagcagcagactgagagtgtccgccaccttctggcagaacccccggaaccacttcagatgccaggtgcagttctacggcctgagcgagaacgacgagtggacccaggacagagccaagcccgtgacccagatcgtgtctgccgaagcctggggcagagccgattgcggctttaccagcgagagctaccagcagggcgtgctgagcgccaccatcctgtacgagatcctgctgggcaaggccaccctgtacgccgtgctggtgtctgccctggtgctgatggctatggtcaagcggaaggacagccggggaagggccaagcgatctggatctggagcaacaaacttctcactactcaaacaagcaggtgacgtggaggagaatcccgggcctactagaggccatatgaccgagtacaagcccacggtgcgcctcgccacccgcgacgacgtccccagggccgtacgcaccctcgccgccgcgttcgccgactaccccgccacgcgccacaccgtcgatccggaccgccacatcgagcgggtcaccgagctgcaagaactcttcctcacgcgcgtcgggctcgacatcggcaaggtgtgggtcgcggacgacggcgccgcggtggcggtctggaccacgccggagagcgtcgaagcgggggcggtgttcgccgagatcggcccgcgcatggccgagttgagcggttcccggctggccgcgcagcaacagatggaaggcctcctggcgccgcaccggcccaaggagcccgcgtggttcctggccaccgtcggcgtctcgcccgaccaccagggcaagggtctgggcagcgccgtcgtgctccccggagtggaggcggccgagcgcgccggggtgcccgccttcctggagacctccgcgccccgcaacctccccttctacgagcggctcggcttcaccgtcaccgccgacgtcgaggtgcccgaaggaccgcgcacctggtgcatgacccgcaagcccggtgcctga

SEQ ID NO: 5354 - DNA, 1737 bp, Artificial Sequence
  Synthetic Polynucloetide
atggccttaccagtgaccgccttgctcctgccgctggccttgctgctccacgccgccaggccggaggttcagctgcttgagtctggcggaggactggttcaacctggcggaagcctgagactgtcttgtgccgccagcggcttcacctttagcagctacgccatgagctgggtccgacaggctcctggcaaaggactggaatgggtgtccagcatcagcggcagcggcgactacatctactacgccgatagcgtgaagggcagattcaccatcagccgggacatcagcaagaacaccctgtacctccagatgaacagcctgagagccgaggacaccgccgtgtactactgtgccaaagaaggcaccggcgctaacagcagcctggccgattatagaggccagggcacactggtcaccgtgtctagtggcggaggaagcggcggaggatctgaagttcagctgcttgagtctggcggaggactggttcaacctggcggaagcctgagactgtcttgtgccgccagcggcttcatcttcagcagctacgccatgagctgggtccgacaggctcctggaaagggccaagaatgggtttccggcgttagcggcacaggcgtgaacacctactacgccgatagcgtgaagggcagattcaccatcagccgggacaacagcaagaacaccctgtacctccagatgaacagcctgagagccgaggacaccgccgtgtactattgtgcctctggcaaaggctgggacagcggctcttggtacgaggactatagaggccagggcaccctggtcacagtttcttcaggtaccggcggaggcggatctggcggcggaggtagcggtggcggaggatctgaattcgacatccagatgacacagagccctagcagcctgtctgccagcgtgggagacagagtgaccatcacatgcaaggccagcgaccacatcaacaactggctggcctggtatcagcagaagcctggacaggcccctaagctgctgatctacggcgctaccacactggaaacaggcgtgcccagcagattttctggcagcggctctggcaccgactacaccctgacaatatccagcctccagcctgaggacttcgccacctactactgtcagcagagctggaacaccccttggacattcggccagggcaccaagctggaaatcaagagactcgaggacctgaagaacgtgttcccacctgaggtggccgtgttcgagcctagcgaggccgagatcagccacacccagaaagccaccctcgtgtgcctggctaccggcttctaccccgaccatgtggaactgtcttggtgggtcaacggcaaagaggtgcacagcggcgtgtctaccgacccccagccactgaaagaacagcccgccctgaacgacagccggtactgcctgagcagcagactgagagtgtccgccaccttctggcagaacccccggaaccacttcagatgccaggtgcagttctacggcctgagcgagaacgacgagtggacccaggacagagccaagcccgtgacccagatcgtgtctgccgaagcctggggcagagccgattgcggctttaccagcgagagctaccagcagggcgtgctgagcgccaccatcctgtacgagatcctgctgggcaaggccaccctgtacgccgtgctggtgtctgccctggtgctgatggctatggtcaagcggaaggacagccgggga

SEQ ID NO: 5355 - DNA, 2484 bp, Artificial Sequence
  Synthetic Polynucloetide
atggccttaccagtgaccgccttgctcctgccgctggccttgctgctccacgccgccaggccggaggttcagctgcttgagtctggcggaggactggttcaacctggcggaagcctgagactgtcttgtgccgccagcggcttcacctttagcagctacgccatgagctgggtccgacaggctcctggcaaaggactggaatgggtgtccagcatcagcggcagcggcgactacatctactacgccgatagcgtgaagggcagattcaccatcagccgggacatcagcaagaacaccctgtacctccagatgaacagcctgagagccgaggacaccgccgtgtactactgtgccaaagaaggcaccggcgctaacagcagcctggccgattatagaggccagggcacactggtcaccgtgtctagtggcggaggaagcggcggaggatctgaagttcagctgcttgagtctggcggaggactggttcaacctggcggaagcctgagactgtcttgtgccgccagcggcttcatcttcagcagctacgccatgagctgggtccgacaggctcctggaaagggccaagaatgggtttccggcgttagcggcacaggcgtgaacacctactacgccgatagcgtgaagggcagattcaccatcagccgggacaacagcaagaacaccctgtacctccagatgaacagcctgagagccgaggacaccgccgtgtactattgtgcctctggcaaaggctgggacagcggctcttggtacgaggactatagaggccagggcaccctggtcacagtttcttcaggtaccggcggaggcggatctggcggcggaggtagcggtggcggaggatctgaattcgacatccagatgacacagagccctagcagcctgtctgccagcgtgggagacagagtgaccatcacatgcaaggccagcgaccacatcaacaactggctggcctggtatcagcagaagcctggacaggcccctaagctgctgatctacggcgctaccacactggaaacaggcgtgcccagcagattttctggcagcggctctggcaccgactacaccctgacaatatccagcctccagcctgaggacttcgccacctactactgtcagcagagctggaacaccccttggacattcggccagggcaccaagctggaaatcaagagactcgaggggaaaccaattcccaaccctcttctgggactggattcaaccggcagcggcgaggacctgaagaacgtgttcccacctgaggtggccgtgttcgagcctagcgaggccgagatcagccacacccagaaagccaccctcgtgtgcctggctaccggcttctaccccgaccatgtggaactgtcttggtgggtcaacggcaaagaggtgcacagcggcgtgtgtaccgacccccagccactgaaagaacagcccgccctgaacgacagccggtactgcctgagcagcagactgagagtgtccgccaccttctggcagaacccccggaaccacttcagatgccaggtgcagttctacggcctgagcgagaacgacgagtggacccaggacagagccaagcccgtgacccagatcgtgtctgccgaagcctggggcagagccgattgcggctttaccagcgagagctaccagcagggcgtgctgagcgccaccatcctgtacgagatcctgctgggcaaggccaccctgtacgccgtgctggtgtctgccctggtgctgatggctatggtcaagcggaaggacagccggggaagggccaagcgatctggatctggagcaacaaacttctcactactcaaacaagcaggtgacgtggaggagaatcccgggcctactagaggccatatgaccgagtacaagcccacggtgcgcctcgccacccgcgacgacgtccccagggccgtacgcaccctcgccgccgcgttcgccgactaccccgccacgcgccacaccgtcgatccggaccgccacatcgagcgggtcaccgagctgcaagaactcttcctcacgcgcgtcgggctcgacatcggcaaggtgtgggtcgcggacgacggcgccgcggtggcggtctggaccacgccggagagcgtcgaagcgggggcggtgttcgccgagatcggcccgcgcatggccgagttgagcggttcccggctggccgcgcagcaacagatggaaggcctcctggcgccgcaccggcccaaggagcccgcgtggttcctggccaccgtcggcgtctcgcccgaccaccagggcaagggtctgggcagcgccgtcgtgctccccggagtggaggcggccgagcgcgccggggtgcccgccttcctggagacctccgcgccccgcaacctccccttctacgagcggctcggcttcaccgtcaccgccgacgtcgaggtgcccgaaggaccgcgcacctggtgcatgacccgcaagcccggtgcctga

SEQ ID NO: 5356 - DNA, 1794 bp, Artificial Sequence
  Synthetic Polynucloetide
atggccttaccagtgaccgccttgctcctgccgctggccttgctgctccacgccgccaggccggaggttcagctgcttgagtctggcggaggactggttcaacctggcggaagcctgagactgtcttgtgccgccagcggcttcacctttagcagctacgccatgagctgggtccgacaggctcctggcaaaggactggaatgggtgtccagcatcagcggcagcggcgactacatctactacgccgatagcgtgaagggcagattcaccatcagccgggacatcagcaagaacaccctgtacctccagatgaacagcctgagagccgaggacaccgccgtgtactactgtgccaaagaaggcaccggcgctaacagcagcctggccgattatagaggccagggcacactggtcaccgtgtctagtggcggaggaagcggcggaggatctgaagttcagctgcttgagtctggcggaggactggttcaacctggcggaagcctgagactgtcttgtgccgccagcggcttcatcttcagcagctacgccatgagctgggtccgacaggctcctggaaagggccaagaatgggtttccggcgttagcggcacaggcgtgaacacctactacgccgatagcgtgaagggcagattcaccatcagccgggacaacagcaagaacaccctgtacctccagatgaacagcctgagagccgaggacaccgccgtgtactattgtgcctctggcaaaggctgggacagcggctcttggtacgaggactatagaggccagggcaccctggtcacagtttcttcaggtaccggcggaggcggatctggcggcggaggtagcggtggcggaggatctgaattcgacatccagatgacacagagccctagcagcctgtctgccagcgtgggagacagagtgaccatcacatgcaaggccagcgaccacatcaacaactggctggcctggtatcagcagaagcctggacaggcccctaagctgctgatctacggcgctaccacactggaaacaggcgtgcccagcagattttctggcagcggctctggcaccgactacaccctgacaatatccagcctccagcctgaggacttcgccacctactactgtcagcagagctggaacaccccttggacattcggccagggcaccaagctggaaatcaagagactcgaggggaaaccaattcccaaccctcttctgggactggattcaaccggcagcggcgaggacctgaagaacgtgttcccacctgaggtggccgtgttcgagcctagcgaggccgagatcagccacacccagaaagccaccctcgtgtgcctggctaccggcttctaccccgaccatgtggaactgtcttggtgggtcaacggcaaagaggtgcacagcggcgtgtgtaccgacccccagccactgaaagaacagcccgccctgaacgacagccggtactgcctgagcagcagactgagagtgtccgccaccttctggcagaacccccggaaccacttcagatgccaggtgcagttctacggcctgagcgagaacgacgagtggacccaggacagagccaagcccgtgacccagatcgtgtctgccgaagcctggggcagagccgattgcggctttaccagcgagagctaccagcagggcgtgctgagcgccaccatcctgtacgagatcctgctgggcaaggccaccctgtacgccgtgctggtgtctgccctggtgctgatggctatggtcaagcggaaggacagccggggatga

SEQ ID NO: 5357 - DNA, 2742 bp, Artificial Sequence
  Synthetic Polynucloetide
atggccttaccagtgaccgccttgctcctgccgctggccttgctgctccacgccgccaggccggaggttcagctgcttgagtctggcggaggactggttcaacctggcggaagcctgagactgtcttgtgccgccagcggcttcacctttagcagctacgccatgagctgggtccgacaggctcctggcaaaggactggaatgggtgtccagcatcagcggcagcggcgactacatctactacgccgatagcgtgaagggcagattcaccatcagccgggacatcagcaagaacaccctgtacctccagatgaacagcctgagagccgaggacaccgccgtgtactactgtgccaaagaaggcaccggcgctaacagcagcctggccgattatagaggccagggcacactggtcaccgtgtctagtggcggaggaagcggcggaggatctgaagttcagctgcttgagtctggcggaggactggttcaacctggcggaagcctgagactgtcttgtgccgccagcggcttcatcttcagcagctacgccatgagctgggtccgacaggctcctggaaagggccaagaatgggtttccggcgttagcggcacaggcgtgaacacctactacgccgatagcgtgaagggcagattcaccatcagccgggacaacagcaagaacaccctgtacctccagatgaacagcctgagagccgaggacaccgccgtgtactattgtgcctctggcaaaggctgggacagcggctcttggtacgaggactatagaggccagggcaccctggtcacagtttcttcaggtaccggcggaggcggatctggcggcggaggtagcggtggcggaggatctgaattcgacatccagatgacacagagccctagcagcctgtctgccagcgtgggagacagagtgaccatcacatgcaaggccagcgaccacatcaacaactggctggcctggtatcagcagaagcctggacaggcccctaagctgctgatctacggcgctaccacactggaaacaggcgtgcccagcagattttctggcagcggctctggcaccgactacaccctgacaatatccagcctccagcctgaggacttcgccacctactactgtcagcagagctggaacaccccttggacattcggccagggcaccaagctggaaatcaagagaggcggaggcggaagtggaggcggaggatctggcggcggaggctctcaagttcagcttcaacagcctggcgctgagctggtcaaacctggcgcttctgtgaagatgagctgcaaagccagcggctacgccttcagcagctactggatcaactggatgaagcagaaacccggccagggactcgaatggatcggccaaatctatcccggcgacggcgacaccaactacaacggcaagttcaagggcagagccacactgaccgccgatacctctagcagcacagcctacatgcagctgagcagcctgaccagcgaagatagcgccgtgtacttctgtgcccggtccatcacaacagtcgtgggctgcgctatggactattggggccagggaacaagcgtgaccgtgtctagtacgcgtgggagcggcatccagaaccctgatcctgccgtgtaccagctgcgggatagcaagagcagcgacaagagcgtgtgtctgttcaccgacttcgacagccagaccaacgtgtcccagagcaaggactccgacgtgtacatcaccgataagaccgtgctggacatgcggagcatggacttcaagagcaactccgccgtggcctggtccaacaagtccgatttcgcctgcgccaacgccttcaacaacagcattatccccgaggacacattcttcccaagcagcgacgtgccctgcgacgtgaagctggtggaaaagagcttcgagacagacaccaacctgaacttccagaacctgagcgtgatcggcttcagaatcctgctgctgaaagtggccggctttaacctgctgatgaccctgcggctgtggtccagccgcgccaagagaagcggatctggcgtgaagcagaccctgaatttcgacctgctgaagctggctggcgacgtggaatccaacccaggcccttctagaggccatatgaccgagtacaagcccacggtgcgcctcgccacccgcgacgacgtccccagggccgtacgcaccctcgccgccgcgttcgccgactaccccgccacgcgccacaccgtcgatccggaccgccacatcgagcgggtcaccgagctgcaagaactcttcctcacgcgcgtcgggctcgacatcggcaaggtgtgggtcgcggacgacggcgccgcggtggcggtctggaccacgccggagagcgtcgaagcgggggcggtgttcgccgagatcggcccgcgcatggccgagttgagcggttcccggctggccgcgcagcaacagatggaaggcctcctggcgccgcaccggcccaaggagcccgcgtggttcctggccaccgtcggcgtctcgcccgaccaccagggcaagggtctgggcagcgccgtcgtgctccccggagtggaggcggccgagcgcgccggggtgcccgccttcctggagacctccgcgccccgcaacctccccttctacgagcggctcggcttcaccgtcaccgccgacgtcgaggtgcccgaaggaccgcgcacctggtgcatgacccgcaagcccggtgcctga

SEQ ID NO: 5358 - DNA, 2838 bp, Artificial Sequence
  Synthetic Polynucloetide
atggccttaccagtgaccgccttgctcctgccgctggccttgctgctccacgccgccaggccggaggttcagctgcttgagtctggcggaggactggttcaacctggcggaagcctgagactgtcttgtgccgccagcggcttcacctttagcagctacgccatgagctgggtccgacaggctcctggcaaaggactggaatgggtgtccagcatcagcggcagcggcgactacatctactacgccgatagcgtgaagggcagattcaccatcagccgggacatcagcaagaacaccctgtacctccagatgaacagcctgagagccgaggacaccgccgtgtactactgtgccaaagaaggcaccggcgctaacagcagcctggccgattatagaggccagggcacactggtcaccgtgtctagtggcggaggaagcggcggaggatctgaagttcagctgcttgagtctggcggaggactggttcaacctggcggaagcctgagactgtcttgtgccgccagcggcttcatcttcagcagctacgccatgagctgggtccgacaggctcctggaaagggccaagaatgggtttccggcgttagcggcacaggcgtgaacacctactacgccgatagcgtgaagggcagattcaccatcagccgggacaacagcaagaacaccctgtacctccagatgaacagcctgagagccgaggacaccgccgtgtactattgtgcctctggcaaaggctgggacagcggctcttggtacgaggactatagaggccagggcaccctggtcacagtttcttcaggtaccggcggaggcggatctggcggcggaggtagcggtggcggaggatctgaattcgacatccagatgacacagagccctagcagcctgtctgccagcgtgggagacagagtgaccatcacatgcaaggccagcgaccacatcaacaactggctggcctggtatcagcagaagcctggacaggcccctaagctgctgatctacggcgctaccacactggaaacaggcgtgcccagcagattttctggcagcggctctggcaccgactacaccctgacaatatccagcctccagcctgaggacttcgccacctactactgtcagcagagctggaacaccccttggacattcggccagggcaccaagctggaaatcaagagaggcggaggcggaagtggaggcggaggatctggcggcggaggctctcaagttcagcttcaacagcctggcgctgagctggtcaaacctggcgcttctgtgaagatgagctgcaaagccagcggctacgccttcagcagctactggatcaactggatgaagcagaaacccggccagggactcgaatggatcggccaaatctatcccggcgacggcgacaccaactacaacggcaagttcaagggcagagccacactgaccgccgatacctctagcagcacagcctacatgcagctgagcagcctgaccagcgaagatagcgccgtgtacttctgtgcccggtccatcacaacagtcgtgggctgcgctatggactattggggccagggaacaagcgtgaccgtgtctagtctcgaggacctgaagaacgtgttcccacctgaggtggccgtgttcgagcctagcaaggccgagatcgcccacacccagaaagccaccctcgtgtgcctggctaccggcttctaccccgaccatgtggaactgtcttggtgggtcaacggcaaagaggtgcacagcggcgtgtctaccgacccccagccactgaaagaacagcccgccctgaacgacagccggtactgcctgagcagcagactgagagtgtccgccaccttctggcagaacccccggaaccacttcagatgccaggtgcagttctacggcctgagcgagaacgacgagtggacccaggacagagccaagcccgtgacccagatcgtgtctgccgaagcctggggcagagccgattgcggcatcaccagcgccagctaccaccagggcgtgctgagcgccaccatcctgtacgagatcctgctgggcaaggccaccctgtacgccgtgctggtgtctgccctggtgctgatggctatggtcaagcggaaggacagccggggaagggccaagcgatctggatctggagcaacaaacttctcactactcaaacaagcaggtgacgtggaggagaatcccgggcctactagaggccatatgaccgagtacaagcccacggtgcgcctcgccacccgcgacgacgtccccagggccgtacgcaccctcgccgccgcgttcgccgactaccccgccacgcgccacaccgtcgatccggaccgccacatcgagcgggtcaccgagctgcaagaactcttcctcacgcgcgtcgggctcgacatcggcaaggtgtgggtcgcggacgacggcgccgcggtggcggtctggaccacgccggagagcgtcgaagcgggggcggtgttcgccgagatcggcccgcgcatggccgagttgagcggttcccggctggccgcgcagcaacagatggaaggcctcctggcgccgcaccggcccaaggagcccgcgtggttcctggccaccgtcggcgtctcgcccgaccaccagggcaagggtctgggcagcgccgtcgtgctccccggagtggaggcggccgagcgcgccggggtgcccgccttcctggagacctccgcgccccgcaacctccccttctacgagcggctcggcttcaccgtcaccgccgacgtcgaggtgcccgaaggaccgcgcacctggtgcatgacccgcaagcccggtgcctga

SEQ ID NO: 5359 - DNA, 3792 bp, Artificial Sequence
  Synthetic Polynucloetide
atggccttaccagtgaccgccttgctcctgccgctggccttgctgctccacgccgccaggccggaggttcagctgcttgagtctggcggaggactggttcaacctggcggaagcctgagactgtcttgtgccgccagcggcttcacctttagcagctacgccatgagctgggtccgacaggctcctggcaaaggactggaatgggtgtccagcatcagcggcagcggcgactacatctactacgccgatagcgtgaagggcagattcaccatcagccgggacatcagcaagaacaccctgtacctccagatgaacagcctgagagccgaggacaccgccgtgtactactgtgccaaagaaggcaccggcgctaacagcagcctggccgattatagaggccagggcacactggtcaccgtgtctagtggcggaggaagcggcggaggatctgaagttcagctgcttgagtctggcggaggactggttcaacctggcggaagcctgagactgtcttgtgccgccagcggcttcatcttcagcagctacgccatgagctgggtccgacaggctcctggaaagggccaagaatgggtttccggcgttagcggcacaggcgtgaacacctactacgccgatagcgtgaagggcagattcaccatcagccgggacaacagcaagaacaccctgtacctccagatgaacagcctgagagccgaggacaccgccgtgtactattgtgcctctggcaaaggctgggacagcggctcttggtacgaggactatagaggccagggcaccctggtcacagtttcttcaggtaccggcggaggcggatctggcggcggaggtagcggtggcggaggatctgaattcgacatccagatgacacagagccctagcagcctgtctgccagcgtgggagacagagtgaccatcacatgcaaggccagcgaccacatcaacaactggctggcctggtatcagcagaagcctggacaggcccctaagctgctgatctacggcgctaccacactggaaacaggcgtgcccagcagattttctggcagcggctctggcaccgactacaccctgacaatatccagcctccagcctgaggacttcgccacctactactgtcagcagagctggaacaccccttggacattcggccagggcaccaagctggaaatcaagagactcgagatccagaaccctgatcctgccgtgtaccagctgcgggatagcaagagcagcgacaagagcgtgtgtctgttcaccgacttcgacagccagaccaacgtgtcccagagcaaggactccgacgtgtacatcaccgataagtgcgtgctggacatgcggagcatggacttcaagagcaactccgccgtggcctggtccaacaagtccgatttcgcctgcgccaacgccttcaacaacagcattatccccgaggacacattcttcccaagcagcgacgtgccctgcgacgtgaagctggtggaaaagagcttcgagacagacaccaacctgaacttccagaacctgagcgtgatcggcttcagaatcctgctgctgaaagtggccggctttaacctgctgatgaccctgcggctgtggtccagccgcgccaagagaagcggatctggcgtgaagcagaccctgaatttcgacctgctgaagctggctggcgacgtggaatccaacccaggccctactagtatggactggatttggcgcatccttttccttgtcggcgctgctaccggcgcccattccgggccccaggttcagctgcaagagtctggcggaggacttgctcaagctggcggaagcctgagactgtcttgtgccgcctctggcagaaccttcagcatgggctggtttagacaggcccctggcaaagagagagagttcgtcgccgccatcacatacagcggcggcagcccttactacgcctcttctgtcagaggccggttcaccatcagccgggacaacgccaagaacaccgtgtacctccagatgaacagcctgaagccagaggacaccgccgtgtactactgtgccgccaatccaacctacggcagcgactggaatgccgagaattggggccagggcacccaagtgacagtgtctagtggatccggcggcggaggatctggcggaggcggatctgggggcggaggctctttcgaacaagttcagcttcaacagcctggcgctgagctggtcaaacctggcgcttctgtgaagatgagctgcaaagccagcggctacgccttcagcagctactggatcaactggatgaagcagaaacccggccagggactcgaatggatcggccaaatctatcccggcgacggcgacaccaactacaacggcaagttcaagggcagagccacactgaccgccgatacctctagcagcacagcctacatgcagctgagcagcctgaccagcgaagatagcgccgtgtacttctgtgcccggtccatcacaacagtcgtgggctgcgctatggactattggggccagggaacaagcgtgaccgtgtctagtacgcgtgaggacctgaagaacgtgttcccacctgaggtggccgtgttcgagcctagcaaggccgagatcgcccacacccagaaagccaccctcgtgtgcctggctaccggcttctaccccgaccatgtggaactgtcttggtgggtcaacggcaaagaggtgcacagcggcgtgtgtaccgacccccagccactgaaagaacagcccgccctgaacgacagccggtactgcctgagcagcagactgagagtgtccgccaccttctggcagaacccccggaaccacttcagatgccaggtgcagttctacggcctgagcgagaacgacgagtggacccaggacagagccaagcccgtgacccagatcgtgtctgccgaagcctggggcagagccgattgcggcatcaccagcgccagctaccaccagggcgtgctgagcgccaccatcctgtacgagatcctgctgggcaaggccaccctgtacgccgtgctggtgtctgccctggtgctgatggctatggtcaagcggaaggacagccggggaagggccaagcgatctggatctggagcaacaaacttctcactactcaaacaagcaggtgacgtggaggagaatcccgggccttctagaggccatatgaccgagtacaagcccacggtgcgcctcgccacccgcgacgacgtccccagggccgtacgcaccctcgccgccgcgttcgccgactaccccgccacgcgccacaccgtcgatccggaccgccacatcgagcgggtcaccgagctgcaagaactcttcctcacgcgcgtcgggctcgacatcggcaaggtgtgggtcgcggacgacggcgccgcggtggcggtctggaccacgccggagagcgtcgaagcgggggcggtgttcgccgagatcggcccgcgcatggccgagttgagcggttcccggctggccgcgcagcaacagatggaaggcctcctggcgccgcaccggcccaaggagcccgcgtggttcctggccaccgtcggcgtctcgcccgaccaccagggcaagggtctgggcagcgccgtcgtgctccccggagtggaggcggccgagcgcgccggggtgcccgccttcctggagacctccgcgccccgcaacctccccttctacgagcggctcggcttcaccgtcaccgccgacgtcgaggtgcccgaaggaccgcgcacctggtgcatgacccgcaagcccggtgcctga

SEQ ID NO: 5360 - DNA, 3789 bp, Artificial Sequence
  Synthetic Polynucloetide
atggccttaccagtgaccgccttgctcctgccgctggccttgctgctccacgccgccaggccggaggttcagctgcttgagtctggcggaggactggttcaacctggcggaagcctgagactgtcttgtgccgccagcggcttcacctttagcagctacgccatgagctgggtccgacaggctcctggcaaaggactggaatgggtgtccagcatcagcggcagcggcgactacatctactacgccgatagcgtgaagggcagattcaccatcagccgggacatcagcaagaacaccctgtacctccagatgaacagcctgagagccgaggacaccgccgtgtactactgtgccaaagaaggcaccggcgctaacagcagcctggccgattatagaggccagggcacactggtcaccgtgtctagtggcggaggaagcggcggaggatctgaagttcagctgcttgagtctggcggaggactggttcaacctggcggaagcctgagactgtcttgtgccgccagcggcttcatcttcagcagctacgccatgagctgggtccgacaggctcctggaaagggccaagaatgggtttccggcgttagcggcacaggcgtgaacacctactacgccgatagcgtgaagggcagattcaccatcagccgggacaacagcaagaacaccctgtacctccagatgaacagcctgagagccgaggacaccgccgtgtactattgtgcctctggcaaaggctgggacagcggctcttggtacgaggactatagaggccagggcaccctggtcacagtttcttcaggtaccggcggaggcggatctggcggcggaggtagcggtggcggaggatctgaattcgacatccagatgacacagagccctagcagcctgtctgccagcgtgggagacagagtgaccatcacatgcaaggccagcgaccacatcaacaactggctggcctggtatcagcagaagcctggacaggcccctaagctgctgatctacggcgctaccacactggaaacaggcgtgcccagcagattttctggcagcggctctggcaccgactacaccctgacaatatccagcctccagcctgaggacttcgccacctactactgtcagcagagctggaacaccccttggacattcggccagggcaccaagctggaaatcaagagactcgaggacctgaagaacgtgttcccacctgaggtggccgtgttcgagcctagcaaggccgagatcgcccacacccagaaagccaccctcgtgtgcctggctaccggcttctaccccgaccatgtggaactgtcttggtgggtcaacggcaaagaggtgcacagcggcgtgtgtaccgacccccagccactgaaagaacagcccgccctgaacgacagccggtactgcctgagcagcagactgagagtgtccgccaccttctggcagaacccccggaaccacttcagatgccaggtgcagttctacggcctgagcgagaacgacgagtggacccaggacagagccaagcccgtgacccagatcgtgtctgccgaagcctggggcagagccgattgcggcatcaccagcgccagctaccaccagggcgtgctgagcgccaccatcctgtacgagatcctgctgggcaaggccaccctgtacgccgtgctggtgtctgccctggtgctgatggctatggtcaagcggaaggacagccggggaagggccaagcgatctggatctggagcaacaaacttctcactactcaaacaagcaggtgacgtggaggagaatcccgggcctactagtatggactggatttggcgcatccttttccttgtcggcgctgctaccggcgcccattccgggccccaggttcagctgcaagagtctggcggaggacttgctcaagctggcggaagcctgagactgtcttgtgccgcctctggcagaaccttcagcatgggctggtttagacaggcccctggcaaagagagagagttcgtcgccgccatcacatacagcggcggcagcccttactacgcctcttctgtcagaggccggttcaccatcagccgggacaacgccaagaacaccgtgtacctccagatgaacagcctgaagccagaggacaccgccgtgtactactgtgccgccaatccaacctacggcagcgactggaatgccgagaattggggccagggcacccaagtgacagtgtctagtggatccggcggcggaggatctggcggaggcggatctgggggcggaggctctttcgaacaagttcagcttcaacagcctggcgctgagctggtcaaacctggcgcttctgtgaagatgagctgcaaagccagcggctacgccttcagcagctactggatcaactggatgaagcagaaacccggccagggactcgaatggatcggccaaatctatcccggcgacggcgacaccaactacaacggcaagttcaagggcagagccacactgaccgccgatacctctagcagcacagcctacatgcagctgagcagcctgaccagcgaagatagcgccgtgtacttctgtgcccggtccatcacaacagtcgtgggctgcgctatggactattggggccagggaacaagcgtgaccgtgtctagtacgcgtatccagaaccctgatcctgccgtgtaccagctgcgggatagcaagagcagcgacaagagcgtgtgtctgttcaccgacttcgacagccagaccaacgtgtcccagagcaaggactccgacgtgtacatcaccgataagtgcgtgctggacatgcggagcatggacttcaagagcaactccgccgtggcctggtccaacaagtccgatttcgcctgcgccaacgccttcaacaacagcattatccccgaggacacattcttcccaagcagcgacgtgccctgcgacgtgaagctggtggaaaagagcttcgagacagacaccaacctgaacttccagaacctgagcgtgatcggcttcagaatcctgctgctgaaagtggccggctttaacctgctgatgaccctgcggctgtggtccagccgcgccaagagaagcggatctggcgtgaagcagaccctgaatttcgacctgctgaagctggctggcgacgtggaatccaacccaggcccttctagaggccatatgaccgagtacaagcccacggtgcgcctcgccacccgcgacgacgtccccagggccgtacgcaccctcgccgccgcgttcgccgactaccccgccacgcgccacaccgtcgatccggaccgccacatcgagcgggtcaccgagctgcaagaactcttcctcacgcgcgtcgggctcgacatcggcaaggtgtgggtcgcggacgacggcgccgcggtggcggtctggaccacgccggagagcgtcgaagcgggggcggtgttcgccgagatcggcccgcgcatggccgagttgagcggttcccggctggccgcgcagcaacagatggaaggcctcctggcgccgcaccggcccaaggagcccgcgtggttcctggccaccgtcggcgtctcgcccgaccaccagggcaagggtctgggcagcgccgtcgtgctccccggagtggaggcggccgagcgcgccggggtgcccgccttcctggagacctccgcgccccgcaacctccccttctacgagcggctcggcttcaccgtcaccgccgacgtcgaggtgcccgaaggaccgcgcacctggtgcatgacccgcaagcccggtgcctga

SEQ ID NO: 5361 - DNA, 3789 bp, Artificial Sequence
  Synthetic Polynucloetide
atggccttaccagtgaccgccttgctcctgccgctggccttgctgctccacgccgccaggccggaggttcagctgcttgagtctggcggaggactggttcaacctggcggaagcctgagactgtcttgtgccgccagcggcttcacctttagcagctacgccatgagctgggtccgacaggctcctggcaaaggactggaatgggtgtccagcatcagcggcagcggcgactacatctactacgccgatagcgtgaagggcagattcaccatcagccgggacatcagcaagaacaccctgtacctccagatgaacagcctgagagccgaggacaccgccgtgtactactgtgccaaagaaggcaccggcgctaacagcagcctggccgattatagaggccagggcacactggtcaccgtgtctagtggcggaggaagcggcggaggatctgaagttcagctgcttgagtctggcggaggactggttcaacctggcggaagcctgagactgtcttgtgccgccagcggcttcatcttcagcagctacgccatgagctgggtccgacaggctcctggaaagggccaagaatgggtttccggcgttagcggcacaggcgtgaacacctactacgccgatagcgtgaagggcagattcaccatcagccgggacaacagcaagaacaccctgtacctccagatgaacagcctgagagccgaggacaccgccgtgtactattgtgcctctggcaaaggctgggacagcggctcttggtacgaggactatagaggccagggcaccctggtcacagtttcttcaggtaccggcggaggcggatctggcggcggaggtagcggtggcggaggatctgaattcgacatccagatgacacagagccctagcagcctgtctgccagcgtgggagacagagtgaccatcacatgcaaggccagcgaccacatcaacaactggctggcctggtatcagcagaagcctggacaggcccctaagctgctgatctacggcgctaccacactggaaacaggcgtgcccagcagattttctggcagcggctctggcaccgactacaccctgacaatatccagcctccagcctgaggacttcgccacctactactgtcagcagagctggaacaccccttggacattcggccagggcaccaagctggaaatcaagagactcgaggacctgaagaacgtgttcccacctgaggtggccgtgttcgagcctagcgaggccgagatcagccacacccagaaagccaccctcgtgtgcctggctaccggcttctaccccgaccatgtggaactgtcttggtgggtcaacggcaaagaggtgcacagcggcgtgtgtaccgacccccagccactgaaagaacagcccgccctgaacgacagccggtactgcctgagcagcagactgagagtgtccgccaccttctggcagaacccccggaaccacttcagatgccaggtgcagttctacggcctgagcgagaacgacgagtggacccaggacagagccaagcccgtgacccagatcgtgtctgccgaagcctggggcagagccgattgcggctttaccagcgagagctaccagcagggcgtgctgagcgccaccatcctgtacgagatcctgctgggcaaggccaccctgtacgccgtgctggtgtctgccctggtgctgatggctatggtcaagcggaaggacagccggggaagggccaagcgatctggatctggagcaacaaacttctcactactcaaacaagcaggtgacgtggaggagaatcccgggcctactagtatggactggatttggcgcatccttttccttgtcggcgctgctaccggcgcccattccgggccccaggttcagctgcaagagtctggcggaggacttgctcaagctggcggaagcctgagactgtcttgtgccgcctctggcagaaccttcagcatgggctggtttagacaggcccctggcaaagagagagagttcgtcgccgccatcacatacagcggcggcagcccttactacgcctcttctgtcagaggccggttcaccatcagccgggacaacgccaagaacaccgtgtacctccagatgaacagcctgaagccagaggacaccgccgtgtactactgtgccgccaatccaacctacggcagcgactggaatgccgagaattggggccagggcacccaagtgacagtgtctagtggatccggcggcggaggatctggcggaggcggatctgggggcggaggctctttcgaacaagttcagcttcaacagcctggcgctgagctggtcaaacctggcgcttctgtgaagatgagctgcaaagccagcggctacgccttcagcagctactggatcaactggatgaagcagaaacccggccagggactcgaatggatcggccaaatctatcccggcgacggcgacaccaactacaacggcaagttcaagggcagagccacactgaccgccgatacctctagcagcacagcctacatgcagctgagcagcctgaccagcgaagatagcgccgtgtacttctgtgcccggtccatcacaacagtcgtgggctgcgctatggactattggggccagggaacaagcgtgaccgtgtctagtacgcgtatccagaaccctgatcctgccgtgtaccagctgcgggatagcaagagcagcgacaagagcgtgtgtctgttcaccgacttcgacagccagaccaacgtgtcccagagcaaggactccgacgtgtacatcaccgataagtgcgtgctggacatgcggagcatggacttcaagagcaactccgccgtggcctggtccaacaagtccgatttcgcctgcgccaacgccttcaacaacagcattatccccgaggacacattcttcccaagccccgagagcagctgcgacgtgaagctggtggaaaagagcttcgagacagacaccaacctgaacttccagaacctgagcgtgatcggcttcagaatcctgctgctgaaagtggccggctttaacctgctgatgaccctgcggctgtggtccagccgcgccaagagaagcggatctggcgtgaagcagaccctgaatttcgacctgctgaagctggctggcgacgtggaatccaacccaggcccttctagaggccatatgaccgagtacaagcccacggtgcgcctcgccacccgcgacgacgtccccagggccgtacgcaccctcgccgccgcgttcgccgactaccccgccacgcgccacaccgtcgatccggaccgccacatcgagcgggtcaccgagctgcaagaactcttcctcacgcgcgtcgggctcgacatcggcaaggtgtgggtcgcggacgacggcgccgcggtggcggtctggaccacgccggagagcgtcgaagcgggggcggtgttcgccgagatcggcccgcgcatggccgagttgagcggttcccggctggccgcgcagcaacagatggaaggcctcctggcgccgcaccggcccaaggagcccgcgtggttcctggccaccgtcggcgtctcgcccgaccaccagggcaagggtctgggcagcgccgtcgtgctccccggagtggaggcggccgagcgcgccggggtgcccgccttcctggagacctccgcgccccgcaacctccccttctacgagcggctcggcttcaccgtcaccgccgacgtcgaggtgcccgaaggaccgcgcacctggtgcatgacccgcaagcccggtgcctga

SEQ ID NO: 5362 - DNA, 3087 bp, Artificial Sequence
  Synthetic Polynucloetide
atggccttaccagtgaccgccttgctcctgccgctggccttgctgctccacgccgccaggccggaggttcagctgcttgagtctggcggaggactggttcaacctggcggaagcctgagactgtcttgtgccgccagcggcttcacctttagcagctacgccatgagctgggtccgacaggctcctggcaaaggactggaatgggtgtccagcatcagcggcagcggcgactacatctactacgccgatagcgtgaagggcagattcaccatcagccgggacatcagcaagaacaccctgtacctccagatgaacagcctgagagccgaggacaccgccgtgtactactgtgccaaagaaggcaccggcgctaacagcagcctggccgattatagaggccagggcacactggtcaccgtgtctagtggcggaggaagcggcggaggatctgaagttcagctgcttgagtctggcggaggactggttcaacctggcggaagcctgagactgtcttgtgccgccagcggcttcatcttcagcagctacgccatgagctgggtccgacaggctcctggaaagggccaagaatgggtttccggcgttagcggcacaggcgtgaacacctactacgccgatagcgtgaagggcagattcaccatcagccgggacaacagcaagaacaccctgtacctccagatgaacagcctgagagccgaggacaccgccgtgtactattgtgcctctggcaaaggctgggacagcggctcttggtacgaggactatagaggccagggcaccctggtcacagtttcttcaggtaccggcggaggcggatctggcggcggaggtagcggtggcggaggatctgaattcgacatccagatgacacagagccctagcagcctgtctgccagcgtgggagacagagtgaccatcacatgcaaggccagcgaccacatcaacaactggctggcctggtatcagcagaagcctggacaggcccctaagctgctgatctacggcgctaccacactggaaacaggcgtgcccagcagattttctggcagcggctctggcaccgactacaccctgacaatatccagcctccagcctgaggacttcgccacctactactgtcagcagagctggaacaccccttggacattcggccagggcaccaagctggaaatcaagagactcgaggacctgaagaacgtgttcccacctgaggtggccgtgttcgagcctagcgaggccgagatcagccacacccagaaagccaccctcgtgtgcctggctaccggcttctaccccgaccatgtggaactgtcttggtgggtcaacggcaaagaggtgcacagcggcgtgtgtaccgacccccagccactgaaagaacagcccgccctgaacgacagccggtactgcctgagcagcagactgagagtgtccgccaccttctggcagaacccccggaaccacttcagatgccaggtgcagttctacggcctgagcgagaacgacgagtggacccaggacagagccaagcccgtgacccagatcgtgtctgccgaagcctggggcagagccgattgcggctttaccagcgagagctaccagcagggcgtgctgagcgccaccatcctgtacgagatcctgctgggcaaggccaccctgtacgccgtgctggtgtctgccctggtgctgatggctatggtcaagcggaaggacagccggggaagggccaagcgatctggatctggagcaacaaacttctcactactcaaacaagcaggtgacgtggaggagaatcccgggcctactagtatggactggatttggcgcatccttttccttgtcggcgctgctaccggcgcccattccgggccccaggttcagctgcaagagtctggcggaggacttgctcaagctggcggaagcctgagactgtcttgtgccgcctctggcagaaccttcagcatgggctggtttagacaggcccctggcaaagagagagagttcgtcgccgccatcacatacagcggcggcagcccttactacgcctcttctgtcagaggccggttcaccatcagccgggacaacgccaagaacaccgtgtacctccagatgaacagcctgaagccagaggacaccgccgtgtactactgtgccgccaatccaacctacggcagcgactggaatgccgagaattggggccagggcacccaagtgacagtgtctagtggatccggcggcggaggatctggcggaggcggatctgggggcggaggctctttcgaacaagttcagcttcaacagcctggcgctgagctggtcaaacctggcgcttctgtgaagatgagctgcaaagccagcggctacgccttcagcagctactggatcaactggatgaagcagaaacccggccagggactcgaatggatcggccaaatctatcccggcgacggcgacaccaactacaacggcaagttcaagggcagagccacactgaccgccgatacctctagcagcacagcctacatgcagctgagcagcctgaccagcgaagatagcgccgtgtacttctgtgcccggtccatcacaacagtcgtgggctgcgctatggactattggggccagggaacaagcgtgaccgtgtctagtacgcgtatccagaaccctgatcctgccgtgtaccagctgcgggatagcaagagcagcgacaagagcgtgtgtctgttcaccgacttcgacagccagaccaacgtgtcccagagcaaggactccgacgtgtacatcaccgataagtgcgtgctggacatgcggagcatggacttcaagagcaactccgccgtggcctggtccaacaagtccgatttcgcctgcgccaacgccttcaacaacagcattatccccgaggacacattcttcccaagccccgagagcagctgcgacgtgaagctggtggaaaagagcttcgagacagacaccaacctgaacttccagaacctgagcgtgatcggcttcagaatcctgctgctgaaagtggccggctttaacctgctgatgaccctgcggctgtggtccagc

SEQ ID NO: 5363 - DNA, 3762 bp, Artificial Sequence
  Synthetic Polynucloetide
atggccttaccagtgaccgccttgctcctgccgctggccttgctgctccacgccgccaggccggaggttcagctgcttgagtctggcggaggactggttcaacctggcggaagcctgagactgtcttgtgccgccagcggcttcacctttagcagctacgccatgagctgggtccgacaggctcctggcaaaggactggaatgggtgtccagcatcagcggcagcggcgactacatctactacgccgatagcgtgaagggcagattcaccatcagccgggacatcagcaagaacaccctgtacctccagatgaacagcctgagagccgaggacaccgccgtgtactactgtgccaaagaaggcaccggcgctaacagcagcctggccgattatagaggccagggcacactggtcaccgtgtctagtggcggaggaagcggcggaggatctgaagttcagctgcttgagtctggcggaggactggttcaacctggcggaagcctgagactgtcttgtgccgccagcggcttcatcttcagcagctacgccatgagctgggtccgacaggctcctggaaagggccaagaatgggtttccggcgttagcggcacaggcgtgaacacctactacgccgatagcgtgaagggcagattcaccatcagccgggacaacagcaagaacaccctgtacctccagatgaacagcctgagagccgaggacaccgccgtgtactattgtgcctctggcaaaggctgggacagcggctcttggtacgaggactatagaggccagggcaccctggtcacagtttcttcaggtaccggcggaggcggatctggcggcggaggtagcggtggcggaggatctgaattcgacatccagatgacacagagccctagcagcctgtctgccagcgtgggagacagagtgaccatcacatgcaaggccagcgaccacatcaacaactggctggcctggtatcagcagaagcctggacaggcccctaagctgctgatctacggcgctaccacactggaaacaggcgtgcccagcagattttctggcagcggctctggcaccgactacaccctgacaatatccagcctccagcctgaggacttcgccacctactactgtcagcagagctggaacaccccttggacattcggccagggcaccaagctggaaatcaagagactcgaggacctgaagaacgtgttcccacctgaggtggccgtgttcgagcctagcgaggccgagatcagccacacccagaaagccaccctcgtgtgcctggctaccggcttctaccccgaccatgtggaactgtcttggtgggtcaacggcaaagaggtgcacagcggcgtgtgtaccgacccccagccactgaaagaacagcccgccctgaacgacagccggtactgcctgagcagcagactgagagtgtccgccaccttctggcagaacccccggaaccacttcagatgccaggtgcagttctacggcctgagcgagaacgacgagtggacccaggacagagccaagcccgtgacccagatcgtgtctgccgaagcctggggcagagccgattgcggctttaccagcgagagctaccagcagggcgtgctgagcgccaccatcctgtacgagatcctgctgggcaaggccaccctgtacgccgtgctggtgtctgccctggtgctgatggctatggtcaagcggaaggacagccggggaagggccaagcgatctggatctggagcaacaaacttctcactactcaaacaagcaggtgacgtggaggagaatcccgggcctactagtatggactggatttggcgcatccttttccttgtcggcgctgctaccggcgcccattccgggccccaggttcagctgcaagagtctggcggaggacttgctcaagctggcggaagcctgagactgtcttgtgccgcctctggcagaaccttcagcatgggctggtttagacaggcccctggcaaagagagagagttcgtcgccgccatcacatacagcggcggcagcccttactacgcctcttctgtcagaggccggttcaccatcagccgggacaacgccaagaacaccgtgtacctccagatgaacagcctgaagccagaggacaccgccgtgtactactgtgccgccaatccaacctacggcagcgactggaatgccgagaattggggccagggcacccaagtgacagtgtctagtggatccggcggcggaggatctggcggaggcggatctgggggcggaggctctttcgaacaagttcagcttcaacagcctggcgctgagctggtcaaacctggcgcttctgtgaagatgagctgcaaagccagcggctacgccttcagcagctactggatcaactggatgaagcagaaacccggccagggactcgaatggatcggccaaatctatcccggcgacggcgacaccaactacaacggcaagttcaagggcagagccacactgaccgccgatacctctagcagcacagcctacatgcagctgagcagcctgaccagcgaagatagcgccgtgtacttctgtgcccggtccatcacaacagtcgtgggctgcgctatggactattggggccagggaacaagcgtgaccgtgtctagtacgcgtatccagaaccctgatcctgccgtgtaccagctgcgggatagcaagagcagcgacaagagcgtgtgtctgttcaccgacttcgacagccagaccaacgtgtcccagagcaaggactccgacgtgtacatcaccgataagtgcgtgctggacatgcggagcatggacttcaagagcaactccgccgtggcctggtccaacaagtccgatttcgcctgcgccaacgccttcaacaacagcattatccccgaggacacattcttcccaagccccgagagcagctgcgacgtgaagctggtggaaaagagcttcgagacagacaccaacctgaacttccagaacctgagcgtgatcggcttcagaatcctgctgctgaaagtggccggctttaacctgctgatgaccctgcggctgtggtccagccgcgccaagagaagcggatctggcgtgaagcagaccctgaatttcgacctgctgaagctggctggcgacgtggaatccaacccaggcccttctagaggcgggatccacaccatggctacctacgaggtgctgtgcgaggtggcaagaaagctgggcaccgacgacagagaagtggtgctgttcctgctgaacgtgttcatccctcagcctacactggcccagctgatcggtgcactgagagccctgaaagaggaaggccggctgacctttcctctgctggccgaatgcctgttcagagccggaagaagggatctgctgcgggacctgctgcatctggaccccagatttctggaaagacacctggccggcaccatgagctacttcagcccttaccagctgaccgtgctgcacgttgacggcgaactgtgcgccagagatattcggagcctgatcttcctgagcaaggacaccatcggcagccggtctacccctcagacatttctgcactgggtgtactgcatggaaaacctggacctgctcggccccacagatgtggatgccctgatgtccatgctgagaagcctgagcagagtggacctccagagacaggtgcagacactgatgggactgcacctgagcggacctagccacagccagcactacagacacacccct

SEQ ID NO: 5364 - DNA, 3099 bp, Artificial Sequence
  Synthetic Polynucloetide
atggccttaccagtgaccgccttgctcctgccgctggccttgctgctccacgccgccaggccggaggttcagctgcttgagtctggcggaggactggttcaacctggcggaagcctgagactgtcttgtgccgccagcggcttcacctttagcagctacgccatgagctgggtccgacaggctcctggcaaaggactggaatgggtgtccagcatcagcggcagcggcgactacatctactacgccgatagcgtgaagggcagattcaccatcagccgggacatcagcaagaacaccctgtacctccagatgaacagcctgagagccgaggacaccgccgtgtactactgtgccaaagaaggcaccggcgctaacagcagcctggccgattatagaggccagggcacactggtcaccgtgtctagtggcggaggaagcggcggaggatctgaagttcagctgcttgagtctggcggaggactggttcaacctggcggaagcctgagactgtcttgtgccgccagcggcttcatcttcagcagctacgccatgagctgggtccgacaggctcctggaaagggccaagaatgggtttccggcgttagcggcacaggcgtgaacacctactacgccgatagcgtgaagggcagattcaccatcagccgggacaacagcaagaacaccctgtacctccagatgaacagcctgagagccgaggacaccgccgtgtactattgtgcctctggcaaaggctgggacagcggctcttggtacgaggactatagaggccagggcaccctggtcacagtttcttcaggtaccggcggaggcggatctggcggcggaggtagcggtggcggaggatctgaattcgacatccagatgacacagagccctagcagcctgtctgccagcgtgggagacagagtgaccatcacatgcaaggccagcgaccacatcaacaactggctggcctggtatcagcagaagcctggacaggcccctaagctgctgatctacggcgctaccacactggaaacaggcgtgcccagcagattttctggcagcggctctggcaccgactacaccctgacaatatccagcctccagcctgaggacttcgccacctactactgtcagcagagctggaacaccccttggacattcggccagggcaccaagctggaaatcaagagactcgagatccagaaccctgatcctgccgtgtaccagctgcgggatagcaagagcagcgacaagagcgtgtgtctgttcaccgacttcgacagccagaccaacgtgtcccagagcaaggactccgacgtgtacatcaccgataagtgcgtgctggacatgcggagcatggacttcaagagcaactccgccgtggcctggtccaacaagtccgatttcgcctgcgccaacgccttcaacaacagcattatccccgaggacacattcttcccaagccccgagagcagctgcgacgtgaagctggtggaaaagagcttcgagacagacaccaacctgaacttccagaacctgagcgtgatcggcttcagaatcctgctgctgaaagtggccggctttaacctgctgatgaccctgcggctgtggtccagccgcgccaagagaagcggatctggcgtgaagcagaccctgaatttcgacctgctgaagctggctggcgacgtggaatccaacccaggccctactagtatggactggatttggcgcatccttttccttgtcggcgctgctaccggcgcccattccgggccccaggttcagctgcaagagtctggcggaggacttgctcaagctggcggaagcctgagactgtcttgtgccgcctctggcagaaccttcagcatgggctggtttagacaggcccctggcaaagagagagagttcgtcgccgccatcacatacagcggcggcagcccttactacgcctcttctgtcagaggccggttcaccatcagccgggacaacgccaagaacaccgtgtacctccagatgaacagcctgaagccagaggacaccgccgtgtactactgtgccgccaatccaacctacggcagcgactggaatgccgagaattggggccagggcacccaagtgacagtgtctagtggatccggcggcggaggatctggcggaggcggatctgggggcggaggctctttcgaacaagttcagcttcaacagcctggcgctgagctggtcaaacctggcgcttctgtgaagatgagctgcaaagccagcggctacgccttcagcagctactggatcaactggatgaagcagaaacccggccagggactcgaatggatcggccaaatctatcccggcgacggcgacaccaactacaacggcaagttcaagggcagagccacactgaccgccgatacctctagcagcacagcctacatgcagctgagcagcctgaccagcgaagatagcgccgtgtacttctgtgcccggtccatcacaacagtcgtgggctgcgctatggactattggggccagggaacaagcgtgaccgtgtctagtacgcgtgaggacctgaagaacgtgttcccacctgaggtggccgtgttcgagcctagcgaggccgagatcagccacacccagaaagccaccctcgtgtgcctggctaccggcttctaccccgaccatgtggaactgtcttggtgggtcaacggcaaagaggtgcacagcggcgtgtgtaccgacccccagccactgaaagaacagcccgccctgaacgacagccggtactgcctgagcagcagactgagagtgtccgccaccttctggcagaacccccggaaccacttcagatgccaggtgcagttctacggcctgagcgagaacgacgagtggacccaggacagagccaagcccgtgacccagatcgtgtctgccgaagcctggggcagagccgattgcggctttaccagcgagagctaccagcagggcgtgctgagcgccaccatcctgtacgagatcctgctgggcaaggccaccctgtacgccgtgctggtgtctgccctggtgctgatggctatggtcaagcggaaggacagccgggga

SEQ ID NO: 5365 - DNA, 3765 bp, Artificial Sequence
  Synthetic Polynucloetide
atggccttaccagtgaccgccttgctcctgccgctggccttgctgctccacgccgccaggccggaggttcagctgcttgagtctggcggaggactggttcaacctggcggaagcctgagactgtcttgtgccgccagcggcttcacctttagcagctacgccatgagctgggtccgacaggctcctggcaaaggactggaatgggtgtccagcatcagcggcagcggcgactacatctactacgccgatagcgtgaagggcagattcaccatcagccgggacatcagcaagaacaccctgtacctccagatgaacagcctgagagccgaggacaccgccgtgtactactgtgccaaagaaggcaccggcgctaacagcagcctggccgattatagaggccagggcacactggtcaccgtgtctagtggcggaggaagcggcggaggatctgaagttcagctgcttgagtctggcggaggactggttcaacctggcggaagcctgagactgtcttgtgccgccagcggcttcatcttcagcagctacgccatgagctgggtccgacaggctcctggaaagggccaagaatgggtttccggcgttagcggcacaggcgtgaacacctactacgccgatagcgtgaagggcagattcaccatcagccgggacaacagcaagaacaccctgtacctccagatgaacagcctgagagccgaggacaccgccgtgtactattgtgcctctggcaaaggctgggacagcggctcttggtacgaggactatagaggccagggcaccctggtcacagtttcttcaggtaccggcggaggcggatctggcggcggaggtagcggtggcggaggatctgaattcgacatccagatgacacagagccctagcagcctgtctgccagcgtgggagacagagtgaccatcacatgcaaggccagcgaccacatcaacaactggctggcctggtatcagcagaagcctggacaggcccctaagctgctgatctacggcgctaccacactggaaacaggcgtgcccagcagattttctggcagcggctctggcaccgactacaccctgacaatatccagcctccagcctgaggacttcgccacctactactgtcagcagagctggaacaccccttggacattcggccagggcaccaagctggaaatcaagagactcgagatccagaaccctgatcctgccgtgtaccagctgcgggatagcaagagcagcgacaagagcgtgtgtctgttcaccgacttcgacagccagaccaacgtgtcccagagcaaggactccgacgtgtacatcaccgataagtgcgtgctggacatgcggagcatggacttcaagagcaactccgccgtggcctggtccaacaagtccgatttcgcctgcgccaacgccttcaacaacagcattatccccgaggacacattcttcccaagccccgagagcagctgcgacgtgaagctggtggaaaagagcttcgagacagacaccaacctgaacttccagaacctgagcgtgatcggcttcagaatcctgctgctgaaagtggccggctttaacctgctgatgaccctgcggctgtggtccagccgcgccaagagaagcggatctggcgtgaagcagaccctgaatttcgacctgctgaagctggctggcgacgtggaatccaacccaggccctactagtatggactggatttggcgcatccttttccttgtcggcgctgctaccggcgcccattccgggccccaggttcagctgcaagagtctggcggaggacttgctcaagctggcggaagcctgagactgtcttgtgccgcctctggcagaaccttcagcatgggctggtttagacaggcccctggcaaagagagagagttcgtcgccgccatcacatacagcggcggcagcccttactacgcctcttctgtcagaggccggttcaccatcagccgggacaacgccaagaacaccgtgtacctccagatgaacagcctgaagccagaggacaccgccgtgtactactgtgccgccaatccaacctacggcagcgactggaatgccgagaattggggccagggcacccaagtgacagtgtctagtggatccggcggcggaggatctggcggaggcggatctgggggcggaggctctttcgaacaagttcagcttcaacagcctggcgctgagctggtcaaacctggcgcttctgtgaagatgagctgcaaagccagcggctacgccttcagcagctactggatcaactggatgaagcagaaacccggccagggactcgaatggatcggccaaatctatcccggcgacggcgacaccaactacaacggcaagttcaagggcagagccacactgaccgccgatacctctagcagcacagcctacatgcagctgagcagcctgaccagcgaagatagcgccgtgtacttctgtgcccggtccatcacaacagtcgtgggctgcgctatggactattggggccagggaacaagcgtgaccgtgtctagtacgcgtgaggacctgaagaacgtgttcccacctgaggtggccgtgttcgagcctagcgaggccgagatcagccacacccagaaagccaccctcgtgtgcctggctaccggcttctaccccgaccatgtggaactgtcttggtgggtcaacggcaaagaggtgcacagcggcgtgtgtaccgacccccagccactgaaagaacagcccgccctgaacgacagccggtactgcctgagcagcagactgagagtgtccgccaccttctggcagaacccccggaaccacttcagatgccaggtgcagttctacggcctgagcgagaacgacgagtggacccaggacagagccaagcccgtgacccagatcgtgtctgccgaagcctggggcagagccgattgcggctttaccagcgagagctaccagcagggcgtgctgagcgccaccatcctgtacgagatcctgctgggcaaggccaccctgtacgccgtgctggtgtctgccctggtgctgatggctatggtcaagcggaaggacagccggggaagggccaagcgatctggatctggagcaacaaacttctcactactcaaacaagcaggtgacgtggaggagaatcccgggccttctagaggcgggatccacaccatggctacctacgaggtgctgtgcgaggtggcaagaaagctgggcaccgacgacagagaagtggtgctgttcctgctgaacgtgttcatccctcagcctacactggcccagctgatcggtgcactgagagccctgaaagaggaaggccggctgacctttcctctgctggccgaatgcctgttcagagccggaagaagggatctgctgcgggacctgctgcatctggaccccagatttctggaaagacacctggccggcaccatgagctacttcagcccttaccagctgaccgtgctgcacgttgacggcgaactgtgcgccagagatattcggagcctgatcttcctgagcaaggacaccatcggcagccggtctacccctcagacatttctgcactgggtgtactgcatggaaaacctggacctgctcggccccacagatgtggatgccctgatgtccatgctgagaagcctgagcagagtggacctccagagacaggtgcagacactgatgggactgcacctgagcggacctagccacagccagcactacagacacacccct

SEQ ID NO: 5366 - DNA, 3789 bp, Artificial Sequence
  Synthetic Polynucloetide
atggccttaccagtgaccgccttgctcctgccgctggccttgctgctccacgccgccaggccggaggttcagctgcttgagtctggcggaggactggttcaacctggcggaagcctgagactgtcttgtgccgccagcggcttcacctttagcagctacgccatgagctgggtccgacaggctcctggcaaaggactggaatgggtgtccagcatcagcggcagcggcgactacatctactacgccgatagcgtgaagggcagattcaccatcagccgggacatcagcaagaacaccctgtacctccagatgaacagcctgagagccgaggacaccgccgtgtactactgtgccaaagaaggcaccggcgctaacagcagcctggccgattatagaggccagggcacactggtcaccgtgtctagtggcggaggaagcggcggaggatctgaagttcagctgcttgagtctggcggaggactggttcaacctggcggaagcctgagactgtcttgtgccgccagcggcttcatcttcagcagctacgccatgagctgggtccgacaggctcctggaaagggccaagaatgggtttccggcgttagcggcacaggcgtgaacacctactacgccgatagcgtgaagggcagattcaccatcagccgggacaacagcaagaacaccctgtacctccagatgaacagcctgagagccgaggacaccgccgtgtactattgtgcctctggcaaaggctgggacagcggctcttggtacgaggactatagaggccagggcaccctggtcacagtttcttcaggtaccggcggaggcggatctggcggcggaggtagcggtggcggaggatctgaattcgacatccagatgacacagagccctagcagcctgtctgccagcgtgggagacagagtgaccatcacatgcaaggccagcgaccacatcaacaactggctggcctggtatcagcagaagcctggacaggcccctaagctgctgatctacggcgctaccacactggaaacaggcgtgcccagcagattttctggcagcggctctggcaccgactacaccctgacaatatccagcctccagcctgaggacttcgccacctactactgtcagcagagctggaacaccccttggacattcggccagggcaccaagctggaaatcaagagactcgaggacctgaagaacgtgttcccacctgaggtggccgtgttcgagcctagcgaggccgagatcagccacacccagaaagccaccctcgtgtgcctggctaccggcttctaccccgaccatgtggaactgtcttggtgggtcaacggcaaagaggtgcacagcggcgtgtctaccgacccccagccactgaaagaacagcccgccctgaacgacagccggtactgcctgagcagcagactgagagtgtccgccaccttctggcagaacccccggaaccacttcagatgccaggtgcagttctacggcctgagcgagaacgacgagtggacccaggacagagccaagcccgtgacccagatcgtgtctgccgaagcctggggcagagccgattgcggctttaccagcgagagctaccagcagggcgtgctgagcgccaccatcctgtacgagatcctgctgggcaaggccaccctgtacgccgtgctggtgtctgccctggtgctgatggctatggtcaagcggaaggacagccggggaagggccaagcgatctggatctggagcaacaaacttctcactactcaaacaagcaggtgacgtggaggagaatcccgggcctactagtatggactggatttggcgcatccttttccttgtcggcgctgctaccggcgcccattccgggccccaggttcagctgcaagagtctggcggaggacttgctcaagctggcggaagcctgagactgtcttgtgccgcctctggcagaaccttcagcatgggctggtttagacaggcccctggcaaagagagagagttcgtcgccgccatcacatacagcggcggcagcccttactacgcctcttctgtcagaggccggttcaccatcagccgggacaacgccaagaacaccgtgtacctccagatgaacagcctgaagccagaggacaccgccgtgtactactgtgccgccaatccaacctacggcagcgactggaatgccgagaattggggccagggcacccaagtgacagtgtctagtggatccggcggcggaggatctggcggaggcggatctgggggcggaggctctttcgaacaagttcagcttcaacagcctggcgctgagctggtcaaacctggcgcttctgtgaagatgagctgcaaagccagcggctacgccttcagcagctactggatcaactggatgaagcagaaacccggccagggactcgaatggatcggccaaatctatcccggcgacggcgacaccaactacaacggcaagttcaagggcagagccacactgaccgccgatacctctagcagcacagcctacatgcagctgagcagcctgaccagcgaagatagcgccgtgtacttctgtgcccggtccatcacaacagtcgtgggctgcgctatggactattggggccagggaacaagcgtgaccgtgtctagtacgcgtatccagaaccctgatcctgccgtgtaccagctgcgggatagcaagagcagcgacaagagcgtgtgtctgttcaccgacttcgacagccagaccaacgtgtcccagagcaaggactccgacgtgtacatcaccgataagaccgtgctggacatgcggagcatggacttcaagagcaactccgccgtggcctggtccaacaagtccgatttcgcctgcgccaacgccttcaacaacagcattatccccgaggacacattcttcccaagccccgagagcagctgcgacgtgaagctggtggaaaagagcttcgagacagacaccaacctgaacttccagaacctgagcgtgatcggcttcagaatcctgctgctgaaagtggccggctttaacctgctgatgaccctgcggctgtggtccagccgcgccaagagaagcggatctggcgtgaagcagaccctgaatttcgacctgctgaagctggctggcgacgtggaatccaacccaggcccttctagaggccatatgaccgagtacaagcccacggtgcgcctcgccacccgcgacgacgtccccagggccgtacgcaccctcgccgccgcgttcgccgactaccccgccacgcgccacaccgtcgatccggaccgccacatcgagcgggtcaccgagctgcaagaactcttcctcacgcgcgtcgggctcgacatcggcaaggtgtgggtcgcggacgacggcgccgcggtggcggtctggaccacgccggagagcgtcgaagcgggggcggtgttcgccgagatcggcccgcgcatggccgagttgagcggttcccggctggccgcgcagcaacagatggaaggcctcctggcgccgcaccggcccaaggagcccgcgtggttcctggccaccgtcggcgtctcgcccgaccaccagggcaagggtctgggcagcgccgtcgtgctccccggagtggaggcggccgagcgcgccggggtgcccgccttcctggagacctccgcgccccgcaacctccccttctacgagcggctcggcttcaccgtcaccgccgacgtcgaggtgcccgaaggaccgcgcacctggtgcatgacccgcaagcccggtgcctga

SEQ ID NO: 5367 - DNA, 4035 bp, Artificial Sequence
  Synthetic Polynucloetide
atggccttaccagtgaccgccttgctcctgccgctggccttgctgctccacgccgccaggccggaggttcagctgcttgagtctggcggaggactggttcaacctggcggaagcctgagactgtcttgtgccgccagcggcttcacctttagcagctacgccatgagctgggtccgacaggctcctggcaaaggactggaatgggtgtccagcatcagcggcagcggcgactacatctactacgccgatagcgtgaagggcagattcaccatcagccgggacatcagcaagaacaccctgtacctccagatgaacagcctgagagccgaggacaccgccgtgtactactgtgccaaagaaggcaccggcgctaacagcagcctggccgattatagaggccagggcacactggtcaccgtgtctagtggcggaggaagcggcggaggatctgaagttcagctgcttgagtctggcggaggactggttcaacctggcggaagcctgagactgtcttgtgccgccagcggcttcatcttcagcagctacgccatgagctgggtccgacaggctcctggaaagggccaagaatgggtttccggcgttagcggcacaggcgtgaacacctactacgccgatagcgtgaagggcagattcaccatcagccgggacaacagcaagaacaccctgtacctccagatgaacagcctgagagccgaggacaccgccgtgtactattgtgcctctggcaaaggctgggacagcggctcttggtacgaggactatagaggccagggcaccctggtcacagtttcttcaggtaccggcggaggcggatctggcggcggaggtagcggtggcggaggatctgaattcgacatccagatgacacagagccctagcagcctgtctgccagcgtgggagacagagtgaccatcacatgcaaggccagcgaccacatcaacaactggctggcctggtatcagcagaagcctggacaggcccctaagctgctgatctacggcgctaccacactggaaacaggcgtgcccagcagattttctggcagcggctctggcaccgactacaccctgacaatatccagcctccagcctgaggacttcgccacctactactgtcagcagagctggaacaccccttggacattcggccagggcaccaagctggaaatcaagagactcgaggacctgaagaacgtgttcccacctgaggtggccgtgttcgagcctagcgaggccgagatcagccacacccagaaagccaccctcgtgtgcctggctaccggcttctaccccgaccatgtggaactgtcttggtgggtcaacggcaaagaggtgcacagcggcgtgtctaccgacccccagccactgaaagaacagcccgccctgaacgacagccggtactgcctgagcagcagactgagagtgtccgccaccttctggcagaacccccggaaccacttcagatgccaggtgcagttctacggcctgagcgagaacgacgagtggacccaggacagagccaagcccgtgacccagatcgtgtctgccgaagcctggggcagagccgattgcggctttaccagcgagagctaccagcagggcgtgctgagcgccaccatcctgtacgagatcctgctgggcaaggccaccctgtacgccgtgctggtgtctgccctggtgctgatggctatggtcaagcggaaggacagccggggaagggccaagcgatctggatctggagcaacaaacttctcactactcaaacaagcaggtgacgtggaggagaatcccgggcctactagtatggactggatttggcgcatccttttccttgtcggcgctgctaccggcgcccattccgggccccaggttcagctgcaagagtctggcggaggacttgctcaagctggcggaagcctgagactgtcttgtgccgcctctggcagaaccttcagcatgggctggtttagacaggcccctggcaaagagagagagttcgtcgccgccatcacatacagcggcggcagcccttactacgcctcttctgtcagaggccggttcaccatcagccgggacaacgccaagaacaccgtgtacctccagatgaacagcctgaagccagaggacaccgccgtgtactactgtgccgccaatccaacctacggcagcgactggaatgccgagaattggggccagggcacccaagtgacagtgtctagtggatccggcggcggaggatctggcggaggcggatctgggggcggaggctctttcgaacaagttcagcttcaacagcctggcgctgagctggtcaaacctggcgcttctgtgaagatgagctgcaaagccagcggctacgccttcagcagctactggatcaactggatgaagcagaaacccggccagggactcgaatggatcggccaaatctatcccggcgacggcgacaccaactacaacggcaagttcaagggcagagccacactgaccgccgatacctctagcagcacagcctacatgcagctgagcagcctgaccagcgaagatagcgccgtgtacttctgtgcccggtccatcacaacagtcgtgggctgcgctatggactattggggccagggaacaagcgtgaccgtgtctagtacgcgtgagcagaaactgatctcggaagaggatgggagcggcaccccattcccttctctggcccctcccatcatgctgctggtggacggcaagcagcagatggtggtcgtgtgcctggtgctggatgtggccccacctggactggacagccccatctggtttagcgccggcaatggctctgccctggacgcctttacctacggcccaagccctgccaccgatggcacctggacaaatctggcccacctgagcctgcccagcgaggaactggcttcttgggagcctctcgtgtgccacacaggacctggcgctgagggacacagcagatccacccagcctatgcacctgtctggcgaggccagcaccgccagaacctgtcctcaggaacctctgagaggcacccctggcggagcactgtggctgggagtgctgagactgctgctgttcaagctgctgctgtttgacctgctgctgacctgctcctgtctgtgcgatcctgccggccctctgccttctcctgccaccaccacaagactgagagccctgggcagccacagactgcaccctgccacagagacaggcggcagagaggccacaagcagccctagaccccagcccagagacagaagatggggcgataccccccctggcagaaagcctggatctccagtccgcgccaagagaagcggatctggcgtgaagcagaccctgaatttcgacctgctgaagctggctggcgacgtggaatccaacccaggcccttctagaggccatatgaccgagtacaagcccacggtgcgcctcgccacccgcgacgacgtccccagggccgtacgcaccctcgccgccgcgttcgccgactaccccgccacgcgccacaccgtcgatccggaccgccacatcgagcgggtcaccgagctgcaagaactcttcctcacgcgcgtcgggctcgacatcggcaaggtgtgggtcgcggacgacggcgccgcggtggcggtctggaccacgccggagagcgtcgaagcgggggcggtgttcgccgagatcggcccgcgcatggccgagttgagcggttcccggctggccgcgcagcaacagatggaaggcctcctggcgccgcaccggcccaaggagcccgcgtggttcctggccaccgtcggcgtctcgcccgaccaccagggcaagggtctgggcagcgccgtcgtgctccccggagtggaggcggccgagcgcgccggggtgcccgccttcctggagacctccgcgccccgcaacctccccttctacgagcggctcggcttcaccgtcaccgccgacgtcgaggtgcccgaaggaccgcgcacctggtgcatgacccgcaagcccggtgcctga

SEQ ID NO: 5368 - DNA, 3900 bp, Artificial Sequence
  Synthetic Polynucloetide
atggccttaccagtgaccgccttgctcctgccgctggccttgctgctccacgccgccaggccggaggttcagctgcttgagtctggcggaggactggttcaacctggcggaagcctgagactgtcttgtgccgccagcggcttcacctttagcagctacgccatgagctgggtccgacaggctcctggcaaaggactggaatgggtgtccagcatcagcggcagcggcgactacatctactacgccgatagcgtgaagggcagattcaccatcagccgggacatcagcaagaacaccctgtacctccagatgaacagcctgagagccgaggacaccgccgtgtactactgtgccaaagaaggcaccggcgctaacagcagcctggccgattatagaggccagggcacactggtcaccgtgtctagtggcggaggaagcggcggaggatctgaagttcagctgcttgagtctggcggaggactggttcaacctggcggaagcctgagactgtcttgtgccgccagcggcttcatcttcagcagctacgccatgagctgggtccgacaggctcctggaaagggccaagaatgggtttccggcgttagcggcacaggcgtgaacacctactacgccgatagcgtgaagggcagattcaccatcagccgggacaacagcaagaacaccctgtacctccagatgaacagcctgagagccgaggacaccgccgtgtactattgtgcctctggcaaaggctgggacagcggctcttggtacgaggactatagaggccagggcaccctggtcacagtttcttcaggtaccggcggaggcggatctggcggcggaggtagcggtggcggaggatctgaattcgacatccagatgacacagagccctagcagcctgtctgccagcgtgggagacagagtgaccatcacatgcaaggccagcgaccacatcaacaactggctggcctggtatcagcagaagcctggacaggcccctaagctgctgatctacggcgctaccacactggaaacaggcgtgcccagcagattttctggcagcggctctggcaccgactacaccctgacaatatccagcctccagcctgaggacttcgccacctactactgtcagcagagctggaacaccccttggacattcggccagggcaccaagctggaaatcaagagactcgaggggaaaccaattcccaaccctcttctgggactggattcaaccggcagcggcgacaagcagctggacgccgacgtgtcccccaagcctaccatcttcctgccctctatcgccgagacaaagctccagaaggccggcacctacctgtgcctgctggaaaagttcttcccagatgtgattaagatccactggcaggaaaagaagtccaacaccatcctgggcagccaggaaggcaacaccatgaagaccaacgacacctacatgaagttcagctggctgaccgtgcccgagaagtccctggacaaagaacacagatgcatcgtgcggcacgaaaacaacaagaacggcgtggaccaggaaatcatcttcccacccatcaagaccgatgtgattacaatggaccccaaggacaactgctccaaggacgccaacgataccctgctgctccagctgaccaacaccagcgcctactacatgtacttgttgctgctgctgaagtccgtggtgtacttcgccatcatcacatgctgcctgctgcggagaaccgccttctgctgcaacggcgagaagtctagggccaagcgatctggatctggagcaacaaacttctcactactcaaacaagcaggtgacgtggaggagaatcccgggcctactagtatggactggatttggcgcatccttttccttgtcggcgctgctaccggcgcccattccgggccccaggttcagctgcaagagtctggcggaggacttgctcaagctggcggaagcctgagactgtcttgtgccgcctctggcagaaccttcagcatgggctggtttagacaggcccctggcaaagagagagagttcgtcgccgccatcacatacagcggcggcagcccttactacgcctcttctgtcagaggccggttcaccatcagccgggacaacgccaagaacaccgtgtacctccagatgaacagcctgaagccagaggacaccgccgtgtactactgtgccgccaatccaacctacggcagcgactggaatgccgagaattggggccagggcacccaagtgacagtgtctagtggatccggcggcggaggatctggcggaggcggatctgggggcggaggctctttcgaacaagttcagcttcaacagcctggcgctgagctggtcaaacctggcgcttctgtgaagatgagctgcaaagccagcggctacgccttcagcagctactggatcaactggatgaagcagaaacccggccagggactcgaatggatcggccaaatctatcccggcgacggcgacaccaactacaacggcaagttcaagggcagagccacactgaccgccgatacctctagcagcacagcctacatgcagctgagcagcctgaccagcgaagatagcgccgtgtacttctgtgcccggtccatcacaacagtcgtgggctgcgctatggactattggggccagggaacaagcgtgaccgtgtctagtacgcgtgagcagaaactgatctcggaagaggatgggagcggcagccagcctcacaccaagcccagcgtgttcgtgatgaagaacggcaccaacgtggcctgcctcgtgaaagagttctaccccaaggacatcaggatcaacctggtgtccagcaagaagatcaccgagttcgaccccgccatcgtgatctcccccagcggcaagtacaacgccgtgaagctggggaagtacgaggacagcaacagcgtgacctgctccgtgcagcacgacaacaagaccgtgcacagcaccgactttgaagtgaaaaccgactccaccgaccacgtgaagcccaaagagacagagaacaccaagcagcccagcaagagctgccacaagcccaaggccatcgtgcacaccgagaaagtgaacatgatgagcctgaccgtgctgggcctgcggatgctgttcgccaaaaccgtggccgtgaacttcctgctgaccgccaagctgttcttcctccgcgccaagagaagcggatctggcgtgaagcagaccctgaatttcgacctgctgaagctggctggcgacgtggaatccaacccaggcccttctagaggccatatgaccgagtacaagcccacggtgcgcctcgccacccgcgacgacgtccccagggccgtacgcaccctcgccgccgcgttcgccgactaccccgccacgcgccacaccgtcgatccggaccgccacatcgagcgggtcaccgagctgcaagaactcttcctcacgcgcgtcgggctcgacatcggcaaggtgtgggtcgcggacgacggcgccgcggtggcggtctggaccacgccggagagcgtcgaagcgggggcggtgttcgccgagatcggcccgcgcatggccgagttgagcggttcccggctggccgcgcagcaacagatggaaggcctcctggcgccgcaccggcccaaggagcccgcgtggttcctggccaccgtcggcgtctcgcccgaccaccagggcaagggtctgggcagcgccgtcgtgctccccggagtggaggcggccgagcgcgccggggtgcccgccttcctggagacctccgcgccccgcaacctccccttctacgagcggctcggcttcaccgtcaccgccgacgtcgaggtgcccgaaggaccgcgcacctggtgcatgacccgcaagcccggtgcctga

SEQ ID NO: 5369 - DNA, 3111 bp, Artificial Sequence
  Synthetic Polynucloetide
atggccttaccagtgaccgccttgctcctgccgctggccttgctgctccacgccgccaggccggaggttcagctgcttgagtctggcggaggactggttcaacctggcggaagcctgagactgtcttgtgccgccagcggcttcacctttagcagctacgccatgagctgggtccgacaggctcctggcaaaggactggaatgggtgtccagcatcagcggcagcggcgactacatctactacgccgatagcgtgaagggcagattcaccatcagccgggacatcagcaagaacaccctgtacctccagatgaacagcctgagagccgaggacaccgccgtgtactactgtgccaaagaaggcaccggcgctaacagcagcctggccgattatagaggccagggcacactggtcaccgtgtctagtggcggaggaagcggcggaggatctgaagttcagctgcttgagtctggcggaggactggttcaacctggcggaagcctgagactgtcttgtgccgccagcggcttcatcttcagcagctacgccatgagctgggtccgacaggctcctggaaagggccaagaatgggtttccggcgttagcggcacaggcgtgaacacctactacgccgatagcgtgaagggcagattcaccatcagccgggacaacagcaagaacaccctgtacctccagatgaacagcctgagagccgaggacaccgccgtgtactattgtgcctctggcaaaggctgggacagcggctcttggtacgaggactatagaggccagggcaccctggtcacagtttcttcaggtaccggcggaggcggatctggcggcggaggtagcggtggcggaggatctgaattcgacatccagatgacacagagccctagcagcctgtctgccagcgtgggagacagagtgaccatcacatgcaaggccagcgaccacatcaacaactggctggcctggtatcagcagaagcctggacaggcccctaagctgctgatctacggcgctaccacactggaaacaggcgtgcccagcagattttctggcagcggctctggcaccgactacaccctgacaatatccagcctccagcctgaggacttcgccacctactactgtcagcagagctggaacaccccttggacattcggccagggcaccaagctggaaatcaagagactcgagagccagcctcacaccaagcccagcgtgttcgtgatgaagaacggcaccaacgtggcctgcctcgtgaaagagttctaccccaaggacatcaggatcaacctggtgtccagcaagaagatcaccgagttcgaccccgccatcgtgatctcccccagcggcaagtacaacgccgtgaagctggggaagtacgaggacagcaacagcgtgacctgctccgtgcagcacgacaacaagaccgtgcacagcaccgactttgaagtgaaaaccgactccaccgaccacgtgaagcccaaagagacagagaacaccaagcagcccagcaagagctgccacaagcccaaggccatcgtgcacaccgagaaagtgaacatgatgagcctgaccgtgctgggcctgcggatgctgttcgccaaaaccgtggccgtgaacttcctgctgaccgccaagctgttcttcctcagggccaagcgatctggatctggagcaacaaacttctcactactcaaacaagcaggtgacgtggaggagaatcccgggcctactagtatggactggatttggcgcatccttttccttgtcggcgctgctaccggcgcccattccgggccccaggttcagctgcaagagtctggcggaggacttgctcaagctggcggaagcctgagactgtcttgtgccgcctctggcagaaccttcagcatgggctggtttagacaggcccctggcaaagagagagagttcgtcgccgccatcacatacagcggcggcagcccttactacgcctcttctgtcagaggccggttcaccatcagccgggacaacgccaagaacaccgtgtacctccagatgaacagcctgaagccagaggacaccgccgtgtactactgtgccgccaatccaacctacggcagcgactggaatgccgagaattggggccagggcacccaagtgacagtgtctagtggatccggcggcggaggatctggcggaggcggatctgggggcggaggctctttcgaacaagttcagcttcaacagcctggcgctgagctggtcaaacctggcgcttctgtgaagatgagctgcaaagccagcggctacgccttcagcagctactggatcaactggatgaagcagaaacccggccagggactcgaatggatcggccaaatctatcccggcgacggcgacaccaactacaacggcaagttcaagggcagagccacactgaccgccgatacctctagcagcacagcctacatgcagctgagcagcctgaccagcgaagatagcgccgtgtacttctgtgcccggtccatcacaacagtcgtgggctgcgctatggactattggggccagggaacaagcgtgaccgtgtctagtacgcgtgacaagcagctggacgccgacgtgtcccccaagcctaccatcttcctgccctctatcgccgagacaaagctccagaaggccggcacctacctgtgcctgctggaaaagttcttcccagatgtgattaagatccactggcaggaaaagaagtccaacaccatcctgggcagccaggaaggcaacaccatgaagaccaacgacacctacatgaagttcagctggctgaccgtgcccgagaagtccctggacaaagaacacagatgcatcgtgcggcacgaaaacaacaagaacggcgtggaccaggaaatcatcttcccacccatcaagaccgatgtgattacaatggaccccaaggacaactgctccaaggacgccaacgataccctgctgctccagctgaccaacaccagcgcctactacatgtacttgttgctgctgctgaagtccgtggtgtacttcgccatcatcacatgctgcctgctgcggagaaccgccttctgctgcaacggcgagaagtct

SEQ ID NO: 5370 - DNA, 4320 bp, Artificial Sequence
  Synthetic Polynucloetide
atggccttaccagtgaccgccttgctcctgccgctggccttgctgctccacgccgccaggccggaggttcagctgcttgagtctggcggaggactggttcaacctggcggaagcctgagactgtcttgtgccgccagcggcttcacctttagcagctacgccatgagctgggtccgacaggctcctggcaaaggactggaatgggtgtccagcatcagcggcagcggcgactacatctactacgccgatagcgtgaagggcagattcaccatcagccgggacatcagcaagaacaccctgtacctccagatgaacagcctgagagccgaggacaccgccgtgtactactgtgccaaagaaggcaccggcgctaacagcagcctggccgattatagaggccagggcacactggtcaccgtgtctagtggcggaggaagcggcggaggatctgaagttcagctgcttgagtctggcggaggactggttcaacctggcggaagcctgagactgtcttgtgccgccagcggcttcatcttcagcagctacgccatgagctgggtccgacaggctcctggaaagggccaagaatgggtttccggcgttagcggcacaggcgtgaacacctactacgccgatagcgtgaagggcagattcaccatcagccgggacaacagcaagaacaccctgtacctccagatgaacagcctgagagccgaggacaccgccgtgtactattgtgcctctggcaaaggctgggacagcggctcttggtacgaggactatagaggccagggcaccctggtcacagtttcttcaggtaccggcggaggcggatctggcggcggaggtagcggtggcggaggatctgaattcgacatccagatgacacagagccctagcagcctgtctgccagcgtgggagacagagtgaccatcacatgcaaggccagcgaccacatcaacaactggctggcctggtatcagcagaagcctggacaggcccctaagctgctgatctacggcgctaccacactggaaacaggcgtgcccagcagattttctggcagcggctctggcaccgactacaccctgacaatatccagcctccagcctgaggacttcgccacctactactgtcagcagagctggaacaccccttggacattcggccagggcaccaagctggaaatcaagagaggacagcctaaggccaatcctaccgtgacactgttccctccaagcagcgaagaactccaggccaacaaggccacacttgtgtgcctgatctccgacttctaccctggggctgtgacagtggcttggaaggccgatggatctcctgtgaaagccggcgtggaaaccaccaagccatccaagcagagcaacaacaaatacgccgccagctcctacctgagcctgacacctgagcagtggaagtcccacagatcctacagctgccaagtgacccacgaaggcagcaccgtggaaaagacagtggcccctacagagtgcagcggatcccagagcttcggcctgctggaccccaagctgtgctacctgctggatggcatcctgttcatctacggcgtgatcctgaccgccctgttcctgagagtgaagttcagcagaagcgccgacgcccctgcctaccagcagggacagaaccaactgtacaacgagctgaacctgggcagacgggaagagtacgacgtgctggacaagcggagaggcagggaccctgagatgggcggaaagccccagcggagaaagaacccccaggaaggactgtataacgaactccagaaagacaagatggccgaagcctacagcgagatcggcatgaagggcgagcggagaagaggcaagggccacgatggcctgtaccagggcctgagcaccgccaccaaggacacctatgacgccctgcacatgcaggccctgcctccaagaagggccaagcgatctggatctggagcaacaaacttctcactactcaaacaagcaggtgacgtggaggagaatcccgggcctactagtatggactggatttggcgcatccttttccttgtcggcgctgctaccggcgcccattccgggccccaggttcagctgcaagagtctggcggaggacttgctcaagctggcggaagcctgagactgtcttgtgccgcctctggcagaaccttcagcatgggctggtttagacaggcccctggcaaagagagagagttcgtcgccgccatcacatacagcggcggcagcccttactacgcctcttctgtcagaggccggttcaccatcagccgggacaacgccaagaacaccgtgtacctccagatgaacagcctgaagccagaggacaccgccgtgtactactgtgccgccaatccaacctacggcagcgactggaatgccgagaattggggccagggcacccaagtgacagtgtctagtggatccggcggcggaggatctggcggaggcggatctgggggcggaggctctttcgaacaagttcagcttcaacagcctggcgctgagctggtcaaacctggcgcttctgtgaagatgagctgcaaagccagcggctacgccttcagcagctactggatcaactggatgaagcagaaacccggccagggactcgaatggatcggccaaatctatcccggcgacggcgacaccaactacaacggcaagttcaagggcagagccacactgaccgccgatacctctagcagcacagcctacatgcagctgagcagcctgaccagcgaagatagcgccgtgtacttctgtgcccggtccatcacaacagtcgtgggctgcgctatggactattggggccagggaacaagcgtgaccgtgtctagtgcctctacaaagggaccctccgtgtttcctctggctcccagcagcaagtctacaagcggaggaacagccgctctgggctgcctggtcaaggattactttcccgagcctgtgaccgtgtcctggaatagcggagcactgacaagcggcgtgcacacctttccagccgtgctgcaaagcagcggcctgtactctctgagcagcgtggtcacagtgcctagctctagcctgggcacccagacctacatctgcaatgtgaaccacaagcctagcaacaccaaggtggacaagagagtggaacccaagagctgtggtacccagagttttgggttgttggaccctaaattgtgctatctgttggacggaatcctgttcatttacggagtgatcctgaccgcattgttcctgcgggttaagttttccagatccgcagacgcacccgcttaccaacaagggcagaaccaactctacaatgaacttaatttggggcggagggaagagtacgacgttctggacaaaaggaggggacgagatcccgagatgggcggaaagcctcagcgaaggaagaatccgcaagaggggctttataacgaactccagaaagataaaatggcagaagcctatagtgagattgggatgaagggagaaaggaggaggggtaaaggtcacgatgggttgtaccaaggattgagcacagccactaaagatacctatgatgcgctccacatgcaggccctgccgccaagacgcgccaagagaagcggatctggcgtgaagcagaccctgaatttcgacctgctgaagctggctggcgacgtggaatccaacccaggcccttctagaggccatatgaccgagtacaagcccacggtgcgcctcgccacccgcgacgacgtccccagggccgtacgcaccctcgccgccgcgttcgccgactaccccgccacgcgccacaccgtcgatccggaccgccacatcgagcgggtcaccgagctgcaagaactcttcctcacgcgcgtcgggctcgacatcggcaaggtgtgggtcgcggacgacggcgccgcggtggcggtctggaccacgccggagagcgtcgaagcgggggcggtgttcgccgagatcggcccgcgcatggccgagttgagcggttcccggctggccgcgcagcaacagatggaaggcctcctggcgccgcaccggcccaaggagcccgcgtggttcctggccaccgtcggcgtctcgcccgaccaccagggcaagggtctgggcagcgccgtcgtgctccccggagtggaggcggccgagcgcgccggggtgcccgccttcctggagacctccgcgccccgcaacctccccttctacgagcggctcggcttcaccgtcaccgccgacgtcgaggtgcccgaaggaccgcgcacctggtgcatgacccgcaagcccggtgcctga

SEQ ID NO: 5371 - DNA, 3675 bp, Artificial Sequence
  Synthetic Polynucloetide
atggccttaccagtgaccgccttgctcctgccgctggccttgctgctccacgccgccaggccggaggttcagctgcttgagtctggcggaggactggttcaacctggcggaagcctgagactgtcttgtgccgccagcggcttcacctttagcagctacgccatgagctgggtccgacaggctcctggcaaaggactggaatgggtgtccagcatcagcggcagcggcgactacatctactacgccgatagcgtgaagggcagattcaccatcagccgggacatcagcaagaacaccctgtacctccagatgaacagcctgagagccgaggacaccgccgtgtactactgtgccaaagaaggcaccggcgctaacagcagcctggccgattatagaggccagggcacactggtcaccgtgtctagtggcggaggaagcggcggaggatctgaagttcagctgcttgagtctggcggaggactggttcaacctggcggaagcctgagactgtcttgtgccgccagcggcttcatcttcagcagctacgccatgagctgggtccgacaggctcctggaaagggccaagaatgggtttccggcgttagcggcacaggcgtgaacacctactacgccgatagcgtgaagggcagattcaccatcagccgggacaacagcaagaacaccctgtacctccagatgaacagcctgagagccgaggacaccgccgtgtactattgtgcctctggcaaaggctgggacagcggctcttggtacgaggactatagaggccagggcaccctggtcacagtttcttcaggtaccggcggaggcggatctggcggcggaggtagcggtggcggaggatctgaattcgacatccagatgacacagagccctagcagcctgtctgccagcgtgggagacagagtgaccatcacatgcaaggccagcgaccacatcaacaactggctggcctggtatcagcagaagcctggacaggcccctaagctgctgatctacggcgctaccacactggaaacaggcgtgcccagcagattttctggcagcggctctggcaccgactacaccctgacaatatccagcctccagcctgaggacttcgccacctactactgtcagcagagctggaacaccccttggacattcggccagggcaccaagctggaaatcaagagactcgaggacctgaagaacgtgttcccacctgaggtggccgtgttcgagcctagcgaggccgagatcagccacacccagaaagccaccctcgtgtgcctggctaccggcttctaccccgaccatgtggaactgtcttggtgggtcaacggcaaagaggtgcacagcggcgtgtctaccgacccccagccactgaaagaacagcccgccctgaacgacagccggtactgcctgagcagcagactgagagtgtccgccaccttctggcagaacccccggaaccacttcagatgccaggtgcagttctacggcctgagcgagaacgacgagtggacccaggacagagccaagcccgtgacccagatcgtgtctgccgaagcctggggcagagccgattgcggatcccagagcttcggcctgctggaccccaagctgtgctacctgctggatggcatcctgttcatctacggcgtgatcctgaccgccctgttcctgagagtgaagttcagcagaagcgccgacgcccctgcctaccagcagggacagaaccaactgtacaacgagctgaacctgggcagacgggaagagtacgacgtgctggacaagcggagaggcagggaccctgagatgggcggaaagccccagcggagaaagaacccccaggaaggactgtataacgaactccagaaagacaagatggccgaagcctacagcgagatcggcatgaagggcgagcggagaagaggcaagggccacgatggcctgtaccagggcctgagcaccgccaccaaggacacctatgacgccctgcacatgcaggccctgcctccaagaagggccaagcgatctggatctggagcaacaaacttctcactactcaaacaagcaggtgacgtggaggagaatcccgggcctactagtatggactggatttggcgcatccttttccttgtcggcgctgctaccggcgcccattccgggccccaggttcagctgcaagagtctggcggaggacttgctcaagctggcggaagcctgagactgtcttgtgccgcctctggcagaaccttcagcatgggctggtttagacaggcccctggcaaagagagagagttcgtcgccgccatcacatacagcggcggcagcccttactacgcctcttctgtcagaggccggttcaccatcagccgggacaacgccaagaacaccgtgtacctccagatgaacagcctgaagccagaggacaccgccgtgtactactgtgccgccaatccaacctacggcagcgactggaatgccgagaattggggccagggcacccaagtgacagtgtctagtggatccggcggcggaggatctggcggaggcggatctgggggcggaggctctttcgaacaagttcagcttcaacagcctggcgctgagctggtcaaacctggcgcttctgtgaagatgagctgcaaagccagcggctacgccttcagcagctactggatcaactggatgaagcagaaacccggccagggactcgaatggatcggccaaatctatcccggcgacggcgacaccaactacaacggcaagttcaagggcagagccacactgaccgccgatacctctagcagcacagcctacatgcagctgagcagcctgaccagcgaagatagcgccgtgtacttctgtgcccggtccatcacaacagtcgtgggctgcgctatggactattggggccagggaacaagcgtgaccgtgtctagtacgcgtatccagaaccctgatcctgccgtgtaccagctgcgggatagcaagagcagcgacaagagcgtgtgtctgttcaccgacttcgacagccagaccaacgtgtcccagagcaaggactccgacgtgtacatcaccgataagaccgtgctggacatgcggagcatggacttcaagagcaactccgccgtggcctggtccaacaagtccgatttcgcctgcgccaacgccttcaacaacagcattatccccgaggacacattcttcccaagccccgagagcagctgcggtacccagagttttgggttgttggaccctaaattgtgctatctgttggacggaatcctgttcatttacggagtgatcctgaccgcattgttcctgcgggttaagttttccagatccgcagacgcacccgcttaccaacaagggcagaaccaactctacaatgaacttaatttggggcggagggaagagtacgacgttctggacaaaaggaggggacgagatcccgagatgggcggaaagcctcagcgaaggaagaatccgcaagaggggctttataacgaactccagaaagataaaatggcagaagcctatagtgagattgggatgaagggagaaaggaggaggggtaaaggtcacgatgggttgtaccaaggattgagcacagccactaaagatacctatgatgcgctccacatgcaggccctgccgccaaga

SEQ ID NO: 5372 - DNA, 3675 bp, Artificial Sequence
  Synthetic Polynucloetide
atggccttaccagtgaccgccttgctcctgccgctggccttgctgctccacgccgccaggccggaggttcagctgcttgagtctggcggaggactggttcaacctggcggaagcctgagactgtcttgtgccgccagcggcttcacctttagcagctacgccatgagctgggtccgacaggctcctggcaaaggactggaatgggtgtccagcatcagcggcagcggcgactacatctactacgccgatagcgtgaagggcagattcaccatcagccgggacatcagcaagaacaccctgtacctccagatgaacagcctgagagccgaggacaccgccgtgtactactgtgccaaagaaggcaccggcgctaacagcagcctggccgattatagaggccagggcacactggtcaccgtgtctagtggcggaggaagcggcggaggatctgaagttcagctgcttgagtctggcggaggactggttcaacctggcggaagcctgagactgtcttgtgccgccagcggcttcatcttcagcagctacgccatgagctgggtccgacaggctcctggaaagggccaagaatgggtttccggcgttagcggcacaggcgtgaacacctactacgccgatagcgtgaagggcagattcaccatcagccgggacaacagcaagaacaccctgtacctccagatgaacagcctgagagccgaggacaccgccgtgtactattgtgcctctggcaaaggctgggacagcggctcttggtacgaggactatagaggccagggcaccctggtcacagtttcttcaggtaccggcggaggcggatctggcggcggaggtagcggtggcggaggatctgaattcgacatccagatgacacagagccctagcagcctgtctgccagcgtgggagacagagtgaccatcacatgcaaggccagcgaccacatcaacaactggctggcctggtatcagcagaagcctggacaggcccctaagctgctgatctacggcgctaccacactggaaacaggcgtgcccagcagattttctggcagcggctctggcaccgactacaccctgacaatatccagcctccagcctgaggacttcgccacctactactgtcagcagagctggaacaccccttggacattcggccagggcaccaagctggaaatcaagagactcgaggacctgaagaacgtgttcccacctgaggtggccgtgttcgagcctagcaaggccgagatcgcccacacccagaaagccaccctcgtgtgcctggctaccggcttctaccccgaccatgtggaactgtcttggtgggtcaacggcaaagaggtgcacagcggcgtgtgtaccgacccccagccactgaaagaacagcccgccctgaacgacagccggtactgcctgagcagcagactgagagtgtccgccaccttctggcagaacccccggaaccacttcagatgccaggtgcagttctacggcctgagcgagaacgacgagtggacccaggacagagccaagcccgtgacccagatcgtgtctgccgaagcctggggcagagccgattgcggatcccagagcttcggcctgctggaccccaagctgtgctacctgctggatggcatcctgttcatctacggcgtgatcctgaccgccctgttcctgagagtgaagttcagcagaagcgccgacgcccctgcctaccagcagggacagaaccaactgtacaacgagctgaacctgggcagacgggaagagtacgacgtgctggacaagcggagaggcagggaccctgagatgggcggaaagccccagcggagaaagaacccccaggaaggactgtataacgaactccagaaagacaagatggccgaagcctacagcgagatcggcatgaagggcgagcggagaagaggcaagggccacgatggcctgtaccagggcctgagcaccgccaccaaggacacctatgacgccctgcacatgcaggccctgcctccaagaagggccaagcgatctggatctggagcaacaaacttctcactactcaaacaagcaggtgacgtggaggagaatcccgggcctactagtatggactggatttggcgcatccttttccttgtcggcgctgctaccggcgcccattccgggccccaggttcagctgcaagagtctggcggaggacttgctcaagctggcggaagcctgagactgtcttgtgccgcctctggcagaaccttcagcatgggctggtttagacaggcccctggcaaagagagagagttcgtcgccgccatcacatacagcggcggcagcccttactacgcctcttctgtcagaggccggttcaccatcagccgggacaacgccaagaacaccgtgtacctccagatgaacagcctgaagccagaggacaccgccgtgtactactgtgccgccaatccaacctacggcagcgactggaatgccgagaattggggccagggcacccaagtgacagtgtctagtggatccggcggcggaggatctggcggaggcggatctgggggcggaggctctttcgaacaagttcagcttcaacagcctggcgctgagctggtcaaacctggcgcttctgtgaagatgagctgcaaagccagcggctacgccttcagcagctactggatcaactggatgaagcagaaacccggccagggactcgaatggatcggccaaatctatcccggcgacggcgacaccaactacaacggcaagttcaagggcagagccacactgaccgccgatacctctagcagcacagcctacatgcagctgagcagcctgaccagcgaagatagcgccgtgtacttctgtgcccggtccatcacaacagtcgtgggctgcgctatggactattggggccagggaacaagcgtgaccgtgtctagtacgcgtatccagaaccctgatcctgccgtgtaccagctgcgggatagcaagagcagcgacaagagcgtgtgtctgttcaccgacttcgacagccagaccaacgtgtcccagagcaaggactccgacgtgtacatcaccgataagtgcgtgctggacatgcggagcatggacttcaagagcaactccgccgtggcctggtccaacaagtccgatttcgcctgcgccaacgccttcaacaacagcattatccccgaggacacattcttcccaagcagcgacgtgccctgcggtacccagagttttgggttgttggaccctaaattgtgctatctgttggacggaatcctgttcatttacggagtgatcctgaccgcattgttcctgcgggttaagttttccagatccgcagacgcacccgcttaccaacaagggcagaaccaactctacaatgaacttaatttggggcggagggaagagtacgacgttctggacaaaaggaggggacgagatcccgagatgggcggaaagcctcagcgaaggaagaatccgcaagaggggctttataacgaactccagaaagataaaatggcagaagcctatagtgagattgggatgaagggagaaaggaggaggggtaaaggtcacgatgggttgtaccaaggattgagcacagccactaaagatacctatgatgcgctccacatgcaggccctgccgccaaga

SEQ ID NO: 5373 - DNA, 3888 bp, Artificial Sequence
  Synthetic Polynucloetide
atggccttaccagtgaccgccttgctcctgccgctggccttgctgctccacgccgccaggccggaggttcagctgcttgagtctggcggaggactggttcaacctggcggaagcctgagactgtcttgtgccgccagcggcttcacctttagcagctacgccatgagctgggtccgacaggctcctggcaaaggactggaatgggtgtccagcatcagcggcagcggcgactacatctactacgccgatagcgtgaagggcagattcaccatcagccgggacatcagcaagaacaccctgtacctccagatgaacagcctgagagccgaggacaccgccgtgtactactgtgccaaagaaggcaccggcgctaacagcagcctggccgattatagaggccagggcacactggtcaccgtgtctagtggcggaggaagcggcggaggatctgaagttcagctgcttgagtctggcggaggactggttcaacctggcggaagcctgagactgtcttgtgccgccagcggcttcatcttcagcagctacgccatgagctgggtccgacaggctcctggaaagggccaagaatgggtttccggcgttagcggcacaggcgtgaacacctactacgccgatagcgtgaagggcagattcaccatcagccgggacaacagcaagaacaccctgtacctccagatgaacagcctgagagccgaggacaccgccgtgtactattgtgcctctggcaaaggctgggacagcggctcttggtacgaggactatagaggccagggcaccctggtcacagtttcttcaggtaccggcggaggcggatctggcggcggaggtagcggtggcggaggatctgaattcgacatccagatgacacagagccctagcagcctgtctgccagcgtgggagacagagtgaccatcacatgcaaggccagcgaccacatcaacaactggctggcctggtatcagcagaagcctggacaggcccctaagctgctgatctacggcgctaccacactggaaacaggcgtgcccagcagattttctggcagcggctctggcaccgactacaccctgacaatatccagcctccagcctgaggacttcgccacctactactgtcagcagagctggaacaccccttggacattcggccagggcaccaagctggaaatcaagagactcgaggggaaaccaattcccaaccctcttctgggactggattcaaccggcagcggcgaggacctgaagaacgtgttcccacctgaggtggccgtgttcgagcctagcgaggccgagatcagccacacccagaaagccaccctcgtgtgcctggctaccggcttctaccccgaccatgtggaactgtcttggtgggtcaacggcaaagaggtgcacagcggcgtgtctaccgacccccagccactgaaagaacagcccgccctgaacgacagccggtactgcctgagcagcagactgagagtgtccgccaccttctggcagaacccccggaaccacttcagatgccaggtgcagttctacggcctgagcgagaacgacgagtggacccaggacagagccaagcccgtgacccagatcgtgtctgccgaagcctggggcagagccgattgcggatcccagagcttcggcctgctggaccccaagctgtgctacctgctggatggcatcctgttcatctacggcgtgatcctgaccgccctgttcctgagagtgaagttcagcagaagcgccgacgcccctgcctaccagcagggacagaaccaactgtacaacgagctgaacctgggcagacgggaagagtacgacgtgctggacaagcggagaggcagggaccctgagatgggcggaaagccccagcggagaaagaacccccaggaaggactgtataacgaactccagaaagacaagatggccgaagcctacagcgagatcggcatgaagggcgagcggagaagaggcaagggccacgatggcctgtaccagggcctgagcaccgccaccaaggacacctatgacgccctgcacatgcaggccctgcctccaagaagggccaagcgatctggatctggagcaacaaacttctcactactcaaacaagcaggtgacgtggaggagaatcccgggcctactagtatggactggatttggcgcatccttttccttgtcggcgctgctaccggcgcccattccgggccccaggttcagctgcaagagtctggcggaggacttgctcaagctggcggaagcctgagactgtcttgtgccgcctctggcagaaccttcagcatgggctggtttagacaggcccctggcaaagagagagagttcgtcgccgccatcacatacagcggcggcagcccttactacgcctcttctgtcagaggccggttcaccatcagccgggacaacgccaagaacaccgtgtacctccagatgaacagcctgaagccagaggacaccgccgtgtactactgtgccgccaatccaacctacggcagcgactggaatgccgagaattggggccagggcacccaagtgacagtgtctagtggatccggcggcggaggatctggcggaggcggatctgggggcggaggctctttcgaacaagttcagcttcaacagcctggcgctgagctggtcaaacctggcgcttctgtgaagatgagctgcaaagccagcggctacgccttcagcagctactggatcaactggatgaagcagaaacccggccagggactcgaatggatcggccaaatctatcccggcgacggcgacaccaactacaacggcaagttcaagggcagagccacactgaccgccgatacctctagcagcacagcctacatgcagctgagcagcctgaccagcgaagatagcgccgtgtacttctgtgcccggtccatcacaacagtcgtgggctgcgctatggactattggggccagggaacaagcgtgaccgtgtctagtacgcgtgagcagaaactgatctcggaagaggatgggagcggcatccagaaccctgatcctgccgtgtaccagctgcgggatagcaagagcagcgacaagagcgtgtgtctgttcaccgacttcgacagccagaccaacgtgtcccagagcaaggactccgacgtgtacatcaccgataagaccgtgctggacatgcggagcatggacttcaagagcaactccgccgtggcctggtccaacaagtccgatttcgcctgcgccaacgccttcaacaacagcattatccccgaggacacattcttcccaagccccgagagcagctgcggtacccagagttttgggttgttggaccctaaattgtgctatctgttggacggaatcctgttcatttacggagtgatcctgaccgcattgttcctgaggagcaagcggtcacggctgctccacagcgattacatgaatatgacaccacgaagaccgggtcctactcgcaaacactaccaaccctacgcacctccccgcgactttgcagcgtaccgatctcgggttaagttttccagatccgcagacgcacccgcttaccaacaagggcagaaccaactctacaatgaacttaatttggggcggagggaagagtacgacgttctggacaaaaggaggggacgagatcccgagatgggcggaaagcctcagcgaaggaagaatccgcaagaggggctttataacgaactccagaaagataaaatggcagaagcctatagtgagattgggatgaagggagaaaggaggaggggtaaaggtcacgatgggttgtaccaaggattgagcacagccactaaagatacctatgatgcgctccacatgcaggccctgccgccaaga

SEQ ID NO: 5374 - DNA, 4011 bp, Artificial Sequence
  Synthetic Polynucloetide
atggccttaccagtgaccgccttgctcctgccgctggccttgctgctccacgccgccaggccggaggttcagctgcttgagtctggcggaggactggttcaacctggcggaagcctgagactgtcttgtgccgccagcggcttcacctttagcagctacgccatgagctgggtccgacaggctcctggcaaaggactggaatgggtgtccagcatcagcggcagcggcgactacatctactacgccgatagcgtgaagggcagattcaccatcagccgggacatcagcaagaacaccctgtacctccagatgaacagcctgagagccgaggacaccgccgtgtactactgtgccaaagaaggcaccggcgctaacagcagcctggccgattatagaggccagggcacactggtcaccgtgtctagtggcggaggaagcggcggaggatctgaagttcagctgcttgagtctggcggaggactggttcaacctggcggaagcctgagactgtcttgtgccgccagcggcttcatcttcagcagctacgccatgagctgggtccgacaggctcctggaaagggccaagaatgggtttccggcgttagcggcacaggcgtgaacacctactacgccgatagcgtgaagggcagattcaccatcagccgggacaacagcaagaacaccctgtacctccagatgaacagcctgagagccgaggacaccgccgtgtactattgtgcctctggcaaaggctgggacagcggctcttggtacgaggactatagaggccagggcaccctggtcacagtttcttcaggtaccggcggaggcggatctggcggcggaggtagcggtggcggaggatctgaattcgacatccagatgacacagagccctagcagcctgtctgccagcgtgggagacagagtgaccatcacatgcaaggccagcgaccacatcaacaactggctggcctggtatcagcagaagcctggacaggcccctaagctgctgatctacggcgctaccacactggaaacaggcgtgcccagcagattttctggcagcggctctggcaccgactacaccctgacaatatccagcctccagcctgaggacttcgccacctactactgtcagcagagctggaacaccccttggacattcggccagggcaccaagctggaaatcaagagactcgaggggaaaccaattcccaaccctcttctgggactggattcaaccggcagcggcgaggacctgaagaacgtgttcccacctgaggtggccgtgttcgagcctagcgaggccgagatcagccacacccagaaagccaccctcgtgtgcctggctaccggcttctaccccgaccatgtggaactgtcttggtgggtcaacggcaaagaggtgcacagcggcgtgtctaccgacccccagccactgaaagaacagcccgccctgaacgacagccggtactgcctgagcagcagactgagagtgtccgccaccttctggcagaacccccggaaccacttcagatgccaggtgcagttctacggcctgagcgagaacgacgagtggacccaggacagagccaagcccgtgacccagatcgtgtctgccgaagcctggggcagagccgattgcggatcccagagcttcggcctgctggaccccaagctgtgctacctgctggatggcatcctgttcatctacggcgtgatcctgaccgccctgttcctgaggagtaagaggagcaggctcctgcacagtgactacatgaacatgactccacgccgccccggacccacccgcaagcattaccagccctatgccccaccacgcgacttcgcagcctatcgctccagagtgaagttcagcagaagcgccgacgcccctgcctaccagcagggacagaaccaactgtacaacgagctgaacctgggcagacgggaagagtacgacgtgctggacaagcggagaggcagggaccctgagatgggcggaaagccccagcggagaaagaacccccaggaaggactgtataacgaactccagaaagacaagatggccgaagcctacagcgagatcggcatgaagggcgagcggagaagaggcaagggccacgatggcctgtaccagggcctgagcaccgccaccaaggacacctatgacgccctgcacatgcaggccctgcctccaagaagggccaagcgatctggatctggagcaacaaacttctcactactcaaacaagcaggtgacgtggaggagaatcccgggcctactagtatggactggatttggcgcatccttttccttgtcggcgctgctaccggcgcccattccgggccccaggttcagctgcaagagtctggcggaggacttgctcaagctggcggaagcctgagactgtcttgtgccgcctctggcagaaccttcagcatgggctggtttagacaggcccctggcaaagagagagagttcgtcgccgccatcacatacagcggcggcagcccttactacgcctcttctgtcagaggccggttcaccatcagccgggacaacgccaagaacaccgtgtacctccagatgaacagcctgaagccagaggacaccgccgtgtactactgtgccgccaatccaacctacggcagcgactggaatgccgagaattggggccagggcacccaagtgacagtgtctagtggatccggcggcggaggatctggcggaggcggatctgggggcggaggctctttcgaacaagttcagcttcaacagcctggcgctgagctggtcaaacctggcgcttctgtgaagatgagctgcaaagccagcggctacgccttcagcagctactggatcaactggatgaagcagaaacccggccagggactcgaatggatcggccaaatctatcccggcgacggcgacaccaactacaacggcaagttcaagggcagagccacactgaccgccgatacctctagcagcacagcctacatgcagctgagcagcctgaccagcgaagatagcgccgtgtacttctgtgcccggtccatcacaacagtcgtgggctgcgctatggactattggggccagggaacaagcgtgaccgtgtctagtacgcgtgagcagaaactgatctcggaagaggatgggagcggcatccagaaccctgatcctgccgtgtaccagctgcgggatagcaagagcagcgacaagagcgtgtgtctgttcaccgacttcgacagccagaccaacgtgtcccagagcaaggactccgacgtgtacatcaccgataagaccgtgctggacatgcggagcatggacttcaagagcaactccgccgtggcctggtccaacaagtccgatttcgcctgcgccaacgccttcaacaacagcattatccccgaggacacattcttcccaagccccgagagcagctgcggtacccagagttttgggttgttggaccctaaattgtgctatctgttggacggaatcctgttcatttacggagtgatcctgaccgcattgttcctgaggagcaagcggtcacggctgctccacagcgattacatgaatatgacaccacgaagaccgggtcctactcgcaaacactaccaaccctacgcacctccccgcgactttgcagcgtaccgatctcgggttaagttttccagatccgcagacgcacccgcttaccaacaagggcagaaccaactctacaatgaacttaatttggggcggagggaagagtacgacgttctggacaaaaggaggggacgagatcccgagatgggcggaaagcctcagcgaaggaagaatccgcaagaggggctttataacgaactccagaaagataaaatggcagaagcctatagtgagattgggatgaagggagaaaggaggaggggtaaaggtcacgatgggttgtaccaaggattgagcacagccactaaagatacctatgatgcgctccacatgcaggccctgccgccaaga

SEQ ID NO: 5375 - DNA, 3894 bp, Artificial Sequence
  Synthetic Polynucloetide
atggccttaccagtgaccgccttgctcctgccgctggccttgctgctccacgccgccaggccggaggttcagctgcttgagtctggcggaggactggttcaacctggcggaagcctgagactgtcttgtgccgccagcggcttcacctttagcagctacgccatgagctgggtccgacaggctcctggcaaaggactggaatgggtgtccagcatcagcggcagcggcgactacatctactacgccgatagcgtgaagggcagattcaccatcagccgggacatcagcaagaacaccctgtacctccagatgaacagcctgagagccgaggacaccgccgtgtactactgtgccaaagaaggcaccggcgctaacagcagcctggccgattatagaggccagggcacactggtcaccgtgtctagtggcggaggaagcggcggaggatctgaagttcagctgcttgagtctggcggaggactggttcaacctggcggaagcctgagactgtcttgtgccgccagcggcttcatcttcagcagctacgccatgagctgggtccgacaggctcctggaaagggccaagaatgggtttccggcgttagcggcacaggcgtgaacacctactacgccgatagcgtgaagggcagattcaccatcagccgggacaacagcaagaacaccctgtacctccagatgaacagcctgagagccgaggacaccgccgtgtactattgtgcctctggcaaaggctgggacagcggctcttggtacgaggactatagaggccagggcaccctggtcacagtttcttcaggtaccggcggaggcggatctggcggcggaggtagcggtggcggaggatctgaattcgacatccagatgacacagagccctagcagcctgtctgccagcgtgggagacagagtgaccatcacatgcaaggccagcgaccacatcaacaactggctggcctggtatcagcagaagcctggacaggcccctaagctgctgatctacggcgctaccacactggaaacaggcgtgcccagcagattttctggcagcggctctggcaccgactacaccctgacaatatccagcctccagcctgaggacttcgccacctactactgtcagcagagctggaacaccccttggacattcggccagggcaccaagctggaaatcaagagactcgaggggaaaccaattcccaaccctcttctgggactggattcaaccggcagcggcgaggacctgaagaacgtgttcccacctgaggtggccgtgttcgagcctagcgaggccgagatcagccacacccagaaagccaccctcgtgtgcctggctaccggcttctaccccgaccatgtggaactgtcttggtgggtcaacggcaaagaggtgcacagcggcgtgtctaccgacccccagccactgaaagaacagcccgccctgaacgacagccggtactgcctgagcagcagactgagagtgtccgccaccttctggcagaacccccggaaccacttcagatgccaggtgcagttctacggcctgagcgagaacgacgagtggacccaggacagagccaagcccgtgacccagatcgtgtctgccgaagcctggggcagagccgattgcggatcccagagcttcggcctgctggaccccaagctgtgctacctgctggatggcatcctgttcatctacggcgtgatcctgaccgccctgttcctgagagtgaagttcagcagaagcgccgacgcccctgcctaccagcagggacagaaccaactgtacaacgagctgaacctgggcagacgggaagagtacgacgtgctggacaagcggagaggcagggaccctgagatgggcggaaagccccagcggagaaagaacccccaggaaggactgtataacgaactccagaaagacaagatggccgaagcctacagcgagatcggcatgaagggcgagcggagaagaggcaagggccacgatggcctgtaccagggcctgagcaccgccaccaaggacacctatgacgccctgcacatgcaggccctgcctccaagaagggccaagcgatctggatctggagcaacaaacttctcactactcaaacaagcaggtgacgtggaggagaatcccgggcctactagtatggactggatttggcgcatccttttccttgtcggcgctgctaccggcgcccattccgggccccaggttcagctgcaagagtctggcggaggacttgctcaagctggcggaagcctgagactgtcttgtgccgcctctggcagaaccttcagcatgggctggtttagacaggcccctggcaaagagagagagttcgtcgccgccatcacatacagcggcggcagcccttactacgcctcttctgtcagaggccggttcaccatcagccgggacaacgccaagaacaccgtgtacctccagatgaacagcctgaagccagaggacaccgccgtgtactactgtgccgccaatccaacctacggcagcgactggaatgccgagaattggggccagggcacccaagtgacagtgtctagtggatccggcggcggaggatctggcggaggcggatctgggggcggaggctctttcgaacaagttcagcttcaacagcctggcgctgagctggtcaaacctggcgcttctgtgaagatgagctgcaaagccagcggctacgccttcagcagctactggatcaactggatgaagcagaaacccggccagggactcgaatggatcggccaaatctatcccggcgacggcgacaccaactacaacggcaagttcaagggcagagccacactgaccgccgatacctctagcagcacagcctacatgcagctgagcagcctgaccagcgaagatagcgccgtgtacttctgtgcccggtccatcacaacagtcgtgggctgcgctatggactattggggccagggaacaagcgtgaccgtgtctagtacgcgtgagcagaaactgatctcggaagaggatctggggagcggcatccagaaccctgatcctgccgtgtaccagctgcgggatagcaagagcagcgacaagagcgtgtgtctgttcaccgacttcgacagccagaccaacgtgtcccagagcaaggactccgacgtgtacatcaccgataagaccgtgctggacatgcggagcatggacttcaagagcaactccgccgtggcctggtccaacaagtccgatttcgcctgcgccaacgccttcaacaacagcattatccccgaggacacattcttcccaagccccgagagcagctgcggtacccagagttttgggttgttggaccctaaattgtgctatctgttggacggaatcctgttcatttacggagtgatcctgaccgcattgttcctgaagagaggccggaagaagctgctgtacatcttcaagcagcctttcatgcggcccgtgcagaccacccaggaagaggacggctgctcctgccggttccccgaggaagaagaaggcggctgcgagctgcgggttaagttttccagatccgcagacgcacccgcttaccaacaagggcagaaccaactctacaatgaacttaatttggggcggagggaagagtacgacgttctggacaaaaggaggggacgagatcccgagatgggcggaaagcctcagcgaaggaagaatccgcaagaggggctttataacgaactccagaaagataaaatggcagaagcctatagtgagattgggatgaagggagaaaggaggaggggtaaaggtcacgatgggttgtaccaaggattgagcacagccactaaagatacctatgatgcgctccacatgcaggccctgccgccaaga

SEQ ID NO: 5376 - DNA, 4020 bp, Artificial Sequence
  Synthetic Polynucloetide
atggccttaccagtgaccgccttgctcctgccgctggccttgctgctccacgccgccaggccggaggttcagctgcttgagtctggcggaggactggttcaacctggcggaagcctgagactgtcttgtgccgccagcggcttcacctttagcagctacgccatgagctgggtccgacaggctcctggcaaaggactggaatgggtgtccagcatcagcggcagcggcgactacatctactacgccgatagcgtgaagggcagattcaccatcagccgggacatcagcaagaacaccctgtacctccagatgaacagcctgagagccgaggacaccgccgtgtactactgtgccaaagaaggcaccggcgctaacagcagcctggccgattatagaggccagggcacactggtcaccgtgtctagtggcggaggaagcggcggaggatctgaagttcagctgcttgagtctggcggaggactggttcaacctggcggaagcctgagactgtcttgtgccgccagcggcttcatcttcagcagctacgccatgagctgggtccgacaggctcctggaaagggccaagaatgggtttccggcgttagcggcacaggcgtgaacacctactacgccgatagcgtgaagggcagattcaccatcagccgggacaacagcaagaacaccctgtacctccagatgaacagcctgagagccgaggacaccgccgtgtactattgtgcctctggcaaaggctgggacagcggctcttggtacgaggactatagaggccagggcaccctggtcacagtttcttcaggtaccggcggaggcggatctggcggcggaggtagcggtggcggaggatctgaattcgacatccagatgacacagagccctagcagcctgtctgccagcgtgggagacagagtgaccatcacatgcaaggccagcgaccacatcaacaactggctggcctggtatcagcagaagcctggacaggcccctaagctgctgatctacggcgctaccacactggaaacaggcgtgcccagcagattttctggcagcggctctggcaccgactacaccctgacaatatccagcctccagcctgaggacttcgccacctactactgtcagcagagctggaacaccccttggacattcggccagggcaccaagctggaaatcaagagactcgaggggaaaccaattcccaaccctcttctgggactggattcaaccggcagcggcgaggacctgaagaacgtgttcccacctgaggtggccgtgttcgagcctagcgaggccgagatcagccacacccagaaagccaccctcgtgtgcctggctaccggcttctaccccgaccatgtggaactgtcttggtgggtcaacggcaaagaggtgcacagcggcgtgtctaccgacccccagccactgaaagaacagcccgccctgaacgacagccggtactgcctgagcagcagactgagagtgtccgccaccttctggcagaacccccggaaccacttcagatgccaggtgcagttctacggcctgagcgagaacgacgagtggacccaggacagagccaagcccgtgacccagatcgtgtctgccgaagcctggggcagagccgattgcggatcccagagcttcggcctgctggaccccaagctgtgctacctgctggatggcatcctgttcatctacggcgtgatcctgaccgccctgttcctgaaacggggcagaaagaaactcctgtatatattcaaacaaccatttatgagaccagtacaaactactcaagaggaagatggctgtagctgccgatttccagaagaagaagaaggaggatgtgaactgagagtgaagttcagcagaagcgccgacgcccctgcctaccagcagggacagaaccaactgtacaacgagctgaacctgggcagacgggaagagtacgacgtgctggacaagcggagaggcagggaccctgagatgggcggaaagccccagcggagaaagaacccccaggaaggactgtataacgaactccagaaagacaagatggccgaagcctacagcgagatcggcatgaagggcgagcggagaagaggcaagggccacgatggcctgtaccagggcctgagcaccgccaccaaggacacctatgacgccctgcacatgcaggccctgcctccaagaagggccaagcgatctggatctggagcaacaaacttctcactactcaaacaagcaggtgacgtggaggagaatcccgggcctactagtatggactggatttggcgcatccttttccttgtcggcgctgctaccggcgcccattccgggccccaggttcagctgcaagagtctggcggaggacttgctcaagctggcggaagcctgagactgtcttgtgccgcctctggcagaaccttcagcatgggctggtttagacaggcccctggcaaagagagagagttcgtcgccgccatcacatacagcggcggcagcccttactacgcctcttctgtcagaggccggttcaccatcagccgggacaacgccaagaacaccgtgtacctccagatgaacagcctgaagccagaggacaccgccgtgtactactgtgccgccaatccaacctacggcagcgactggaatgccgagaattggggccagggcacccaagtgacagtgtctagtggatccggcggcggaggatctggcggaggcggatctgggggcggaggctctttcgaacaagttcagcttcaacagcctggcgctgagctggtcaaacctggcgcttctgtgaagatgagctgcaaagccagcggctacgccttcagcagctactggatcaactggatgaagcagaaacccggccagggactcgaatggatcggccaaatctatcccggcgacggcgacaccaactacaacggcaagttcaagggcagagccacactgaccgccgatacctctagcagcacagcctacatgcagctgagcagcctgaccagcgaagatagcgccgtgtacttctgtgcccggtccatcacaacagtcgtgggctgcgctatggactattggggccagggaacaagcgtgaccgtgtctagtacgcgtgagcagaaactgatctcggaagaggatctggggagcggcatccagaaccctgatcctgccgtgtaccagctgcgggatagcaagagcagcgacaagagcgtgtgtctgttcaccgacttcgacagccagaccaacgtgtcccagagcaaggactccgacgtgtacatcaccgataagaccgtgctggacatgcggagcatggacttcaagagcaactccgccgtggcctggtccaacaagtccgatttcgcctgcgccaacgccttcaacaacagcattatccccgaggacacattcttcccaagccccgagagcagctgcggtacccagagttttgggttgttggaccctaaattgtgctatctgttggacggaatcctgttcatttacggagtgatcctgaccgcattgttcctgaagagaggccggaagaagctgctgtacatcttcaagcagcctttcatgcggcccgtgcagaccacccaggaagaggacggctgctcctgccggttccccgaggaagaagaaggcggctgcgagctgcgggttaagttttccagatccgcagacgcacccgcttaccaacaagggcagaaccaactctacaatgaacttaatttggggcggagggaagagtacgacgttctggacaaaaggaggggacgagatcccgagatgggcggaaagcctcagcgaaggaagaatccgcaagaggggctttataacgaactccagaaagataaaatggcagaagcctatagtgagattgggatgaagggagaaaggaggaggggtaaaggtcacgatgggttgtaccaaggattgagcacagccactaaagatacctatgatgcgctccacatgcaggccctgccgccaaga

SEQ ID NO: 5377 - DNA, 3693 bp, Artificial Sequence
  Synthetic Polynucloetide
atggccttaccagtgaccgccttgctcctgccgctggccttgctgctccacgccgccaggccggaggttcagctgcttgagtctggcggaggactggttcaacctggcggaagcctgagactgtcttgtgccgccagcggcttcacctttagcagctacgccatgagctgggtccgacaggctcctggcaaaggactggaatgggtgtccagcatcagcggcagcggcgactacatctactacgccgatagcgtgaagggcagattcaccatcagccgggacatcagcaagaacaccctgtacctccagatgaacagcctgagagccgaggacaccgccgtgtactactgtgccaaagaaggcaccggcgctaacagcagcctggccgattatagaggccagggcacactggtcaccgtgtctagtggcggaggaagcggcggaggatctgaagttcagctgcttgagtctggcggaggactggttcaacctggcggaagcctgagactgtcttgtgccgccagcggcttcatcttcagcagctacgccatgagctgggtccgacaggctcctggaaagggccaagaatgggtttccggcgttagcggcacaggcgtgaacacctactacgccgatagcgtgaagggcagattcaccatcagccgggacaacagcaagaacaccctgtacctccagatgaacagcctgagagccgaggacaccgccgtgtactattgtgcctctggcaaaggctgggacagcggctcttggtacgaggactatagaggccagggcaccctggtcacagtttcttcaggtaccggcggaggcggatctggcggcggaggtagcggtggcggaggatctgaattcgacatccagatgacacagagccctagcagcctgtctgccagcgtgggagacagagtgaccatcacatgcaaggccagcgaccacatcaacaactggctggcctggtatcagcagaagcctggacaggcccctaagctgctgatctacggcgctaccacactggaaacaggcgtgcccagcagattttctggcagcggctctggcaccgactacaccctgacaatatccagcctccagcctgaggacttcgccacctactactgtcagcagagctggaacaccccttggacattcggccagggcaccaagctggaaatcaagagactcgagcagagcttcggcctgctggaccccaagctgtgctacctgctggatggcatcctgttcatctacggcgtgatcctgaccgccctgttcctgagagtgaagttcagcagaagcgccgacgcccctgcctaccagcagggacagaaccaactgtacaacgagctgaacctgggcagacgggaagagtacgacgtgctggacaagcggagaggcagggaccctgagatgggcggaaagccccagcggagaaagaacccccaggaaggactgtataacgaactccagaaagacaagatggccgaagcctacagcgagatcggcatgaagggcgagcggagaagaggcaagggccacgatggcctgtaccagggcctgagcaccgccaccaaggacacctatgacgccctgcacatgcaggccctgcctccaagaagggccaagcgatctggatctggagcaacaaacttctcactactcaaacaagcaggtgacgtggaggagaatcccgggcctactagtatggactggatttggcgcatccttttccttgtcggcgctgctaccggcgcccattccgggccccaggttcagctgcaagagtctggcggaggacttgctcaagctggcggaagcctgagactgtcttgtgccgcctctggcagaaccttcagcatgggctggtttagacaggcccctggcaaagagagagagttcgtcgccgccatcacatacagcggcggcagcccttactacgcctcttctgtcagaggccggttcaccatcagccgggacaacgccaagaacaccgtgtacctccagatgaacagcctgaagccagaggacaccgccgtgtactactgtgccgccaatccaacctacggcagcgactggaatgccgagaattggggccagggcacccaagtgacagtgtctagtggatccggcggcggaggatctggcggaggcggatctgggggcggaggctctttcgaacaagttcagcttcaacagcctggcgctgagctggtcaaacctggcgcttctgtgaagatgagctgcaaagccagcggctacgccttcagcagctactggatcaactggatgaagcagaaacccggccagggactcgaatggatcggccaaatctatcccggcgacggcgacaccaactacaacggcaagttcaagggcagagccacactgaccgccgatacctctagcagcacagcctacatgcagctgagcagcctgaccagcgaagatagcgccgtgtacttctgtgcccggtccatcacaacagtcgtgggctgcgctatggactattggggccagggaacaagcgtgaccgtgtctagtacgcgtcagagttttgggttgttggaccctaaattgtgctatctgttggacggaatcctgttcatttacggagtgatcctgaccgcattgttcctgcgggttaagttttccagatccgcagacgcacccgcttaccaacaagggcagaaccaactctacaatgaacttaatttggggcggagggaagagtacgacgttctggacaaaaggaggggacgagatcccgagatgggcggaaagcctcagcgaaggaagaatccgcaagaggggctttataacgaactccagaaagataaaatggcagaagcctatagtgagattgggatgaagggagaaaggaggaggggtaaaggtcacgatgggttgtaccaaggattgagcacagccactaaagatacctatgatgcgctccacatgcaggccctgccgccaagacgcgccaagagaagcggatctggcgtgaagcagaccctgaatttcgacctgctgaagctggctggcgacgtggaatccaacccaggcccttctagaggccatatgaccgagtacaagcccacggtgcgcctcgccacccgcgacgacgtccccagggccgtacgcaccctcgccgccgcgttcgccgactaccccgccacgcgccacaccgtcgatccggaccgccacatcgagcgggtcaccgagctgcaagaactcttcctcacgcgcgtcgggctcgacatcggcaaggtgtgggtcgcggacgacggcgccgcggtggcggtctggaccacgccggagagcgtcgaagcgggggcggtgttcgccgagatcggcccgcgcatggccgagttgagcggttcccggctggccgcgcagcaacagatggaaggcctcctggcgccgcaccggcccaaggagcccgcgtggttcctggccaccgtcggcgtctcgcccgaccaccagggcaagggtctgggcagcgccgtcgtgctccccggagtggaggcggccgagcgcgccggggtgcccgccttcctggagacctccgcgccccgcaacctccccttctacgagcggctcggcttcaccgtcaccgccgacgtcgaggtgcccgaaggaccgcgcacctggtgcatgacccgcaagcccggtgcctga

SEQ ID NO: 5378 - DNA, 3165 bp, Artificial Sequence
  Synthetic Polynucloetide
atggccttaccagtgaccgccttgctcctgccgctggccttgctgctccacgccgccaggccggaggttcagctgcttgagtctggcggaggactggttcaacctggcggaagcctgagactgtcttgtgccgccagcggcttcacctttagcagctacgccatgagctgggtccgacaggctcctggcaaaggactggaatgggtgtccagcatcagcggcagcggcgactacatctactacgccgatagcgtgaagggcagattcaccatcagccgggacatcagcaagaacaccctgtacctccagatgaacagcctgagagccgaggacaccgccgtgtactactgtgccaaagaaggcaccggcgctaacagcagcctggccgattatagaggccagggcacactggtcaccgtgtctagtggcggaggaagcggcggaggatctgaagttcagctgcttgagtctggcggaggactggttcaacctggcggaagcctgagactgtcttgtgccgccagcggcttcatcttcagcagctacgccatgagctgggtccgacaggctcctggaaagggccaagaatgggtttccggcgttagcggcacaggcgtgaacacctactacgccgatagcgtgaagggcagattcaccatcagccgggacaacagcaagaacaccctgtacctccagatgaacagcctgagagccgaggacaccgccgtgtactattgtgcctctggcaaaggctgggacagcggctcttggtacgaggactatagaggccagggcaccctggtcacagtttcttcaggtaccggcggaggcggatctggcggcggaggtagcggtggcggaggatctgaattcgacatccagatgacacagagccctagcagcctgtctgccagcgtgggagacagagtgaccatcacatgcaaggccagcgaccacatcaacaactggctggcctggtatcagcagaagcctggacaggcccctaagctgctgatctacggcgctaccacactggaaacaggcgtgcccagcagattttctggcagcggctctggcaccgactacaccctgacaatatccagcctccagcctgaggacttcgccacctactactgtcagcagagctggaacaccccttggacattcggccagggcaccaagctggaaatcaagagactcgagggacagcctaaggccaatcctaccgtgacactgttccctccaagcagcgaagaactccaggccaacaaggccacacttgtgtgcctgatctccgacttctaccctggggctgtgacagtggcttggaaggccgatggatctcctgtgaaagccggcgtggaaaccaccaagccatccaagcagagcaacaacaaatacgccgccagctcctacctgagcctgacacctgagcagtggaagtcccacagatcctacagctgccaagtgacccacgaaggcagcaccgtggaaaagacagtggcccctacagagtgcagccccatcaagaccgatgtgattacaatggaccccaaggacaactgctccaaggacgccaacgataccctgctgctccagctgaccaacaccagcgcctactacatgtacttgttgctgctgctgaagtccgtggtgtacttcgccatcatcacatgctgcctgctgcggagaaccgccttctgctgcaacggcgagaagtctagggccaagcgatctggatctggagcaacaaacttctcactactcaaacaagcaggtgacgtggaggagaatcccgggcctactagtatggactggatttggcgcatccttttccttgtcggcgctgctaccggcgcccattccgggccccaggttcagctgcaagagtctggcggaggacttgctcaagctggcggaagcctgagactgtcttgtgccgcctctggcagaaccttcagcatgggctggtttagacaggcccctggcaaagagagagagttcgtcgccgccatcacatacagcggcggcagcccttactacgcctcttctgtcagaggccggttcaccatcagccgggacaacgccaagaacaccgtgtacctccagatgaacagcctgaagccagaggacaccgccgtgtactactgtgccgccaatccaacctacggcagcgactggaatgccgagaattggggccagggcacccaagtgacagtgtctagtggatccggcggcggaggatctggcggaggcggatctgggggcggaggctctttcgaacaagttcagcttcaacagcctggcgctgagctggtcaaacctggcgcttctgtgaagatgagctgcaaagccagcggctacgccttcagcagctactggatcaactggatgaagcagaaacccggccagggactcgaatggatcggccaaatctatcccggcgacggcgacaccaactacaacggcaagttcaagggcagagccacactgaccgccgatacctctagcagcacagcctacatgcagctgagcagcctgaccagcgaagatagcgccgtgtacttctgtgcccggtccatcacaacagtcgtgggctgcgctatggactattggggccagggaacaagcgtgaccgtgtctagtacgcgtgcctctacaaagggaccctccgtgtttcctctggctcccagcagcaagtctacaagcggaggaacagccgctctgggctgcctggtcaaggattactttcccgagcctgtgaccgtgtcctggaatagcggagcactgacaagcggcgtgcacacctttccagccgtgctgcaaagcagcggcctgtactctctgagcagcgtggtcacagtgcctagctctagcctgggcacccagacctacatctgcaatgtgaaccacaagcctagcaacaccaaggtggacaagagagtggaacccaagagctgtgaagtgaaaaccgactccaccgaccacgtgaagcccaaagagacagagaacaccaagcagcccagcaagagctgccacaagcccaaggccatcgtgcacaccgagaaagtgaacatgatgagcctgaccgtgctgggcctgcggatgctgttcgccaaaaccgtggccgtgaacttcctgctgaccgccaagctgttcttcctc

SEQ ID NO: 5379 - DNA, 3099 bp, Artificial Sequence
  Synthetic Polynucloetide
atggccttaccagtgaccgccttgctcctgccgctggccttgctgctccacgccgccaggccggaggttcagctgcttgagtctggcggaggactggttcaacctggcggaagcctgagactgtcttgtgccgccagcggcttcacctttagcagctacgccatgagctgggtccgacaggctcctggcaaaggactggaatgggtgtccagcatcagcggcagcggcgactacatctactacgccgatagcgtgaagggcagattcaccatcagccgggacatcagcaagaacaccctgtacctccagatgaacagcctgagagccgaggacaccgccgtgtactactgtgccaaagaaggcaccggcgctaacagcagcctggccgattatagaggccagggcacactggtcaccgtgtctagtggcggaggaagcggcggaggatctgaagttcagctgcttgagtctggcggaggactggttcaacctggcggaagcctgagactgtcttgtgccgccagcggcttcatcttcagcagctacgccatgagctgggtccgacaggctcctggaaagggccaagaatgggtttccggcgttagcggcacaggcgtgaacacctactacgccgatagcgtgaagggcagattcaccatcagccgggacaacagcaagaacaccctgtacctccagatgaacagcctgagagccgaggacaccgccgtgtactattgtgcctctggcaaaggctgggacagcggctcttggtacgaggactatagaggccagggcaccctggtcacagtttcttcaggtaccggcggaggcggatctggcggcggaggtagcggtggcggaggatctgaattcgacatccagatgacacagagccctagcagcctgtctgccagcgtgggagacagagtgaccatcacatgcaaggccagcgaccacatcaacaactggctggcctggtatcagcagaagcctggacaggcccctaagctgctgatctacggcgctaccacactggaaacaggcgtgcccagcagattttctggcagcggctctggcaccgactacaccctgacaatatccagcctccagcctgaggacttcgccacctactactgtcagcagagctggaacaccccttggacattcggccagggcaccaagctggaaatcaagagactcgagggacagcctaaggccaatcctaccgtgacactgttccctccaagcagcgaagaactccaggccaacaaggccacacttgtgtgcctgatctccgacttctaccctggggctgtgacagtggcttggaaggccgatggatctcctgtgaaagccggcgtggaaaccaccaagccatccaagcagagcaacaacaaatacgccgccagctcctacctgagcctgacacctgagcagtggaagtcccacagatcctacagctgccaagtgacccacgaaggcagcaccgtggaaaagacagtggcccctacagagtgcagcggcagagccgattgcggcatcaccagcgccagctaccaccagggcgtgctgagcgccaccatcctgtacgagatcctgctgggcaaggccaccctgtacgccgtgctggtgtctgccctggtgctgatggctatggtcaagcggaaggacagccggggaagggccaagcgatctggatctggagcaacaaacttctcactactcaaacaagcaggtgacgtggaggagaatcccgggcctactagtatggactggatttggcgcatccttttccttgtcggcgctgctaccggcgcccattccgggccccaggttcagctgcaagagtctggcggaggacttgctcaagctggcggaagcctgagactgtcttgtgccgcctctggcagaaccttcagcatgggctggtttagacaggcccctggcaaagagagagagttcgtcgccgccatcacatacagcggcggcagcccttactacgcctcttctgtcagaggccggttcaccatcagccgggacaacgccaagaacaccgtgtacctccagatgaacagcctgaagccagaggacaccgccgtgtactactgtgccgccaatccaacctacggcagcgactggaatgccgagaattggggccagggcacccaagtgacagtgtctagtggatccggcggcggaggatctggcggaggcggatctgggggcggaggctctttcgaacaagttcagcttcaacagcctggcgctgagctggtcaaacctggcgcttctgtgaagatgagctgcaaagccagcggctacgccttcagcagctactggatcaactggatgaagcagaaacccggccagggactcgaatggatcggccaaatctatcccggcgacggcgacaccaactacaacggcaagttcaagggcagagccacactgaccgccgatacctctagcagcacagcctacatgcagctgagcagcctgaccagcgaagatagcgccgtgtacttctgtgcccggtccatcacaacagtcgtgggctgcgctatggactattggggccagggaacaagcgtgaccgtgtctagtacgcgtgcctctacaaagggaccctccgtgtttcctctggctcccagcagcaagtctacaagcggaggaacagccgctctgggctgcctggtcaaggattactttcccgagcctgtgaccgtgtcctggaatagcggagcactgacaagcggcgtgcacacctttccagccgtgctgcaaagcagcggcctgtactctctgagcagcgtggtcacagtgcctagctctagcctgggcacccagacctacatctgcaatgtgaaccacaagcctagcaacaccaaggtggacaagagagtggaacccaagagctgtatccccgaggacacattcttcccaagcagcgacgtgccctgcgacgtgaagctggtggaaaagagcttcgagacagacaccaacctgaacttccagaacctgagcgtgatcggcttcagaatcctgctgctgaaagtggccggctttaacctgctgatgaccctgcggctgtggtccagc

SEQ ID NO: 5380 - DNA, 3099 bp, Artificial Sequence
  Synthetic Polynucloetide
atggccttaccagtgaccgccttgctcctgccgctggccttgctgctccacgccgccaggccggaggttcagctgcttgagtctggcggaggactggttcaacctggcggaagcctgagactgtcttgtgccgccagcggcttcacctttagcagctacgccatgagctgggtccgacaggctcctggcaaaggactggaatgggtgtccagcatcagcggcagcggcgactacatctactacgccgatagcgtgaagggcagattcaccatcagccgggacatcagcaagaacaccctgtacctccagatgaacagcctgagagccgaggacaccgccgtgtactactgtgccaaagaaggcaccggcgctaacagcagcctggccgattatagaggccagggcacactggtcaccgtgtctagtggcggaggaagcggcggaggatctgaagttcagctgcttgagtctggcggaggactggttcaacctggcggaagcctgagactgtcttgtgccgccagcggcttcatcttcagcagctacgccatgagctgggtccgacaggctcctggaaagggccaagaatgggtttccggcgttagcggcacaggcgtgaacacctactacgccgatagcgtgaagggcagattcaccatcagccgggacaacagcaagaacaccctgtacctccagatgaacagcctgagagccgaggacaccgccgtgtactattgtgcctctggcaaaggctgggacagcggctcttggtacgaggactatagaggccagggcaccctggtcacagtttcttcaggtaccggcggaggcggatctggcggcggaggtagcggtggcggaggatctgaattcgacatccagatgacacagagccctagcagcctgtctgccagcgtgggagacagagtgaccatcacatgcaaggccagcgaccacatcaacaactggctggcctggtatcagcagaagcctggacaggcccctaagctgctgatctacggcgctaccacactggaaacaggcgtgcccagcagattttctggcagcggctctggcaccgactacaccctgacaatatccagcctccagcctgaggacttcgccacctactactgtcagcagagctggaacaccccttggacattcggccagggcaccaagctggaaatcaagagactcgagggacagcctaaggccaatcctaccgtgacactgttccctccaagcagcgaagaactccaggccaacaaggccacacttgtgtgcctgatctccgacttctaccctggggctgtgacagtggcttggaaggccgatggatctcctgtgaaagccggcgtggaaaccaccaagccatccaagcagagcaacaacaaatacgccgccagctcctacctgagcctgacacctgagcagtggaagtcccacagatcctacagctgccaagtgacccacgaaggcagcaccgtggaaaagacagtggcccctacagagtgcagcggcagagccgattgcggctttaccagcgagagctaccagcagggcgtgctgagcgccaccatcctgtacgagatcctgctgggcaaggccaccctgtacgccgtgctggtgtctgccctggtgctgatggctatggtcaagcggaaggacagccggggaagggccaagcgatctggatctggagcaacaaacttctcactactcaaacaagcaggtgacgtggaggagaatcccgggcctactagtatggactggatttggcgcatccttttccttgtcggcgctgctaccggcgcccattccgggccccaggttcagctgcaagagtctggcggaggacttgctcaagctggcggaagcctgagactgtcttgtgccgcctctggcagaaccttcagcatgggctggtttagacaggcccctggcaaagagagagagttcgtcgccgccatcacatacagcggcggcagcccttactacgcctcttctgtcagaggccggttcaccatcagccgggacaacgccaagaacaccgtgtacctccagatgaacagcctgaagccagaggacaccgccgtgtactactgtgccgccaatccaacctacggcagcgactggaatgccgagaattggggccagggcacccaagtgacagtgtctagtggatccggcggcggaggatctggcggaggcggatctgggggcggaggctctttcgaacaagttcagcttcaacagcctggcgctgagctggtcaaacctggcgcttctgtgaagatgagctgcaaagccagcggctacgccttcagcagctactggatcaactggatgaagcagaaacccggccagggactcgaatggatcggccaaatctatcccggcgacggcgacaccaactacaacggcaagttcaagggcagagccacactgaccgccgatacctctagcagcacagcctacatgcagctgagcagcctgaccagcgaagatagcgccgtgtacttctgtgcccggtccatcacaacagtcgtgggctgcgctatggactattggggccagggaacaagcgtgaccgtgtctagtacgcgtgcctctacaaagggaccctccgtgtttcctctggctcccagcagcaagtctacaagcggaggaacagccgctctgggctgcctggtcaaggattactttcccgagcctgtgaccgtgtcctggaatagcggagcactgacaagcggcgtgcacacctttccagccgtgctgcaaagcagcggcctgtactctctgagcagcgtggtcacagtgcctagctctagcctgggcacccagacctacatctgcaatgtgaaccacaagcctagcaacaccaaggtggacaagagagtggaacccaagagctgtatccccgaggacacattcttcccaagccccgagagcagctgcgacgtgaagctggtggaaaagagcttcgagacagacaccaacctgaacttccagaacctgagcgtgatcggcttcagaatcctgctgctgaaagtggccggctttaacctgctgatgaccctgcggctgtggtccagc

SEQ ID NO: 5381 - DNA, 3000 bp, Artificial Sequence
  Synthetic Polynucloetide
atggccttaccagtgaccgccttgctcctgccgctggccttgctgctccacgccgccaggccggaggttcagctgcttgagtctggcggaggactggttcaacctggcggaagcctgagactgtcttgtgccgccagcggcttcacctttagcagctacgccatgagctgggtccgacaggctcctggcaaaggactggaatgggtgtccagcatcagcggcagcggcgactacatctactacgccgatagcgtgaagggcagattcaccatcagccgggacatcagcaagaacaccctgtacctccagatgaacagcctgagagccgaggacaccgccgtgtactactgtgccaaagaaggcaccggcgctaacagcagcctggccgattatagaggccagggcacactggtcaccgtgtctagtggcggaggaagcggcggaggatctgaagttcagctgcttgagtctggcggaggactggttcaacctggcggaagcctgagactgtcttgtgccgccagcggcttcatcttcagcagctacgccatgagctgggtccgacaggctcctggaaagggccaagaatgggtttccggcgttagcggcacaggcgtgaacacctactacgccgatagcgtgaagggcagattcaccatcagccgggacaacagcaagaacaccctgtacctccagatgaacagcctgagagccgaggacaccgccgtgtactattgtgcctctggcaaaggctgggacagcggctcttggtacgaggactatagaggccagggcaccctggtcacagtttcttcactcgagggacagcctaaggccaatcctaccgtgacactgttccctccaagcagcgaagaactccaggccaacaaggccacacttgtgtgcctgatctccgacttctaccctggggctgtgacagtggcttggaaggccgatggatctcctgtgaaagccggcgtggaaaccaccaagccatccaagcagagcaacaacaaatacgccgccagctcctacctgagcctgacacctgagcagtggaagtcccacagatcctacagctgccaagtgacccacgaaggcagcaccgtggaaaagacagtggcccctacagagtgcagcggcagagccgattgcggctttaccagcgagagctaccagcagggcgtgctgagcgccaccatcctgtacgagatcctgctgggcaaggccaccctgtacgccgtgctggtgtctgccctggtgctgatggctatggtcaagcggaaggacagccggggaagggccaagcgatctggatctggagcaacaaacttctcactactcaaacaagcaggtgacgtggaggagaatcccgggcctactagtatggactggatttggcgcatccttttccttgtcggcgctgctaccggcgcgcattccgggccccaggttcagctgcaagagtctggcggaggacttgctcaagctggcggaagcctgagactgtcttgtgccgcctctggcagaaccttcagcatgggctggtttagacaggcccctggcaaagagagagagttcgtcgccgccatcacatacagcggcggcagcccttactacgcctcttctgtcagaggccggttcaccatcagccgggacaacgccaagaacaccgtgtacctccagatgaacagcctgaagccagaggacaccgccgtgtactactgtgccgccaatccaacctacggcagcgactggaatgccgagaattggggccagggcacccaagtgacagtgtctagtacgcgtgcctctacaaagggaccctccgtgtttcctctggctcccagcagcaagtctacaagcggaggaacagccgctctgggctgcctggtcaaggattactttcccgagcctgtgaccgtgtcctggaatagcggagcactgacaagcggcgtgcacacctttccagccgtgctgcaaagcagcggcctgtactctctgagcagcgtggtcacagtgcctagctctagcctgggcacccagacctacatctgcaatgtgaaccacaagcctagcaacaccaaggtggacaagagagtggaacccaagagctgtatccccgaggacacattcttcccaagccccgagagcagctgcgacgtgaagctggtggaaaagagcttcgagacagacaccaacctgaacttccagaacctgagcgtgatcggcttcagaatcctgctgctgaaagtggccggctttaacctgctgatgaccctgcggctgtggtccagccgcgccaagagaagcggatctggcgtgaagcagaccctgaatttcgacctgctgaagctggctggcgacgtggaatccaacccaggcccttctagaggccatatgaccgagtacaagcccacggtgcgcctcgccacccgcgacgacgtccccagggccgtacgcaccctcgccgccgcgttcgccgactaccccgccacgcgccacaccgtcgatccggaccgccacatcgagcgggtcaccgagctgcaagaactcttcctcacgcgcgtcgggctcgacatcggcaaggtgtgggtcgcggacgacggcgccgcggtggcggtctggaccacgccggagagcgtcgaagcgggggcggtgttcgccgagatcggcccgcgcatggccgagttgagcggttcccggctggccgcgcagcaacagatggaaggcctcctggcgccgcaccggcccaaggagcccgcgtggttcctggccaccgtcggcgtctcgcccgaccaccagggcaagggtctgggcagcgccgtcgtgctccccggagtggaggcggccgagcgcgccggggtgcccgccttcctggagacctccgcgccccgcaacctccccttctacgagcggctcggcttcaccgtcaccgccgacgtcgaggtgcccgaaggaccgcgcacctggtgcatgacccgcaagcccggtgcctga

SEQ ID NO: 5382 - DNA, 2298 bp, Artificial Sequence
  Synthetic Polynucloetide
atggccttaccagtgaccgccttgctcctgccgctggccttgctgctccacgccgccaggccggaggttcagctgcttgagtctggcggaggactggttcaacctggcggaagcctgagactgtcttgtgccgccagcggcttcacctttagcagctacgccatgagctgggtccgacaggctcctggcaaaggactggaatgggtgtccagcatcagcggcagcggcgactacatctactacgccgatagcgtgaagggcagattcaccatcagccgggacatcagcaagaacaccctgtacctccagatgaacagcctgagagccgaggacaccgccgtgtactactgtgccaaagaaggcaccggcgctaacagcagcctggccgattatagaggccagggcacactggtcaccgtgtctagtggcggaggaagcggcggaggatctgaagttcagctgcttgagtctggcggaggactggttcaacctggcggaagcctgagactgtcttgtgccgccagcggcttcatcttcagcagctacgccatgagctgggtccgacaggctcctggaaagggccaagaatgggtttccggcgttagcggcacaggcgtgaacacctactacgccgatagcgtgaagggcagattcaccatcagccgggacaacagcaagaacaccctgtacctccagatgaacagcctgagagccgaggacaccgccgtgtactattgtgcctctggcaaaggctgggacagcggctcttggtacgaggactatagaggccagggcaccctggtcacagtttcttcactcgagggacagcctaaggccaatcctaccgtgacactgttccctccaagcagcgaagaactccaggccaacaaggccacacttgtgtgcctgatctccgacttctaccctggggctgtgacagtggcttggaaggccgatggatctcctgtgaaagccggcgtggaaaccaccaagccatccaagcagagcaacaacaaatacgccgccagctcctacctgagcctgacacctgagcagtggaagtcccacagatcctacagctgccaagtgacccacgaaggcagcaccgtggaaaagacagtggcccctacagagtgcagcggcagagccgattgcggctttaccagcgagagctaccagcagggcgtgctgagcgccaccatcctgtacgagatcctgctgggcaaggccaccctgtacgccgtgctggtgtctgccctggtgctgatggctatggtcaagcggaaggacagccggggaagggccaagcgatctggatctggagcaacaaacttctcactactcaaacaagcaggtgacgtggaggagaatcccgggcctactagtatggactggatttggcgcatccttttccttgtcggcgctgctaccggcgcgcattccgggccccaggttcagctgcaagagtctggcggaggacttgctcaagctggcggaagcctgagactgtcttgtgccgcctctggcagaaccttcagcatgggctggtttagacaggcccctggcaaagagagagagttcgtcgccgccatcacatacagcggcggcagcccttactacgcctcttctgtcagaggccggttcaccatcagccgggacaacgccaagaacaccgtgtacctccagatgaacagcctgaagccagaggacaccgccgtgtactactgtgccgccaatccaacctacggcagcgactggaatgccgagaattggggccagggcacccaagtgacagtgtctagtacgcgtgcctctacaaagggaccctccgtgtttcctctggctcccagcagcaagtctacaagcggaggaacagccgctctgggctgcctggtcaaggattactttcccgagcctgtgaccgtgtcctggaatagcggagcactgacaagcggcgtgcacacctttccagccgtgctgcaaagcagcggcctgtactctctgagcagcgtggtcacagtgcctagctctagcctgggcacccagacctacatctgcaatgtgaaccacaagcctagcaacaccaaggtggacaagagagtggaacccaagagctgtatccccgaggacacattcttcccaagccccgagagcagctgcgacgtgaagctggtggaaaagagcttcgagacagacaccaacctgaacttccagaacctgagcgtgatcggcttcagaatcctgctgctgaaagtggccggctttaacctgctgatgaccctgcggctgtggtccagc

SEQ ID NO: 5383 - DNA, 2385 bp, Artificial Sequence
  Synthetic Polynucloetide
atggccttaccagtgaccgccttgctcctgccgctggccttgctgctccacgccgccaggccggaggttcagctgcttgagtctggcggaggactggttcaacctggcggaagcctgagactgtcttgtgccgccagcggcttcacctttagcagctacgccatgagctgggtccgacaggctcctggcaaaggactggaatgggtgtccagcatcagcggcagcggcgactacatctactacgccgatagcgtgaagggcagattcaccatcagccgggacatcagcaagaacaccctgtacctccagatgaacagcctgagagccgaggacaccgccgtgtactactgtgccaaagaaggcaccggcgctaacagcagcctggccgattatagaggccagggcacactggtcaccgtgtctagtggcggaggaagcggcggaggatctgaagttcagctgcttgagtctggcggaggactggttcaacctggcggaagcctgagactgtcttgtgccgccagcggcttcatcttcagcagctacgccatgagctgggtccgacaggctcctggaaagggccaagaatgggtttccggcgttagcggcacaggcgtgaacacctactacgccgatagcgtgaagggcagattcaccatcagccgggacaacagcaagaacaccctgtacctccagatgaacagcctgagagccgaggacaccgccgtgtactattgtgcctctggcaaaggctgggacagcggctcttggtacgaggactatagaggccagggcaccctggtcacagtttcttcactcgagggatctggcagagccgattgcggctttaccagcgagagctaccagcagggcgtgctgagcgccaccatcctgtacgagatcctgctgggcaaggccaccctgtacgccgtgctggtgtctgccctggtgctgatggctatggtcaagcggaaggacagccggggaagggccaagcgatctggatctggagcaacaaacttctcactactcaaacaagcaggtgacgtggaggagaatcccgggcctactagtatggactggatttggcgcatccttttccttgtcggcgctgctaccggcgcgcattccgggccccaggttcagctgcaagagtctggcggaggacttgctcaagctggcggaagcctgagactgtcttgtgccgcctctggcagaaccttcagcatgggctggtttagacaggcccctggcaaagagagagagttcgtcgccgccatcacatacagcggcggcagcccttactacgcctcttctgtcagaggccggttcaccatcagccgggacaacgccaagaacaccgtgtacctccagatgaacagcctgaagccagaggacaccgccgtgtactactgtgccgccaatccaacctacggcagcgactggaatgccgagaattggggccagggcacccaagtgacagtgtctagtacgcgtggcagcatccccgaggacacattcttcccaagccccgagagcagctgcgacgtgaagctggtggaaaagagcttcgagacagacaccaacctgaacttccagaacctgagcgtgatcggcttcagaatcctgctgctgaaagtggccggctttaacctgctgatgaccctgcggctgtggtccagccgcgccaagagaagcggatctggcgtgaagcagaccctgaatttcgacctgctgaagctggctggcgacgtggaatccaacccaggcccttctagaggccatatgaccgagtacaagcccacggtgcgcctcgccacccgcgacgacgtccccagggccgtacgcaccctcgccgccgcgttcgccgactaccccgccacgcgccacaccgtcgatccggaccgccacatcgagcgggtcaccgagctgcaagaactcttcctcacgcgcgtcgggctcgacatcggcaaggtgtgggtcgcggacgacggcgccgcggtggcggtctggaccacgccggagagcgtcgaagcgggggcggtgttcgccgagatcggcccgcgcatggccgagttgagcggttcccggctggccgcgcagcaacagatggaaggcctcctggcgccgcaccggcccaaggagcccgcgtggttcctggccaccgtcggcgtctcgcccgaccaccagggcaagggtctgggcagcgccgtcgtgctccccggagtggaggcggccgagcgcgccggggtgcccgccttcctggagacctccgcgccccgcaacctccccttctacgagcggctcggcttcaccgtcaccgccgacgtcgaggtgcccgaaggaccgcgcacctggtgcatgacccgcaagcccggtgcctga

SEQ ID NO: 5384 - DNA, 1683 bp, Artificial Sequence
  Synthetic Polynucloetide
atggccttaccagtgaccgccttgctcctgccgctggccttgctgctccacgccgccaggccggaggttcagctgcttgagtctggcggaggactggttcaacctggcggaagcctgagactgtcttgtgccgccagcggcttcacctttagcagctacgccatgagctgggtccgacaggctcctggcaaaggactggaatgggtgtccagcatcagcggcagcggcgactacatctactacgccgatagcgtgaagggcagattcaccatcagccgggacatcagcaagaacaccctgtacctccagatgaacagcctgagagccgaggacaccgccgtgtactactgtgccaaagaaggcaccggcgctaacagcagcctggccgattatagaggccagggcacactggtcaccgtgtctagtggcggaggaagcggcggaggatctgaagttcagctgcttgagtctggcggaggactggttcaacctggcggaagcctgagactgtcttgtgccgccagcggcttcatcttcagcagctacgccatgagctgggtccgacaggctcctggaaagggccaagaatgggtttccggcgttagcggcacaggcgtgaacacctactacgccgatagcgtgaagggcagattcaccatcagccgggacaacagcaagaacaccctgtacctccagatgaacagcctgagagccgaggacaccgccgtgtactattgtgcctctggcaaaggctgggacagcggctcttggtacgaggactatagaggccagggcaccctggtcacagtttcttcactcgagggatctggcagagccgattgcggctttaccagcgagagctaccagcagggcgtgctgagcgccaccatcctgtacgagatcctgctgggcaaggccaccctgtacgccgtgctggtgtctgccctggtgctgatggctatggtcaagcggaaggacagccggggaagggccaagcgatctggatctggagcaacaaacttctcactactcaaacaagcaggtgacgtggaggagaatcccgggcctactagtatggactggatttggcgcatccttttccttgtcggcgctgctaccggcgcgcattccgggccccaggttcagctgcaagagtctggcggaggacttgctcaagctggcggaagcctgagactgtcttgtgccgcctctggcagaaccttcagcatgggctggtttagacaggcccctggcaaagagagagagttcgtcgccgccatcacatacagcggcggcagcccttactacgcctcttctgtcagaggccggttcaccatcagccgggacaacgccaagaacaccgtgtacctccagatgaacagcctgaagccagaggacaccgccgtgtactactgtgccgccaatccaacctacggcagcgactggaatgccgagaattggggccagggcacccaagtgacagtgtctagtacgcgtggcagcatccccgaggacacattcttcccaagccccgagagcagctgcgacgtgaagctggtggaaaagagcttcgagacagacaccaacctgaacttccagaacctgagcgtgatcggcttcagaatcctgctgctgaaagtggccggctttaacctgctgatgaccctgcggctgtggtccagc

SEQ ID NO: 5385 - DNA, 2412 bp, Artificial Sequence
  Synthetic Polynucloetide
atggccttaccagtgaccgccttgctcctgccgctggccttgctgctccacgccgccaggccggaggttcagctgcttgagtctggcggaggactggttcaacctggcggaagcctgagactgtcttgtgccgccagcggcttcacctttagcagctacgccatgagctgggtccgacaggctcctggcaaaggactggaatgggtgtccagcatcagcggcagcggcgactacatctactacgccgatagcgtgaagggcagattcaccatcagccgggacatcagcaagaacaccctgtacctccagatgaacagcctgagagccgaggacaccgccgtgtactactgtgccaaagaaggcaccggcgctaacagcagcctggccgattatagaggccagggcacactggtcaccgtgtctagtggcggaggaagcggcggaggatctgaagttcagctgcttgagtctggcggaggactggttcaacctggcggaagcctgagactgtcttgtgccgccagcggcttcatcttcagcagctacgccatgagctgggtccgacaggctcctggaaagggccaagaatgggtttccggcgttagcggcacaggcgtgaacacctactacgccgatagcgtgaagggcagattcaccatcagccgggacaacagcaagaacaccctgtacctccagatgaacagcctgagagccgaggacaccgccgtgtactattgtgcctctggcaaaggctgggacagcggctcttggtacgaggactatagaggccagggcaccctggtcacagtttcttcactcgaggacaaaactcacacatgcccaccgtgcccagcaggcagagccgattgcggctttaccagcgagagctaccagcagggcgtgctgagcgccaccatcctgtacgagatcctgctgggcaaggccaccctgtacgccgtgctggtgtctgccctggtgctgatggctatggtcaagcggaaggacagccggggaagggccaagcgatctggatctggagcaacaaacttctcactactcaaacaagcaggtgacgtggaggagaatcccgggcctactagtatggactggatttggcgcatccttttccttgtcggcgctgctaccggcgcgcattccgggccccaggttcagctgcaagagtctggcggaggacttgctcaagctggcggaagcctgagactgtcttgtgccgcctctggcagaaccttcagcatgggctggtttagacaggcccctggcaaagagagagagttcgtcgccgccatcacatacagcggcggcagcccttactacgcctcttctgtcagaggccggttcaccatcagccgggacaacgccaagaacaccgtgtacctccagatgaacagcctgaagccagaggacaccgccgtgtactactgtgccgccaatccaacctacggcagcgactggaatgccgagaattggggccagggcacccaagtgacagtgtctagtacgcgtggcagcatccccgaggacacattcttcccaagccccgagagcagctgcgacgtgaagctggtggaaaagagcttcgagacagacaccaacctgaacttccagaacctgagcgtgatcggcttcagaatcctgctgctgaaagtggccggctttaacctgctgatgaccctgcggctgtggtccagccgcgccaagagaagcggatctggcgtgaagcagaccctgaatttcgacctgctgaagctggctggcgacgtggaatccaacccaggcccttctagaggccatatgaccgagtacaagcccacggtgcgcctcgccacccgcgacgacgtccccagggccgtacgcaccctcgccgccgcgttcgccgactaccccgccacgcgccacaccgtcgatccggaccgccacatcgagcgggtcaccgagctgcaagaactcttcctcacgcgcgtcgggctcgacatcggcaaggtgtgggtcgcggacgacggcgccgcggtggcggtctggaccacgccggagagcgtcgaagcgggggcggtgttcgccgagatcggcccgcgcatggccgagttgagcggttcccggctggccgcgcagcaacagatggaaggcctcctggcgccgcaccggcccaaggagcccgcgtggttcctggccaccgtcggcgtctcgcccgaccaccagggcaagggtctgggcagcgccgtcgtgctccccggagtggaggcggccgagcgcgccggggtgcccgccttcctggagacctccgcgccccgcaacctccccttctacgagcggctcggcttcaccgtcaccgccgacgtcgaggtgcccgaaggaccgcgcacctggtgcatgacccgcaagcccggtgcctga

SEQ ID NO: 5386 - DNA, 2412 bp, Artificial Sequence
  Synthetic Polynucloetide
atggccttaccagtgaccgccttgctcctgccgctggccttgctgctccacgccgccaggccggaggttcagctgcttgagtctggcggaggactggttcaacctggcggaagcctgagactgtcttgtgccgccagcggcttcacctttagcagctacgccatgagctgggtccgacaggctcctggcaaaggactggaatgggtgtccagcatcagcggcagcggcgactacatctactacgccgatagcgtgaagggcagattcaccatcagccgggacatcagcaagaacaccctgtacctccagatgaacagcctgagagccgaggacaccgccgtgtactactgtgccaaagaaggcaccggcgctaacagcagcctggccgattatagaggccagggcacactggtcaccgtgtctagtggcggaggaagcggcggaggatctgaagttcagctgcttgagtctggcggaggactggttcaacctggcggaagcctgagactgtcttgtgccgccagcggcttcatcttcagcagctacgccatgagctgggtccgacaggctcctggaaagggccaagaatgggtttccggcgttagcggcacaggcgtgaacacctactacgccgatagcgtgaagggcagattcaccatcagccgggacaacagcaagaacaccctgtacctccagatgaacagcctgagagccgaggacaccgccgtgtactattgtgcctctggcaaaggctgggacagcggctcttggtacgaggactatagaggccagggcaccctggtcacagtttcttcactcgagggatctggcagagccgattgcggctttaccagcgagagctaccagcagggcgtgctgagcgccaccatcctgtacgagatcctgctgggcaaggccaccctgtacgccgtgctggtgtctgccctggtgctgatggctatggtcaagcggaaggacagccggggaagggccaagcgatctggatctggagcaacaaacttctcactactcaaacaagcaggtgacgtggaggagaatcccgggcctactagtatggactggatttggcgcatccttttccttgtcggcgctgctaccggcgcgcattccgggccccaggttcagctgcaagagtctggcggaggacttgctcaagctggcggaagcctgagactgtcttgtgccgcctctggcagaaccttcagcatgggctggtttagacaggcccctggcaaagagagagagttcgtcgccgccatcacatacagcggcggcagcccttactacgcctcttctgtcagaggccggttcaccatcagccgggacaacgccaagaacaccgtgtacctccagatgaacagcctgaagccagaggacaccgccgtgtactactgtgccgccaatccaacctacggcagcgactggaatgccgagaattggggccagggcacccaagtgacagtgtctagtacgcgtgataaaactcatacctgtccgccatgcccggcaatccccgaggacacattcttcccaagccccgagagcagctgcgacgtgaagctggtggaaaagagcttcgagacagacaccaacctgaacttccagaacctgagcgtgatcggcttcagaatcctgctgctgaaagtggccggctttaacctgctgatgaccctgcggctgtggtccagccgcgccaagagaagcggatctggcgtgaagcagaccctgaatttcgacctgctgaagctggctggcgacgtggaatccaacccaggcccttctagaggccatatgaccgagtacaagcccacggtgcgcctcgccacccgcgacgacgtccccagggccgtacgcaccctcgccgccgcgttcgccgactaccccgccacgcgccacaccgtcgatccggaccgccacatcgagcgggtcaccgagctgcaagaactcttcctcacgcgcgtcgggctcgacatcggcaaggtgtgggtcgcggacgacggcgccgcggtggcggtctggaccacgccggagagcgtcgaagcgggggcggtgttcgccgagatcggcccgcgcatggccgagttgagcggttcccggctggccgcgcagcaacagatggaaggcctcctggcgccgcaccggcccaaggagcccgcgtggttcctggccaccgtcggcgtctcgcccgaccaccagggcaagggtctgggcagcgccgtcgtgctccccggagtggaggcggccgagcgcgccggggtgcccgccttcctggagacctccgcgccccgcaacctccccttctacgagcggctcggcttcaccgtcaccgccgacgtcgaggtgcccgaaggaccgcgcacctggtgcatgacccgcaagcccggtgcctga

SEQ ID NO: 5387 - DNA, 2439 bp, Artificial Sequence
  Synthetic Polynucloetide
atggccttaccagtgaccgccttgctcctgccgctggccttgctgctccacgccgccaggccggaggttcagctgcttgagtctggcggaggactggttcaacctggcggaagcctgagactgtcttgtgccgccagcggcttcacctttagcagctacgccatgagctgggtccgacaggctcctggcaaaggactggaatgggtgtccagcatcagcggcagcggcgactacatctactacgccgatagcgtgaagggcagattcaccatcagccgggacatcagcaagaacaccctgtacctccagatgaacagcctgagagccgaggacaccgccgtgtactactgtgccaaagaaggcaccggcgctaacagcagcctggccgattatagaggccagggcacactggtcaccgtgtctagtggcggaggaagcggcggaggatctgaagttcagctgcttgagtctggcggaggactggttcaacctggcggaagcctgagactgtcttgtgccgccagcggcttcatcttcagcagctacgccatgagctgggtccgacaggctcctggaaagggccaagaatgggtttccggcgttagcggcacaggcgtgaacacctactacgccgatagcgtgaagggcagattcaccatcagccgggacaacagcaagaacaccctgtacctccagatgaacagcctgagagccgaggacaccgccgtgtactattgtgcctctggcaaaggctgggacagcggctcttggtacgaggactatagaggccagggcaccctggtcacagtttcttcactcgaggacaaaactcacacatgcccaccgtgcccagcaggcagagccgattgcggctttaccagcgagagctaccagcagggcgtgctgagcgccaccatcctgtacgagatcctgctgggcaaggccaccctgtacgccgtgctggtgtctgccctggtgctgatggctatggtcaagcggaaggacagccggggaagggccaagcgatctggatctggagcaacaaacttctcactactcaaacaagcaggtgacgtggaggagaatcccgggcctactagtatggactggatttggcgcatccttttccttgtcggcgctgctaccggcgcgcattccgggccccaggttcagctgcaagagtctggcggaggacttgctcaagctggcggaagcctgagactgtcttgtgccgcctctggcagaaccttcagcatgggctggtttagacaggcccctggcaaagagagagagttcgtcgccgccatcacatacagcggcggcagcccttactacgcctcttctgtcagaggccggttcaccatcagccgggacaacgccaagaacaccgtgtacctccagatgaacagcctgaagccagaggacaccgccgtgtactactgtgccgccaatccaacctacggcagcgactggaatgccgagaattggggccagggcacccaagtgacagtgtctagtacgcgtgataaaactcatacctgtccgccatgcccggcaatccccgaggacacattcttcccaagccccgagagcagctgcgacgtgaagctggtggaaaagagcttcgagacagacaccaacctgaacttccagaacctgagcgtgatcggcttcagaatcctgctgctgaaagtggccggctttaacctgctgatgaccctgcggctgtggtccagccgcgccaagagaagcggatctggcgtgaagcagaccctgaatttcgacctgctgaagctggctggcgacgtggaatccaacccaggcccttctagaggccatatgaccgagtacaagcccacggtgcgcctcgccacccgcgacgacgtccccagggccgtacgcaccctcgccgccgcgttcgccgactaccccgccacgcgccacaccgtcgatccggaccgccacatcgagcgggtcaccgagctgcaagaactcttcctcacgcgcgtcgggctcgacatcggcaaggtgtgggtcgcggacgacggcgccgcggtggcggtctggaccacgccggagagcgtcgaagcgggggcggtgttcgccgagatcggcccgcgcatggccgagttgagcggttcccggctggccgcgcagcaacagatggaaggcctcctggcgccgcaccggcccaaggagcccgcgtggttcctggccaccgtcggcgtctcgcccgaccaccagggcaagggtctgggcagcgccgtcgtgctccccggagtggaggcggccgagcgcgccggggtgcccgccttcctggagacctccgcgccccgcaacctccccttctacgagcggctcggcttcaccgtcaccgccgacgtcgaggtgcccgaaggaccgcgcacctggtgcatgacccgcaagcccggtgcctga

SEQ ID NO: 5388 - DNA, 1737 bp, Artificial Sequence
  Synthetic Polynucloetide
atggccttaccagtgaccgccttgctcctgccgctggccttgctgctccacgccgccaggccggaggttcagctgcttgagtctggcggaggactggttcaacctggcggaagcctgagactgtcttgtgccgccagcggcttcacctttagcagctacgccatgagctgggtccgacaggctcctggcaaaggactggaatgggtgtccagcatcagcggcagcggcgactacatctactacgccgatagcgtgaagggcagattcaccatcagccgggacatcagcaagaacaccctgtacctccagatgaacagcctgagagccgaggacaccgccgtgtactactgtgccaaagaaggcaccggcgctaacagcagcctggccgattatagaggccagggcacactggtcaccgtgtctagtggcggaggaagcggcggaggatctgaagttcagctgcttgagtctggcggaggactggttcaacctggcggaagcctgagactgtcttgtgccgccagcggcttcatcttcagcagctacgccatgagctgggtccgacaggctcctggaaagggccaagaatgggtttccggcgttagcggcacaggcgtgaacacctactacgccgatagcgtgaagggcagattcaccatcagccgggacaacagcaagaacaccctgtacctccagatgaacagcctgagagccgaggacaccgccgtgtactattgtgcctctggcaaaggctgggacagcggctcttggtacgaggactatagaggccagggcaccctggtcacagtttcttcactcgaggacaaaactcacacatgcccaccgtgcccagcaggcagagccgattgcggctttaccagcgagagctaccagcagggcgtgctgagcgccaccatcctgtacgagatcctgctgggcaaggccaccctgtacgccgtgctggtgtctgccctggtgctgatggctatggtcaagcggaaggacagccggggaagggccaagcgatctggatctggagcaacaaacttctcactactcaaacaagcaggtgacgtggaggagaatcccgggcctactagtatggactggatttggcgcatccttttccttgtcggcgctgctaccggcgcgcattccgggccccaggttcagctgcaagagtctggcggaggacttgctcaagctggcggaagcctgagactgtcttgtgccgcctctggcagaaccttcagcatgggctggtttagacaggcccctggcaaagagagagagttcgtcgccgccatcacatacagcggcggcagcccttactacgcctcttctgtcagaggccggttcaccatcagccgggacaacgccaagaacaccgtgtacctccagatgaacagcctgaagccagaggacaccgccgtgtactactgtgccgccaatccaacctacggcagcgactggaatgccgagaattggggccagggcacccaagtgacagtgtctagtacgcgtgataaaactcatacctgtccgccatgcccggcaatccccgaggacacattcttcccaagccccgagagcagctgcgacgtgaagctggtggaaaagagcttcgagacagacaccaacctgaacttccagaacctgagcgtgatcggcttcagaatcctgctgctgaaagtggccggctttaacctgctgatgaccctgcggctgtggtccagc

SEQ ID NO: 5389 - DNA, 1710 bp, Artificial Sequence
  Synthetic Polynucloetide
atggccttaccagtgaccgccttgctcctgccgctggccttgctgctccacgccgccaggccggaggttcagctgcttgagtctggcggaggactggttcaacctggcggaagcctgagactgtcttgtgccgccagcggcttcacctttagcagctacgccatgagctgggtccgacaggctcctggcaaaggactggaatgggtgtccagcatcagcggcagcggcgactacatctactacgccgatagcgtgaagggcagattcaccatcagccgggacatcagcaagaacaccctgtacctccagatgaacagcctgagagccgaggacaccgccgtgtactactgtgccaaagaaggcaccggcgctaacagcagcctggccgattatagaggccagggcacactggtcaccgtgtctagtggcggaggaagcggcggaggatctgaagttcagctgcttgagtctggcggaggactggttcaacctggcggaagcctgagactgtcttgtgccgccagcggcttcatcttcagcagctacgccatgagctgggtccgacaggctcctggaaagggccaagaatgggtttccggcgttagcggcacaggcgtgaacacctactacgccgatagcgtgaagggcagattcaccatcagccgggacaacagcaagaacaccctgtacctccagatgaacagcctgagagccgaggacaccgccgtgtactattgtgcctctggcaaaggctgggacagcggctcttggtacgaggactatagaggccagggcaccctggtcacagtttcttcactcgagggatctggcagagccgattgcggctttaccagcgagagctaccagcagggcgtgctgagcgccaccatcctgtacgagatcctgctgggcaaggccaccctgtacgccgtgctggtgtctgccctggtgctgatggctatggtcaagcggaaggacagccggggaagggccaagcgatctggatctggagcaacaaacttctcactactcaaacaagcaggtgacgtggaggagaatcccgggcctactagtatggactggatttggcgcatccttttccttgtcggcgctgctaccggcgcgcattccgggccccaggttcagctgcaagagtctggcggaggacttgctcaagctggcggaagcctgagactgtcttgtgccgcctctggcagaaccttcagcatgggctggtttagacaggcccctggcaaagagagagagttcgtcgccgccatcacatacagcggcggcagcccttactacgcctcttctgtcagaggccggttcaccatcagccgggacaacgccaagaacaccgtgtacctccagatgaacagcctgaagccagaggacaccgccgtgtactactgtgccgccaatccaacctacggcagcgactggaatgccgagaattggggccagggcacccaagtgacagtgtctagtacgcgtgataaaactcatacctgtccgccatgcccggcaatccccgaggacacattcttcccaagccccgagagcagctgcgacgtgaagctggtggaaaagagcttcgagacagacaccaacctgaacttccagaacctgagcgtgatcggcttcagaatcctgctgctgaaagtggccggctttaacctgctgatgaccctgcggctgtggtccagc

SEQ ID NO: 5390 - DNA, 3066 bp, Artificial Sequence
  Synthetic Polynucloetide
atggccttaccagtgaccgccttgctcctgccgctggccttgctgctccacgccgccaggccggaggttcagctgcttgagtctggcggaggactggttcaacctggcggaagcctgagactgtcttgtgccgccagcggcttcacctttagcagctacgccatgagctgggtccgacaggctcctggcaaaggactggaatgggtgtccagcatcagcggcagcggcgactacatctactacgccgatagcgtgaagggcagattcaccatcagccgggacatcagcaagaacaccctgtacctccagatgaacagcctgagagccgaggacaccgccgtgtactactgtgccaaagaaggcaccggcgctaacagcagcctggccgattatagaggccagggcacactggtcaccgtgtctagtggcggaggaagcggcggaggatctgaagttcagctgcttgagtctggcggaggactggttcaacctggcggaagcctgagactgtcttgtgccgccagcggcttcatcttcagcagctacgccatgagctgggtccgacaggctcctggaaagggccaagaatgggtttccggcgttagcggcacaggcgtgaacacctactacgccgatagcgtgaagggcagattcaccatcagccgggacaacagcaagaacaccctgtacctccagatgaacagcctgagagccgaggacaccgccgtgtactattgtgcctctggcaaaggctgggacagcggctcttggtacgaggactatagaggccagggcaccctggtcacagtttcttcactcgagggacagcctaaggccaatcctaccgtgacactgttccctccaagcagcgaagaactccaggccaacaaggccacacttgtgtgcctgatctccgacttctaccctggggctgtgacagtggcttggaaggccgatggatctcctgtgaaagccggcgtggaaaccaccaagccatccaagcagagcaacaacaaatacgccgccagctcctacctgagcctgacacctgagcagtggaagtcccacagatcctacagctgccaagtgacccacgaaggcagcaccgtggaaaagacagtggcccctacagagtgcagccccatcaagaccgatgtgattacaatggaccccaaggacaactgctccaaggacgccaacgataccctgctgctccagctgaccaacaccagcgcctactacatgtacttgttgctgctgctgaagtccgtggtgtacttcgccatcatcacatgctgcctgctgcggagaaccgccttctgctgcaacggcgagaagtctagggccaagcgatctggatctggagcaacaaacttctcactactcaaacaagcaggtgacgtggaggagaatcccgggcctactagtatggactggatttggcgcatccttttccttgtcggcgctgctaccggcgcgcattccgggccccaggttcagctgcaagagtctggcggaggacttgctcaagctggcggaagcctgagactgtcttgtgccgcctctggcagaaccttcagcatgggctggtttagacaggcccctggcaaagagagagagttcgtcgccgccatcacatacagcggcggcagcccttactacgcctcttctgtcagaggccggttcaccatcagccgggacaacgccaagaacaccgtgtacctccagatgaacagcctgaagccagaggacaccgccgtgtactactgtgccgccaatccaacctacggcagcgactggaatgccgagaattggggccagggcacccaagtgacagtgtctagtacgcgtgcctctacaaagggaccctccgtgtttcctctggctcccagcagcaagtctacaagcggaggaacagccgctctgggctgcctggtcaaggattactttcccgagcctgtgaccgtgtcctggaatagcggagcactgacaagcggcgtgcacacctttccagccgtgctgcaaagcagcggcctgtactctctgagcagcgtggtcacagtgcctagctctagcctgggcacccagacctacatctgcaatgtgaaccacaagcctagcaacaccaaggtggacaagagagtggaacccaagagctgtgaagtgaaaaccgactccaccgaccacgtgaagcccaaagagacagagaacaccaagcagcccagcaagagctgccacaagcccaaggccatcgtgcacaccgagaaagtgaacatgatgagcctgaccgtgctgggcctgcggatgctgttcgccaaaaccgtggccgtgaacttcctgctgaccgccaagctgttcttcctccgcgccaagagaagcggatctggcgtgaagcagaccctgaatttcgacctgctgaagctggctggcgacgtggaatccaacccaggcccttctagaggccatatgaccgagtacaagcccacggtgcgcctcgccacccgcgacgacgtccccagggccgtacgcaccctcgccgccgcgttcgccgactaccccgccacgcgccacaccgtcgatccggaccgccacatcgagcgggtcaccgagctgcaagaactcttcctcacgcgcgtcgggctcgacatcggcaaggtgtgggtcgcggacgacggcgccgcggtggcggtctggaccacgccggagagcgtcgaagcgggggcggtgttcgccgagatcggcccgcgcatggccgagttgagcggttcccggctggccgcgcagcaacagatggaaggcctcctggcgccgcaccggcccaaggagcccgcgtggttcctggccaccgtcggcgtctcgcccgaccaccagggcaagggtctgggcagcgccgtcgtgctccccggagtggaggcggccgagcgcgccggggtgcccgccttcctggagacctccgcgccccgcaacctccccttctacgagcggctcggcttcaccgtcaccgccgacgtcgaggtgcccgaaggaccgcgcacctggtgcatgacccgcaagcccggtgcctga

SEQ ID NO: 5391 - DNA, 2364 bp, Artificial Sequence
  Synthetic Polynucloetide
atggccttaccagtgaccgccttgctcctgccgctggccttgctgctccacgccgccaggccggaggttcagctgcttgagtctggcggaggactggttcaacctggcggaagcctgagactgtcttgtgccgccagcggcttcacctttagcagctacgccatgagctgggtccgacaggctcctggcaaaggactggaatgggtgtccagcatcagcggcagcggcgactacatctactacgccgatagcgtgaagggcagattcaccatcagccgggacatcagcaagaacaccctgtacctccagatgaacagcctgagagccgaggacaccgccgtgtactactgtgccaaagaaggcaccggcgctaacagcagcctggccgattatagaggccagggcacactggtcaccgtgtctagtggcggaggaagcggcggaggatctgaagttcagctgcttgagtctggcggaggactggttcaacctggcggaagcctgagactgtcttgtgccgccagcggcttcatcttcagcagctacgccatgagctgggtccgacaggctcctggaaagggccaagaatgggtttccggcgttagcggcacaggcgtgaacacctactacgccgatagcgtgaagggcagattcaccatcagccgggacaacagcaagaacaccctgtacctccagatgaacagcctgagagccgaggacaccgccgtgtactattgtgcctctggcaaaggctgggacagcggctcttggtacgaggactatagaggccagggcaccctggtcacagtttcttcactcgagggacagcctaaggccaatcctaccgtgacactgttccctccaagcagcgaagaactccaggccaacaaggccacacttgtgtgcctgatctccgacttctaccctggggctgtgacagtggcttggaaggccgatggatctcctgtgaaagccggcgtggaaaccaccaagccatccaagcagagcaacaacaaatacgccgccagctcctacctgagcctgacacctgagcagtggaagtcccacagatcctacagctgccaagtgacccacgaaggcagcaccgtggaaaagacagtggcccctacagagtgcagccccatcaagaccgatgtgattacaatggaccccaaggacaactgctccaaggacgccaacgataccctgctgctccagctgaccaacaccagcgcctactacatgtacttgttgctgctgctgaagtccgtggtgtacttcgccatcatcacatgctgcctgctgcggagaaccgccttctgctgcaacggcgagaagtctagggccaagcgatctggatctggagcaacaaacttctcactactcaaacaagcaggtgacgtggaggagaatcccgggcctactagtatggactggatttggcgcatccttttccttgtcggcgctgctaccggcgcgcattccgggccccaggttcagctgcaagagtctggcggaggacttgctcaagctggcggaagcctgagactgtcttgtgccgcctctggcagaaccttcagcatgggctggtttagacaggcccctggcaaagagagagagttcgtcgccgccatcacatacagcggcggcagcccttactacgcctcttctgtcagaggccggttcaccatcagccgggacaacgccaagaacaccgtgtacctccagatgaacagcctgaagccagaggacaccgccgtgtactactgtgccgccaatccaacctacggcagcgactggaatgccgagaattggggccagggcacccaagtgacagtgtctagtacgcgtgcctctacaaagggaccctccgtgtttcctctggctcccagcagcaagtctacaagcggaggaacagccgctctgggctgcctggtcaaggattactttcccgagcctgtgaccgtgtcctggaatagcggagcactgacaagcggcgtgcacacctttccagccgtgctgcaaagcagcggcctgtactctctgagcagcgtggtcacagtgcctagctctagcctgggcacccagacctacatctgcaatgtgaaccacaagcctagcaacaccaaggtggacaagagagtggaacccaagagctgtgaagtgaaaaccgactccaccgaccacgtgaagcccaaagagacagagaacaccaagcagcccagcaagagctgccacaagcccaaggccatcgtgcacaccgagaaagtgaacatgatgagcctgaccgtgctgggcctgcggatgctgttcgccaaaaccgtggccgtgaacttcctgctgaccgccaagctgttcttcctc

SEQ ID NO: 5392 - DNA, 2451 bp, Artificial Sequence
  Synthetic Polynucloetide
atggccttaccagtgaccgccttgctcctgccgctggccttgctgctccacgccgccaggccggaggttcagctgcttgagtctggcggaggactggttcaacctggcggaagcctgagactgtcttgtgccgccagcggcttcacctttagcagctacgccatgagctgggtccgacaggctcctggcaaaggactggaatgggtgtccagcatcagcggcagcggcgactacatctactacgccgatagcgtgaagggcagattcaccatcagccgggacatcagcaagaacaccctgtacctccagatgaacagcctgagagccgaggacaccgccgtgtactactgtgccaaagaaggcaccggcgctaacagcagcctggccgattatagaggccagggcacactggtcaccgtgtctagtggcggaggaagcggcggaggatctgaagttcagctgcttgagtctggcggaggactggttcaacctggcggaagcctgagactgtcttgtgccgccagcggcttcatcttcagcagctacgccatgagctgggtccgacaggctcctggaaagggccaagaatgggtttccggcgttagcggcacaggcgtgaacacctactacgccgatagcgtgaagggcagattcaccatcagccgggacaacagcaagaacaccctgtacctccagatgaacagcctgagagccgaggacaccgccgtgtactattgtgcctctggcaaaggctgggacagcggctcttggtacgaggactatagaggccagggcaccctggtcacagtttcttcactcgagggatctcccatcaagaccgatgtgattacaatggaccccaaggacaactgctccaaggacgccaacgataccctgctgctccagctgaccaacaccagcgcctactacatgtacttgttgctgctgctgaagtccgtggtgtacttcgccatcatcacatgctgcctgctgcggagaaccgccttctgctgcaacggcgagaagtctagggccaagcgatctggatctggagcaacaaacttctcactactcaaacaagcaggtgacgtggaggagaatcccgggcctactagtatggactggatttggcgcatccttttccttgtcggcgctgctaccggcgcgcattccgggccccaggttcagctgcaagagtctggcggaggacttgctcaagctggcggaagcctgagactgtcttgtgccgcctctggcagaaccttcagcatgggctggtttagacaggcccctggcaaagagagagagttcgtcgccgccatcacatacagcggcggcagcccttactacgcctcttctgtcagaggccggttcaccatcagccgggacaacgccaagaacaccgtgtacctccagatgaacagcctgaagccagaggacaccgccgtgtactactgtgccgccaatccaacctacggcagcgactggaatgccgagaattggggccagggcacccaagtgacagtgtctagtacgcgtggcagcgaagtgaaaaccgactccaccgaccacgtgaagcccaaagagacagagaacaccaagcagcccagcaagagctgccacaagcccaaggccatcgtgcacaccgagaaagtgaacatgatgagcctgaccgtgctgggcctgcggatgctgttcgccaaaaccgtggccgtgaacttcctgctgaccgccaagctgttcttcctccgcgccaagagaagcggatctggcgtgaagcagaccctgaatttcgacctgctgaagctggctggcgacgtggaatccaacccaggcccttctagaggccatatgaccgagtacaagcccacggtgcgcctcgccacccgcgacgacgtccccagggccgtacgcaccctcgccgccgcgttcgccgactaccccgccacgcgccacaccgtcgatccggaccgccacatcgagcgggtcaccgagctgcaagaactcttcctcacgcgcgtcgggctcgacatcggcaaggtgtgggtcgcggacgacggcgccgcggtggcggtctggaccacgccggagagcgtcgaagcgggggcggtgttcgccgagatcggcccgcgcatggccgagttgagcggttcccggctggccgcgcagcaacagatggaaggcctcctggcgccgcaccggcccaaggagcccgcgtggttcctggccaccgtcggcgtctcgcccgaccaccagggcaagggtctgggcagcgccgtcgtgctccccggagtggaggcggccgagcgcgccggggtgcccgccttcctggagacctccgcgccccgcaacctccccttctacgagcggctcggcttcaccgtcaccgccgacgtcgaggtgcccgaaggaccgcgcacctggtgcatgacccgcaagcccggtgcctga

SEQ ID NO: 5393 - DNA, 1749 bp, Artificial Sequence
  Synthetic Polynucloetide
atggccttaccagtgaccgccttgctcctgccgctggccttgctgctccacgccgccaggccggaggttcagctgcttgagtctggcggaggactggttcaacctggcggaagcctgagactgtcttgtgccgccagcggcttcacctttagcagctacgccatgagctgggtccgacaggctcctggcaaaggactggaatgggtgtccagcatcagcggcagcggcgactacatctactacgccgatagcgtgaagggcagattcaccatcagccgggacatcagcaagaacaccctgtacctccagatgaacagcctgagagccgaggacaccgccgtgtactactgtgccaaagaaggcaccggcgctaacagcagcctggccgattatagaggccagggcacactggtcaccgtgtctagtggcggaggaagcggcggaggatctgaagttcagctgcttgagtctggcggaggactggttcaacctggcggaagcctgagactgtcttgtgccgccagcggcttcatcttcagcagctacgccatgagctgggtccgacaggctcctggaaagggccaagaatgggtttccggcgttagcggcacaggcgtgaacacctactacgccgatagcgtgaagggcagattcaccatcagccgggacaacagcaagaacaccctgtacctccagatgaacagcctgagagccgaggacaccgccgtgtactattgtgcctctggcaaaggctgggacagcggctcttggtacgaggactatagaggccagggcaccctggtcacagtttcttcactcgagggatctcccatcaagaccgatgtgattacaatggaccccaaggacaactgctccaaggacgccaacgataccctgctgctccagctgaccaacaccagcgcctactacatgtacttgttgctgctgctgaagtccgtggtgtacttcgccatcatcacatgctgcctgctgcggagaaccgccttctgctgcaacggcgagaagtctagggccaagcgatctggatctggagcaacaaacttctcactactcaaacaagcaggtgacgtggaggagaatcccgggcctactagtatggactggatttggcgcatccttttccttgtcggcgctgctaccggcgcgcattccgggccccaggttcagctgcaagagtctggcggaggacttgctcaagctggcggaagcctgagactgtcttgtgccgcctctggcagaaccttcagcatgggctggtttagacaggcccctggcaaagagagagagttcgtcgccgccatcacatacagcggcggcagcccttactacgcctcttctgtcagaggccggttcaccatcagccgggacaacgccaagaacaccgtgtacctccagatgaacagcctgaagccagaggacaccgccgtgtactactgtgccgccaatccaacctacggcagcgactggaatgccgagaattggggccagggcacccaagtgacagtgtctagtacgcgtggcagcgaagtgaaaaccgactccaccgaccacgtgaagcccaaagagacagagaacaccaagcagcccagcaagagctgccacaagcccaaggccatcgtgcacaccgagaaagtgaacatgatgagcctgaccgtgctgggcctgcggatgctgttcgccaaaaccgtggccgtgaacttcctgctgaccgccaagctgttcttcctc

SEQ ID NO: 5394 - DNA, 2478 bp, Artificial Sequence
  Synthetic Polynucloetide
atggccttaccagtgaccgccttgctcctgccgctggccttgctgctccacgccgccaggccggaggttcagctgcttgagtctggcggaggactggttcaacctggcggaagcctgagactgtcttgtgccgccagcggcttcacctttagcagctacgccatgagctgggtccgacaggctcctggcaaaggactggaatgggtgtccagcatcagcggcagcggcgactacatctactacgccgatagcgtgaagggcagattcaccatcagccgggacatcagcaagaacaccctgtacctccagatgaacagcctgagagccgaggacaccgccgtgtactactgtgccaaagaaggcaccggcgctaacagcagcctggccgattatagaggccagggcacactggtcaccgtgtctagtggcggaggaagcggcggaggatctgaagttcagctgcttgagtctggcggaggactggttcaacctggcggaagcctgagactgtcttgtgccgccagcggcttcatcttcagcagctacgccatgagctgggtccgacaggctcctggaaagggccaagaatgggtttccggcgttagcggcacaggcgtgaacacctactacgccgatagcgtgaagggcagattcaccatcagccgggacaacagcaagaacaccctgtacctccagatgaacagcctgagagccgaggacaccgccgtgtactattgtgcctctggcaaaggctgggacagcggctcttggtacgaggactatagaggccagggcaccctggtcacagtttcttcactcgaggacaaaactcacacatgcccaccgtgcccagcacccatcaagaccgatgtgattacaatggaccccaaggacaactgctccaaggacgccaacgataccctgctgctccagctgaccaacaccagcgcctactacatgtacttgttgctgctgctgaagtccgtggtgtacttcgccatcatcacatgctgcctgctgcggagaaccgccttctgctgcaacggcgagaagtctagggccaagcgatctggatctggagcaacaaacttctcactactcaaacaagcaggtgacgtggaggagaatcccgggcctactagtatggactggatttggcgcatccttttccttgtcggcgctgctaccggcgcgcattccgggccccaggttcagctgcaagagtctggcggaggacttgctcaagctggcggaagcctgagactgtcttgtgccgcctctggcagaaccttcagcatgggctggtttagacaggcccctggcaaagagagagagttcgtcgccgccatcacatacagcggcggcagcccttactacgcctcttctgtcagaggccggttcaccatcagccgggacaacgccaagaacaccgtgtacctccagatgaacagcctgaagccagaggacaccgccgtgtactactgtgccgccaatccaacctacggcagcgactggaatgccgagaattggggccagggcacccaagtgacagtgtctagtacgcgtggcagcgaagtgaaaaccgactccaccgaccacgtgaagcccaaagagacagagaacaccaagcagcccagcaagagctgccacaagcccaaggccatcgtgcacaccgagaaagtgaacatgatgagcctgaccgtgctgggcctgcggatgctgttcgccaaaaccgtggccgtgaacttcctgctgaccgccaagctgttcttcctccgcgccaagagaagcggatctggcgtgaagcagaccctgaatttcgacctgctgaagctggctggcgacgtggaatccaacccaggcccttctagaggccatatgaccgagtacaagcccacggtgcgcctcgccacccgcgacgacgtccccagggccgtacgcaccctcgccgccgcgttcgccgactaccccgccacgcgccacaccgtcgatccggaccgccacatcgagcgggtcaccgagctgcaagaactcttcctcacgcgcgtcgggctcgacatcggcaaggtgtgggtcgcggacgacggcgccgcggtggcggtctggaccacgccggagagcgtcgaagcgggggcggtgttcgccgagatcggcccgcgcatggccgagttgagcggttcccggctggccgcgcagcaacagatggaaggcctcctggcgccgcaccggcccaaggagcccgcgtggttcctggccaccgtcggcgtctcgcccgaccaccagggcaagggtctgggcagcgccgtcgtgctccccggagtggaggcggccgagcgcgccggggtgcccgccttcctggagacctccgcgccccgcaacctccccttctacgagcggctcggcttcaccgtcaccgccgacgtcgaggtgcccgaaggaccgcgcacctggtgcatgacccgcaagcccggtgcctga

SEQ ID NO: 5395 - DNA, 2478 bp, Artificial Sequence
  Synthetic Polynucloetide
atggccttaccagtgaccgccttgctcctgccgctggccttgctgctccacgccgccaggccggaggttcagctgcttgagtctggcggaggactggttcaacctggcggaagcctgagactgtcttgtgccgccagcggcttcacctttagcagctacgccatgagctgggtccgacaggctcctggcaaaggactggaatgggtgtccagcatcagcggcagcggcgactacatctactacgccgatagcgtgaagggcagattcaccatcagccgggacatcagcaagaacaccctgtacctccagatgaacagcctgagagccgaggacaccgccgtgtactactgtgccaaagaaggcaccggcgctaacagcagcctggccgattatagaggccagggcacactggtcaccgtgtctagtggcggaggaagcggcggaggatctgaagttcagctgcttgagtctggcggaggactggttcaacctggcggaagcctgagactgtcttgtgccgccagcggcttcatcttcagcagctacgccatgagctgggtccgacaggctcctggaaagggccaagaatgggtttccggcgttagcggcacaggcgtgaacacctactacgccgatagcgtgaagggcagattcaccatcagccgggacaacagcaagaacaccctgtacctccagatgaacagcctgagagccgaggacaccgccgtgtactattgtgcctctggcaaaggctgggacagcggctcttggtacgaggactatagaggccagggcaccctggtcacagtttcttcactcgagggatctcccatcaagaccgatgtgattacaatggaccccaaggacaactgctccaaggacgccaacgataccctgctgctccagctgaccaacaccagcgcctactacatgtacttgttgctgctgctgaagtccgtggtgtacttcgccatcatcacatgctgcctgctgcggagaaccgccttctgctgcaacggcgagaagtctagggccaagcgatctggatctggagcaacaaacttctcactactcaaacaagcaggtgacgtggaggagaatcccgggcctactagtatggactggatttggcgcatccttttccttgtcggcgctgctaccggcgcgcattccgggccccaggttcagctgcaagagtctggcggaggacttgctcaagctggcggaagcctgagactgtcttgtgccgcctctggcagaaccttcagcatgggctggtttagacaggcccctggcaaagagagagagttcgtcgccgccatcacatacagcggcggcagcccttactacgcctcttctgtcagaggccggttcaccatcagccgggacaacgccaagaacaccgtgtacctccagatgaacagcctgaagccagaggacaccgccgtgtactactgtgccgccaatccaacctacggcagcgactggaatgccgagaattggggccagggcacccaagtgacagtgtctagtacgcgtgataaaactcatacctgtccgccatgcccggcagaagtgaaaaccgactccaccgaccacgtgaagcccaaagagacagagaacaccaagcagcccagcaagagctgccacaagcccaaggccatcgtgcacaccgagaaagtgaacatgatgagcctgaccgtgctgggcctgcggatgctgttcgccaaaaccgtggccgtgaacttcctgctgaccgccaagctgttcttcctccgcgccaagagaagcggatctggcgtgaagcagaccctgaatttcgacctgctgaagctggctggcgacgtggaatccaacccaggcccttctagaggccatatgaccgagtacaagcccacggtgcgcctcgccacccgcgacgacgtccccagggccgtacgcaccctcgccgccgcgttcgccgactaccccgccacgcgccacaccgtcgatccggaccgccacatcgagcgggtcaccgagctgcaagaactcttcctcacgcgcgtcgggctcgacatcggcaaggtgtgggtcgcggacgacggcgccgcggtggcggtctggaccacgccggagagcgtcgaagcgggggcggtgttcgccgagatcggcccgcgcatggccgagttgagcggttcccggctggccgcgcagcaacagatggaaggcctcctggcgccgcaccggcccaaggagcccgcgtggttcctggccaccgtcggcgtctcgcccgaccaccagggcaagggtctgggcagcgccgtcgtgctccccggagtggaggcggccgagcgcgccggggtgcccgccttcctggagacctccgcgccccgcaacctccccttctacgagcggctcggcttcaccgtcaccgccgacgtcgaggtgcccgaaggaccgcgcacctggtgcatgacccgcaagcccggtgcctga

SEQ ID NO: 5396 - DNA, 2505 bp, Artificial Sequence
  Synthetic Polynucloetide
atggccttaccagtgaccgccttgctcctgccgctggccttgctgctccacgccgccaggccggaggttcagctgcttgagtctggcggaggactggttcaacctggcggaagcctgagactgtcttgtgccgccagcggcttcacctttagcagctacgccatgagctgggtccgacaggctcctggcaaaggactggaatgggtgtccagcatcagcggcagcggcgactacatctactacgccgatagcgtgaagggcagattcaccatcagccgggacatcagcaagaacaccctgtacctccagatgaacagcctgagagccgaggacaccgccgtgtactactgtgccaaagaaggcaccggcgctaacagcagcctggccgattatagaggccagggcacactggtcaccgtgtctagtggcggaggaagcggcggaggatctgaagttcagctgcttgagtctggcggaggactggttcaacctggcggaagcctgagactgtcttgtgccgccagcggcttcatcttcagcagctacgccatgagctgggtccgacaggctcctggaaagggccaagaatgggtttccggcgttagcggcacaggcgtgaacacctactacgccgatagcgtgaagggcagattcaccatcagccgggacaacagcaagaacaccctgtacctccagatgaacagcctgagagccgaggacaccgccgtgtactattgtgcctctggcaaaggctgggacagcggctcttggtacgaggactatagaggccagggcaccctggtcacagtttcttcactcgaggacaaaactcacacatgcccaccgtgcccagcacccatcaagaccgatgtgattacaatggaccccaaggacaactgctccaaggacgccaacgataccctgctgctccagctgaccaacaccagcgcctactacatgtacttgttgctgctgctgaagtccgtggtgtacttcgccatcatcacatgctgcctgctgcggagaaccgccttctgctgcaacggcgagaagtctagggccaagcgatctggatctggagcaacaaacttctcactactcaaacaagcaggtgacgtggaggagaatcccgggcctactagtatggactggatttggcgcatccttttccttgtcggcgctgctaccggcgcgcattccgggccccaggttcagctgcaagagtctggcggaggacttgctcaagctggcggaagcctgagactgtcttgtgccgcctctggcagaaccttcagcatgggctggtttagacaggcccctggcaaagagagagagttcgtcgccgccatcacatacagcggcggcagcccttactacgcctcttctgtcagaggccggttcaccatcagccgggacaacgccaagaacaccgtgtacctccagatgaacagcctgaagccagaggacaccgccgtgtactactgtgccgccaatccaacctacggcagcgactggaatgccgagaattggggccagggcacccaagtgacagtgtctagtacgcgtgataaaactcatacctgtccgccatgcccggcagaagtgaaaaccgactccaccgaccacgtgaagcccaaagagacagagaacaccaagcagcccagcaagagctgccacaagcccaaggccatcgtgcacaccgagaaagtgaacatgatgagcctgaccgtgctgggcctgcggatgctgttcgccaaaaccgtggccgtgaacttcctgctgaccgccaagctgttcttcctccgcgccaagagaagcggatctggcgtgaagcagaccctgaatttcgacctgctgaagctggctggcgacgtggaatccaacccaggcccttctagaggccatatgaccgagtacaagcccacggtgcgcctcgccacccgcgacgacgtccccagggccgtacgcaccctcgccgccgcgttcgccgactaccccgccacgcgccacaccgtcgatccggaccgccacatcgagcgggtcaccgagctgcaagaactcttcctcacgcgcgtcgggctcgacatcggcaaggtgtgggtcgcggacgacggcgccgcggtggcggtctggaccacgccggagagcgtcgaagcgggggcggtgttcgccgagatcggcccgcgcatggccgagttgagcggttcccggctggccgcgcagcaacagatggaaggcctcctggcgccgcaccggcccaaggagcccgcgtggttcctggccaccgtcggcgtctcgcccgaccaccagggcaagggtctgggcagcgccgtcgtgctccccggagtggaggcggccgagcgcgccggggtgcccgccttcctggagacctccgcgccccgcaacctccccttctacgagcggctcggcttcaccgtcaccgccgacgtcgaggtgcccgaaggaccgcgcacctggtgcatgacccgcaagcccggtgcctga

SEQ ID NO: 5397 - DNA, 1803 bp, Artificial Sequence
  Synthetic Polynucloetide
atggccttaccagtgaccgccttgctcctgccgctggccttgctgctccacgccgccaggccggaggttcagctgcttgagtctggcggaggactggttcaacctggcggaagcctgagactgtcttgtgccgccagcggcttcacctttagcagctacgccatgagctgggtccgacaggctcctggcaaaggactggaatgggtgtccagcatcagcggcagcggcgactacatctactacgccgatagcgtgaagggcagattcaccatcagccgggacatcagcaagaacaccctgtacctccagatgaacagcctgagagccgaggacaccgccgtgtactactgtgccaaagaaggcaccggcgctaacagcagcctggccgattatagaggccagggcacactggtcaccgtgtctagtggcggaggaagcggcggaggatctgaagttcagctgcttgagtctggcggaggactggttcaacctggcggaagcctgagactgtcttgtgccgccagcggcttcatcttcagcagctacgccatgagctgggtccgacaggctcctggaaagggccaagaatgggtttccggcgttagcggcacaggcgtgaacacctactacgccgatagcgtgaagggcagattcaccatcagccgggacaacagcaagaacaccctgtacctccagatgaacagcctgagagccgaggacaccgccgtgtactattgtgcctctggcaaaggctgggacagcggctcttggtacgaggactatagaggccagggcaccctggtcacagtttcttcactcgaggacaaaactcacacatgcccaccgtgcccagcacccatcaagaccgatgtgattacaatggaccccaaggacaactgctccaaggacgccaacgataccctgctgctccagctgaccaacaccagcgcctactacatgtacttgttgctgctgctgaagtccgtggtgtacttcgccatcatcacatgctgcctgctgcggagaaccgccttctgctgcaacggcgagaagtctagggccaagcgatctggatctggagcaacaaacttctcactactcaaacaagcaggtgacgtggaggagaatcccgggcctactagtatggactggatttggcgcatccttttccttgtcggcgctgctaccggcgcgcattccgggccccaggttcagctgcaagagtctggcggaggacttgctcaagctggcggaagcctgagactgtcttgtgccgcctctggcagaaccttcagcatgggctggtttagacaggcccctggcaaagagagagagttcgtcgccgccatcacatacagcggcggcagcccttactacgcctcttctgtcagaggccggttcaccatcagccgggacaacgccaagaacaccgtgtacctccagatgaacagcctgaagccagaggacaccgccgtgtactactgtgccgccaatccaacctacggcagcgactggaatgccgagaattggggccagggcacccaagtgacagtgtctagtacgcgtgataaaactcatacctgtccgccatgcccggcagaagtgaaaaccgactccaccgaccacgtgaagcccaaagagacagagaacaccaagcagcccagcaagagctgccacaagcccaaggccatcgtgcacaccgagaaagtgaacatgatgagcctgaccgtgctgggcctgcggatgctgttcgccaaaaccgtggccgtgaacttcctgctgaccgccaagctgttcttcctc

SEQ ID NO: 5398 - DNA, 1776 bp, Artificial Sequence
  Synthetic Polynucloetide
atggccttaccagtgaccgccttgctcctgccgctggccttgctgctccacgccgccaggccggaggttcagctgcttgagtctggcggaggactggttcaacctggcggaagcctgagactgtcttgtgccgccagcggcttcacctttagcagctacgccatgagctgggtccgacaggctcctggcaaaggactggaatgggtgtccagcatcagcggcagcggcgactacatctactacgccgatagcgtgaagggcagattcaccatcagccgggacatcagcaagaacaccctgtacctccagatgaacagcctgagagccgaggacaccgccgtgtactactgtgccaaagaaggcaccggcgctaacagcagcctggccgattatagaggccagggcacactggtcaccgtgtctagtggcggaggaagcggcggaggatctgaagttcagctgcttgagtctggcggaggactggttcaacctggcggaagcctgagactgtcttgtgccgccagcggcttcatcttcagcagctacgccatgagctgggtccgacaggctcctggaaagggccaagaatgggtttccggcgttagcggcacaggcgtgaacacctactacgccgatagcgtgaagggcagattcaccatcagccgggacaacagcaagaacaccctgtacctccagatgaacagcctgagagccgaggacaccgccgtgtactattgtgcctctggcaaaggctgggacagcggctcttggtacgaggactatagaggccagggcaccctggtcacagtttcttcactcgagggatctcccatcaagaccgatgtgattacaatggaccccaaggacaactgctccaaggacgccaacgataccctgctgctccagctgaccaacaccagcgcctactacatgtacttgttgctgctgctgaagtccgtggtgtacttcgccatcatcacatgctgcctgctgcggagaaccgccttctgctgcaacggcgagaagtctagggccaagcgatctggatctggagcaacaaacttctcactactcaaacaagcaggtgacgtggaggagaatcccgggcctactagtatggactggatttggcgcatccttttccttgtcggcgctgctaccggcgcgcattccgggccccaggttcagctgcaagagtctggcggaggacttgctcaagctggcggaagcctgagactgtcttgtgccgcctctggcagaaccttcagcatgggctggtttagacaggcccctggcaaagagagagagttcgtcgccgccatcacatacagcggcggcagcccttactacgcctcttctgtcagaggccggttcaccatcagccgggacaacgccaagaacaccgtgtacctccagatgaacagcctgaagccagaggacaccgccgtgtactactgtgccgccaatccaacctacggcagcgactggaatgccgagaattggggccagggcacccaagtgacagtgtctagtacgcgtgataaaactcatacctgtccgccatgcccggcagaagtgaaaaccgactccaccgaccacgtgaagcccaaagagacagagaacaccaagcagcccagcaagagctgccacaagcccaaggccatcgtgcacaccgagaaagtgaacatgatgagcctgaccgtgctgggcctgcggatgctgttcgccaaaaccgtggccgtgaacttcctgctgaccgccaagctgttcttcctc

SEQ ID NO: 5399 - DNA, 2427 bp, Artificial Sequence
  Synthetic Polynucloetide
atggccttaccagtgaccgccttgctcctgccgctggccttgctgctccacgccgccaggccggaggttcagctgcttgagtctggcggaggactggttcaacctggcggaagcctgagactgtcttgtgccgccagcggcttcacctttagcagctacgccatgagctgggtccgacaggctcctggcaaaggactggaatgggtgtccagcatcagcggcagcggcgactacatctactacgccgatagcgtgaagggcagattcaccatcagccgggacatcagcaagaacaccctgtacctccagatgaacagcctgagagccgaggacaccgccgtgtactactgtgccaaagaaggcaccggcgctaacagcagcctggccgattatagaggccagggcacactggtcaccgtgtctagtggcggaggaagcggcggaggatctgaagttcagctgcttgagtctggcggaggactggttcaacctggcggaagcctgagactgtcttgtgccgccagcggcttcatcttcagcagctacgccatgagctgggtccgacaggctcctggaaagggccaagaatgggtttccggcgttagcggcacaggcgtgaacacctactacgccgatagcgtgaagggcagattcaccatcagccgggacaacagcaagaacaccctgtacctccagatgaacagcctgagagccgaggacaccgccgtgtactattgtgcctctggcaaaggctgggacagcggctcttggtacgaggactatagaggccagggcaccctggtcacagtttcttcactcgagggatctatggaccccaaggacaactgctccaaggacgccaacgataccctgctgctccagctgaccaacaccagcgcctactacatgtacttgttgctgctgctgaagtccgtggtgtacttcgccatcatcacatgctgcctgctgcggagaaccgccttctgctgcaacggcgagaagtctagggccaagcgatctggatctggagcaacaaacttctcactactcaaacaagcaggtgacgtggaggagaatcccgggcctactagtatggactggatttggcgcatccttttccttgtcggcgctgctaccggcgcgcattccgggccccaggttcagctgcaagagtctggcggaggacttgctcaagctggcggaagcctgagactgtcttgtgccgcctctggcagaaccttcagcatgggctggtttagacaggcccctggcaaagagagagagttcgtcgccgccatcacatacagcggcggcagcccttactacgcctcttctgtcagaggccggttcaccatcagccgggacaacgccaagaacaccgtgtacctccagatgaacagcctgaagccagaggacaccgccgtgtactactgtgccgccaatccaacctacggcagcgactggaatgccgagaattggggccagggcacccaagtgacagtgtctagtacgcgtggcagcgaagtgaaaaccgactccaccgaccacgtgaagcccaaagagacagagaacaccaagcagcccagcaagagctgccacaagcccaaggccatcgtgcacaccgagaaagtgaacatgatgagcctgaccgtgctgggcctgcggatgctgttcgccaaaaccgtggccgtgaacttcctgctgaccgccaagctgttcttcctccgcgccaagagaagcggatctggcgtgaagcagaccctgaatttcgacctgctgaagctggctggcgacgtggaatccaacccaggcccttctagaggccatatgaccgagtacaagcccacggtgcgcctcgccacccgcgacgacgtccccagggccgtacgcaccctcgccgccgcgttcgccgactaccccgccacgcgccacaccgtcgatccggaccgccacatcgagcgggtcaccgagctgcaagaactcttcctcacgcgcgtcgggctcgacatcggcaaggtgtgggtcgcggacgacggcgccgcggtggcggtctggaccacgccggagagcgtcgaagcgggggcggtgttcgccgagatcggcccgcgcatggccgagttgagcggttcccggctggccgcgcagcaacagatggaaggcctcctggcgccgcaccggcccaaggagcccgcgtggttcctggccaccgtcggcgtctcgcccgaccaccagggcaagggtctgggcagcgccgtcgtgctccccggagtggaggcggccgagcgcgccggggtgcccgccttcctggagacctccgcgccccgcaacctccccttctacgagcggctcggcttcaccgtcaccgccgacgtcgaggtgcccgaaggaccgcgcacctggtgcatgacccgcaagcccggtgcctga

SEQ ID NO: 5400 - DNA, 2430 bp, Artificial Sequence
  Synthetic Polynucloetide
atggccttaccagtgaccgccttgctcctgccgctggccttgctgctccacgccgccaggccggaggttcagctgcttgagtctggcggaggactggttcaacctggcggaagcctgagactgtcttgtgccgccagcggcttcacctttagcagctacgccatgagctgggtccgacaggctcctggcaaaggactggaatgggtgtccagcatcagcggcagcggcgactacatctactacgccgatagcgtgaagggcagattcaccatcagccgggacatcagcaagaacaccctgtacctccagatgaacagcctgagagccgaggacaccgccgtgtactactgtgccaaagaaggcaccggcgctaacagcagcctggccgattatagaggccagggcacactggtcaccgtgtctagtggcggaggaagcggcggaggatctgaagttcagctgcttgagtctggcggaggactggttcaacctggcggaagcctgagactgtcttgtgccgccagcggcttcatcttcagcagctacgccatgagctgggtccgacaggctcctggaaagggccaagaatgggtttccggcgttagcggcacaggcgtgaacacctactacgccgatagcgtgaagggcagattcaccatcagccgggacaacagcaagaacaccctgtacctccagatgaacagcctgagagccgaggacaccgccgtgtactattgtgcctctggcaaaggctgggacagcggctcttggtacgaggactatagaggccagggcaccctggtcacagtttcttcactcgagggatctcccatcaagaccgatgtgattacaatggaccccaaggacaactgctccaaggacgccaacgataccctgctgctccagctgaccaacaccagcgcctactacatgtacttgttgctgctgctgaagtccgtggtgtacttcgccatcatcacatgctgcctgctgcggagaaccgccttctgctgcaacggcgagaagtctagggccaagcgatctggatctggagcaacaaacttctcactactcaaacaagcaggtgacgtggaggagaatcccgggcctactagtatggactggatttggcgcatccttttccttgtcggcgctgctaccggcgcgcattccgggccccaggttcagctgcaagagtctggcggaggacttgctcaagctggcggaagcctgagactgtcttgtgccgcctctggcagaaccttcagcatgggctggtttagacaggcccctggcaaagagagagagttcgtcgccgccatcacatacagcggcggcagcccttactacgcctcttctgtcagaggccggttcaccatcagccgggacaacgccaagaacaccgtgtacctccagatgaacagcctgaagccagaggacaccgccgtgtactactgtgccgccaatccaacctacggcagcgactggaatgccgagaattggggccagggcacccaagtgacagtgtctagtacgcgtggcagcgaccacgtgaagcccaaagagacagagaacaccaagcagcccagcaagagctgccacaagcccaaggccatcgtgcacaccgagaaagtgaacatgatgagcctgaccgtgctgggcctgcggatgctgttcgccaaaaccgtggccgtgaacttcctgctgaccgccaagctgttcttcctccgcgccaagagaagcggatctggcgtgaagcagaccctgaatttcgacctgctgaagctggctggcgacgtggaatccaacccaggcccttctagaggccatatgaccgagtacaagcccacggtgcgcctcgccacccgcgacgacgtccccagggccgtacgcaccctcgccgccgcgttcgccgactaccccgccacgcgccacaccgtcgatccggaccgccacatcgagcgggtcaccgagctgcaagaactcttcctcacgcgcgtcgggctcgacatcggcaaggtgtgggtcgcggacgacggcgccgcggtggcggtctggaccacgccggagagcgtcgaagcgggggcggtgttcgccgagatcggcccgcgcatggccgagttgagcggttcccggctggccgcgcagcaacagatggaaggcctcctggcgccgcaccggcccaaggagcccgcgtggttcctggccaccgtcggcgtctcgcccgaccaccagggcaagggtctgggcagcgccgtcgtgctccccggagtggaggcggccgagcgcgccggggtgcccgccttcctggagacctccgcgccccgcaacctccccttctacgagcggctcggcttcaccgtcaccgccgacgtcgaggtgcccgaaggaccgcgcacctggtgcatgacccgcaagcccggtgcctga

SEQ ID NO: 5401 - DNA, 2406 bp, Artificial Sequence
  Synthetic Polynucloetide
atggccttaccagtgaccgccttgctcctgccgctggccttgctgctccacgccgccaggccggaggttcagctgcttgagtctggcggaggactggttcaacctggcggaagcctgagactgtcttgtgccgccagcggcttcacctttagcagctacgccatgagctgggtccgacaggctcctggcaaaggactggaatgggtgtccagcatcagcggcagcggcgactacatctactacgccgatagcgtgaagggcagattcaccatcagccgggacatcagcaagaacaccctgtacctccagatgaacagcctgagagccgaggacaccgccgtgtactactgtgccaaagaaggcaccggcgctaacagcagcctggccgattatagaggccagggcacactggtcaccgtgtctagtggcggaggaagcggcggaggatctgaagttcagctgcttgagtctggcggaggactggttcaacctggcggaagcctgagactgtcttgtgccgccagcggcttcatcttcagcagctacgccatgagctgggtccgacaggctcctggaaagggccaagaatgggtttccggcgttagcggcacaggcgtgaacacctactacgccgatagcgtgaagggcagattcaccatcagccgggacaacagcaagaacaccctgtacctccagatgaacagcctgagagccgaggacaccgccgtgtactattgtgcctctggcaaaggctgggacagcggctcttggtacgaggactatagaggccagggcaccctggtcacagtttcttcactcgagggatctatggaccccaaggacaactgctccaaggacgccaacgataccctgctgctccagctgaccaacaccagcgcctactacatgtacttgttgctgctgctgaagtccgtggtgtacttcgccatcatcacatgctgcctgctgcggagaaccgccttctgctgcaacggcgagaagtctagggccaagcgatctggatctggagcaacaaacttctcactactcaaacaagcaggtgacgtggaggagaatcccgggcctactagtatggactggatttggcgcatccttttccttgtcggcgctgctaccggcgcgcattccgggccccaggttcagctgcaagagtctggcggaggacttgctcaagctggcggaagcctgagactgtcttgtgccgcctctggcagaaccttcagcatgggctggtttagacaggcccctggcaaagagagagagttcgtcgccgccatcacatacagcggcggcagcccttactacgcctcttctgtcagaggccggttcaccatcagccgggacaacgccaagaacaccgtgtacctccagatgaacagcctgaagccagaggacaccgccgtgtactactgtgccgccaatccaacctacggcagcgactggaatgccgagaattggggccagggcacccaagtgacagtgtctagtacgcgtggcagcgaccacgtgaagcccaaagagacagagaacaccaagcagcccagcaagagctgccacaagcccaaggccatcgtgcacaccgagaaagtgaacatgatgagcctgaccgtgctgggcctgcggatgctgttcgccaaaaccgtggccgtgaacttcctgctgaccgccaagctgttcttcctccgcgccaagagaagcggatctggcgtgaagcagaccctgaatttcgacctgctgaagctggctggcgacgtggaatccaacccaggcccttctagaggccatatgaccgagtacaagcccacggtgcgcctcgccacccgcgacgacgtccccagggccgtacgcaccctcgccgccgcgttcgccgactaccccgccacgcgccacaccgtcgatccggaccgccacatcgagcgggtcaccgagctgcaagaactcttcctcacgcgcgtcgggctcgacatcggcaaggtgtgggtcgcggacgacggcgccgcggtggcggtctggaccacgccggagagcgtcgaagcgggggcggtgttcgccgagatcggcccgcgcatggccgagttgagcggttcccggctggccgcgcagcaacagatggaaggcctcctggcgccgcaccggcccaaggagcccgcgtggttcctggccaccgtcggcgtctcgcccgaccaccagggcaagggtctgggcagcgccgtcgtgctccccggagtggaggcggccgagcgcgccggggtgcccgccttcctggagacctccgcgccccgcaacctccccttctacgagcggctcggcttcaccgtcaccgccgacgtcgaggtgcccgaaggaccgcgcacctggtgcatgacccgcaagcccggtgcctga

SEQ ID NO: 5402 - DNA, 1341 bp, Artificial Sequence
  Synthetic Polynucloetide
atggccttaccagtgaccgccttgctcctgccgctggccttgctgctccacgccgccaggccggaggttcagctgcttgagtctggcggaggactggttcaacctggcggaagcctgagactgtcttgtgccgccagcggcttcacctttagcagctacgccatgagctgggtccgacaggctcctggcaaaggactggaatgggtgtccagcatcagcggcagcggcgactacatctactacgccgatagcgtgaagggcagattcaccatcagccgggacatcagcaagaacaccctgtacctccagatgaacagcctgagagccgaggacaccgccgtgtactactgtgccaaagaaggcaccggcgctaacagcagcctggccgattatagaggccagggcacactggtcaccgtgtctagtggcggaggaagcggcggaggatctgaagttcagctgcttgagtctggcggaggactggttcaacctggcggaagcctgagactgtcttgtgccgccagcggcttcatcttcagcagctacgccatgagctgggtccgacaggctcctggaaagggccaagaatgggtttccggcgttagcggcacaggcgtgaacacctactacgccgatagcgtgaagggcagattcaccatcagccgggacaacagcaagaacaccctgtacctccagatgaacagcctgagagccgaggacaccgccgtgtactattgtgcctctggcaaaggctgggacagcggctcttggtacgaggactatagaggccagggcaccctggtcacagtttcttcactcgagggacagcctaaggccaatcctaccgtgacactgttccctccaagcagcgaagaactccaggccaacaaggccacacttgtgtgcctgatctccgacttctaccctggggctgtgacagtggcttggaaggccgatggatctcctgtgaaagccggcgtggaaaccaccaagccatccaagcagagcaacaacaaatacgccgccagctcctacctgagcctgacacctgagcagtggaagtcccacagatcctacagctgccaagtgacccacgaaggcagcaccgtggaaaagacagtggcccctacagagtgcagccccatcaagaccgatgtgattacaatggaccccaaggacaactgctccaaggacgccaacgataccctgctgctccagctgaccaacaccagcgcctactacatgtacttgttgctgctgctgaagtccgtggtgtacttcgccatcatcacatgctgcctgctgcggagaaccgccttctgctgcaacggcgagaagtct

SEQ ID NO: 5403 - DNA, 2304 bp, Artificial Sequence; identical to SEQ ID NO: 5155
  Synthetic Polynucloetide

SEQ ID NO: 5404 - DNA, 3363 bp, Artificial Sequence; identical to SEQ ID NO: 5156
  Synthetic Polynucloetide

SEQ ID NO: 5405 - DNA, 3360 bp, Artificial Sequence; identical to SEQ ID NO: 5157
  Synthetic Polynucloetide

SEQ ID NO: 5406 - DNA, 3360 bp, Artificial Sequence; identical to SEQ ID NO: 5158
  Synthetic Polynucloetide

SEQ ID NO: 5407 - DNA, 2658 bp, Artificial Sequence; identical to SEQ ID NO: 5159
  Synthetic Polynucloetide

SEQ ID NO: 5408 - DNA, 3333 bp, Artificial Sequence; identical to SEQ ID NO: 5160
  Synthetic Polynucloetide

SEQ ID NO: 5409 - DNA, 2670 bp, Artificial Sequence; identical to SEQ ID NO: 5161
  Synthetic Polynucloetide

SEQ ID NO: 5410 - DNA, 3336 bp, Artificial Sequence; identical to SEQ ID NO: 5162
  Synthetic Polynucloetide

SEQ ID NO: 5411 - DNA, 3360 bp, Artificial Sequence; identical to SEQ ID NO: 5163
  Synthetic Polynucloetide

SEQ ID NO: 5412 - DNA, 3606 bp, Artificial Sequence; identical to SEQ ID NO: 5164
  Synthetic Polynucloetide

SEQ ID NO: 5413 - DNA, 3471 bp, Artificial Sequence; identical to SEQ ID NO: 5165
  Synthetic Polynucloetide

SEQ ID NO: 5414 - DNA, 2682 bp, Artificial Sequence; identical to SEQ ID NO: 5166
  Synthetic Polynucloetide

SEQ ID NO: 5415 - DNA, 3891 bp, Artificial Sequence; identical to SEQ ID NO: 5167
  Synthetic Polynucloetide

SEQ ID NO: 5416 - DNA, 3246 bp, Artificial Sequence; identical to SEQ ID NO: 5168
  Synthetic Polynucloetide

SEQ ID NO: 5417 - DNA, 3246 bp, Artificial Sequence; identical to SEQ ID NO: 5169
  Synthetic Polynucloetide

SEQ ID NO: 5418 - DNA, 3459 bp, Artificial Sequence; identical to SEQ ID NO: 5170
  Synthetic Polynucloetide

SEQ ID NO: 5419 - DNA, 3582 bp, Artificial Sequence; identical to SEQ ID NO: 5171
  Synthetic Polynucloetide

SEQ ID NO: 5420 - DNA, 3465 bp, Artificial Sequence; identical to SEQ ID NO: 5172
  Synthetic Polynucloetide

SEQ ID NO: 5421 - DNA, 3591 bp, Artificial Sequence; identical to SEQ ID NO: 5173
  Synthetic Polynucloetide

SEQ ID NO: 5422 - DNA, 3264 bp, Artificial Sequence; identical to SEQ ID NO: 5174
  Synthetic Polynucloetide

SEQ ID NO: 5423 - DNA, 2736 bp, Artificial Sequence; identical to SEQ ID NO: 5175
  Synthetic Polynucloetide

SEQ ID NO: 5424 - DNA, 2670 bp, Artificial Sequence; identical to SEQ ID NO: 5176
  Synthetic Polynucloetide

SEQ ID NO: 5425 - DNA, 2670 bp, Artificial Sequence; identical to SEQ ID NO: 5177
  Synthetic Polynucloetide

SEQ ID NO: 5426 - DNA, 2160 bp, Artificial Sequence; identical to SEQ ID NO: 5178
  Synthetic Polynucloetide

SEQ ID NO: 5427 - DNA, 2055 bp, Artificial Sequence; identical to SEQ ID NO: 5179
  Synthetic Polynucloetide

SEQ ID NO: 5428 - DNA, 2085 bp, Artificial Sequence; identical to SEQ ID NO: 5180
  Synthetic Polynucloetide

SEQ ID NO: 5429 - DNA, 2034 bp, Artificial Sequence; identical to SEQ ID NO: 5181
  Synthetic Polynucloetide

SEQ ID NO: 5430 - DNA, 2145 bp, Artificial Sequence; identical to SEQ ID NO: 5182
  Synthetic Polynucloetide

SEQ ID NO: 5431 - DNA, 1644 bp, Artificial Sequence; identical to SEQ ID NO: 5183
  Synthetic Polynucloetide

SEQ ID NO: 5432 - DNA, 2181 bp, Artificial Sequence; identical to SEQ ID NO: 5184
  Synthetic Polynucloetide

SEQ ID NO: 5433 - DNA, 1683 bp, Artificial Sequence; identical to SEQ ID NO: 5185
  Synthetic Polynucloetide

SEQ ID NO: 5434 - DNA, 4173 bp, Artificial Sequence
  Synthetic Polynucloetide
atggccttaccagtgaccgccttgctcctgccgctggccttgctgctccacgccgccaggccggaggttcagctgcttgagtctggcggaggactggttcaacctggcggaagcctgagactgtcttgtgccgccagcggcttcacctttagcagctacgccatgagctgggtccgacaggctcctggcaaaggactggaatgggtgtccagcatcagcggcagcggcgactacatctactacgccgatagcgtgaagggcagattcaccatcagccgggacatcagcaagaacaccctgtacctccagatgaacagcctgagagccgaggacaccgccgtgtactactgtgccaaagaaggcaccggcgctaacagcagcctggccgattatagaggccagggcacactggtcaccgtgtctagtggcggaggaagcggcggaggatctgaagttcagctgcttgagtctggcggaggactggttcaacctggcggaagcctgagactgtcttgtgccgccagcggcttcatcttcagcagctacgccatgagctgggtccgacaggctcctggaaagggccaagaatgggtttccggcgttagcggcacaggcgtgaacacctactacgccgatagcgtgaagggcagattcaccatcagccgggacaacagcaagaacaccctgtacctccagatgaacagcctgagagccgaggacaccgccgtgtactattgtgcctctggcaaaggctgggacagcggctcttggtacgaggactatagaggccagggcaccctggtcacagtttcttcaggtaccggcggaggcggatctggcggcggaggtagcggtggcggaggatctgaattcgacatccagatgacacagagccctagcagcctgtctgccagcgtgggagacagagtgaccatcacatgcaaggccagcgaccacatcaacaactggctggcctggtatcagcagaagcctggacaggcccctaagctgctgatctacggcgctaccacactggaaacaggcgtgcccagcagattttctggcagcggctctggcaccgactacaccctgacaatatccagcctccagcctgaggacttcgccacctactactgtcagcagagctggaacaccccttggacattcggccagggcaccaagctggaaatcaagagactcgagatccagaaccctgatcctgccgtgtaccagctgcgggatagcaagagcagcgacaagagcgtgtgtctgttcaccgacttcgacagccagaccaacgtgtcccagagcaaggactccgacgtgtacatcaccgataagtgcgtgctggacatgcggagcatggacttcaagagcaactccgccgtggcctggtccaacaagtccgatttcgcctgcgccaacgccttcaacaacagcattatccccgaggacacattcttcccaagcagcgacgtgccctgcgacgtgaagctggtggaaaagagcttcgagacagacaccaacctgaacttccagaacctgagcgtgatcggcttcagaatcctgctgctgaaagtggccggctttaacctgctgatgaccctgcggctgtggtccagccgcgccaagagaagcggatctggcgtgaagcagaccctgaatttcgacctgctgaagctggctggcgacgtggaatccaacccaggccctactagtatggactggatttggcgcatccttttccttgtcggcgctgctaccggcgcccattcccagctccagttgcaagagagcggccctggcttggtaaaaccttccgagacccttagcctcacatgcacggttagtgggggcagcatttcctcaggtgattactattggggatggattcggcaacccccgggtaaaggattggagtggattggtcatatttattatagtggagcgacgtactacaacccaagtctcaaatccagggttacaatatccgtcgatacgagcaggaaccaattcagcttgaaactttctagtgtcaccgcagcagacacagccgtctattactgtacgcgggatgactccagtaattggcggtcccgagggcaagggacactggtcacggtctcctcatctggaggcggtggaagcggtggaggaggatctcaggttcagctgcaagagtctggcggaggacttgctcaagctggcggaagcctgagactgtcttgtgccgcctctggcagaaccttcagcatgggctggtttagacaggcccctggcaaagagagagagttcgtcgccgccatcacatacagcggcggcagcccttactacgcctcttctgtcagaggccggttcaccatcagccgggacaacgccaagaacaccgtgtacctccagatgaacagcctgaagccagaggacaccgccgtgtactactgtgccgccaatccaacctacggcagcgactggaatgccgagaattggggccagggcacccaagtgacagtgtctagtggatccggcggcggaggatctggcggaggcggatctgggggcggaggctctttcgaacaagttcagcttcaacagcctggcgctgagctggtcaaacctggcgcttctgtgaagatgagctgcaaagccagcggctacgccttcagcagctactggatcaactggatgaagcagaaacccggccagggactcgaatggatcggccaaatctatcccggcgacggcgacaccaactacaacggcaagttcaagggcagagccacactgaccgccgatacctctagcagcacagcctacatgcagctgagcagcctgaccagcgaagatagcgccgtgtacttctgtgcccggtccatcacaacagtcgtgggctgcgctatggactattggggccagggaacaagcgtgaccgtgtctagtacgcgtgaggacctgaagaacgtgttcccacctgaggtggccgtgttcgagcctagcaaggccgagatcgcccacacccagaaagccaccctcgtgtgcctggctaccggcttctaccccgaccatgtggaactgtcttggtgggtcaacggcaaagaggtgcacagcggcgtgtgtaccgacccccagccactgaaagaacagcccgccctgaacgacagccggtactgcctgagcagcagactgagagtgtccgccaccttctggcagaacccccggaaccacttcagatgccaggtgcagttctacggcctgagcgagaacgacgagtggacccaggacagagccaagcccgtgacccagatcgtgtctgccgaagcctggggcagagccgattgcggcatcaccagcgccagctaccaccagggcgtgctgagcgccaccatcctgtacgagatcctgctgggcaaggccaccctgtacgccgtgctggtgtctgccctggtgctgatggctatggtcaagcggaaggacagccggggaagggccaagcgatctggatctggagcaacaaacttctcactactcaaacaagcaggtgacgtggaggagaatcccgggccttctagaggccatatgaccgagtacaagcccacggtgcgcctcgccacccgcgacgacgtccccagggccgtacgcaccctcgccgccgcgttcgccgactaccccgccacgcgccacaccgtcgatccggaccgccacatcgagcgggtcaccgagctgcaagaactcttcctcacgcgcgtcgggctcgacatcggcaaggtgtgggtcgcggacgacggcgccgcggtggcggtctggaccacgccggagagcgtcgaagcgggggcggtgttcgccgagatcggcccgcgcatggccgagttgagcggttcccggctggccgcgcagcaacagatggaaggcctcctggcgccgcaccggcccaaggagcccgcgtggttcctggccaccgtcggcgtctcgcccgaccaccagggcaagggtctgggcagcgccgtcgtgctccccggagtggaggcggccgagcgcgccggggtgcccgccttcctggagacctccgcgccccgcaacctccccttctacgagcggctcggcttcaccgtcaccgccgacgtcgaggtgcccgaaggaccgcgcacctggtgcatgacccgcaagcccggtgcctga

SEQ ID NO: 5435 - DNA, 4170 bp, Artificial Sequence
  Synthetic Polynucloetide
atggccttaccagtgaccgccttgctcctgccgctggccttgctgctccacgccgccaggccggaggttcagctgcttgagtctggcggaggactggttcaacctggcggaagcctgagactgtcttgtgccgccagcggcttcacctttagcagctacgccatgagctgggtccgacaggctcctggcaaaggactggaatgggtgtccagcatcagcggcagcggcgactacatctactacgccgatagcgtgaagggcagattcaccatcagccgggacatcagcaagaacaccctgtacctccagatgaacagcctgagagccgaggacaccgccgtgtactactgtgccaaagaaggcaccggcgctaacagcagcctggccgattatagaggccagggcacactggtcaccgtgtctagtggcggaggaagcggcggaggatctgaagttcagctgcttgagtctggcggaggactggttcaacctggcggaagcctgagactgtcttgtgccgccagcggcttcatcttcagcagctacgccatgagctgggtccgacaggctcctggaaagggccaagaatgggtttccggcgttagcggcacaggcgtgaacacctactacgccgatagcgtgaagggcagattcaccatcagccgggacaacagcaagaacaccctgtacctccagatgaacagcctgagagccgaggacaccgccgtgtactattgtgcctctggcaaaggctgggacagcggctcttggtacgaggactatagaggccagggcaccctggtcacagtttcttcaggtaccggcggaggcggatctggcggcggaggtagcggtggcggaggatctgaattcgacatccagatgacacagagccctagcagcctgtctgccagcgtgggagacagagtgaccatcacatgcaaggccagcgaccacatcaacaactggctggcctggtatcagcagaagcctggacaggcccctaagctgctgatctacggcgctaccacactggaaacaggcgtgcccagcagattttctggcagcggctctggcaccgactacaccctgacaatatccagcctccagcctgaggacttcgccacctactactgtcagcagagctggaacaccccttggacattcggccagggcaccaagctggaaatcaagagactcgaggacctgaagaacgtgttcccacctgaggtggccgtgttcgagcctagcaaggccgagatcgcccacacccagaaagccaccctcgtgtgcctggctaccggcttctaccccgaccatgtggaactgtcttggtgggtcaacggcaaagaggtgcacagcggcgtgtgtaccgacccccagccactgaaagaacagcccgccctgaacgacagccggtactgcctgagcagcagactgagagtgtccgccaccttctggcagaacccccggaaccacttcagatgccaggtgcagttctacggcctgagcgagaacgacgagtggacccaggacagagccaagcccgtgacccagatcgtgtctgccgaagcctggggcagagccgattgcggcatcaccagcgccagctaccaccagggcgtgctgagcgccaccatcctgtacgagatcctgctgggcaaggccaccctgtacgccgtgctggtgtctgccctggtgctgatggctatggtcaagcggaaggacagccggggaagggccaagcgatctggatctggagcaacaaacttctcactactcaaacaagcaggtgacgtggaggagaatcccgggcctactagtatggactggatttggcgcatccttttccttgtcggcgctgctaccggcgcccattcccagctccagttgcaagagagcggccctggcttggtaaaaccttccgagacccttagcctcacatgcacggttagtgggggcagcatttcctcaggtgattactattggggatggattcggcaacccccgggtaaaggattggagtggattggtcatatttattatagtggagcgacgtactacaacccaagtctcaaatccagggttacaatatccgtcgatacgagcaggaaccaattcagcttgaaactttctagtgtcaccgcagcagacacagccgtctattactgtacgcgggatgactccagtaattggcggtcccgagggcaagggacactggtcacggtctcctcatctggaggcggtggaagcggtggaggaggatctcaggttcagctgcaagagtctggcggaggacttgctcaagctggcggaagcctgagactgtcttgtgccgcctctggcagaaccttcagcatgggctggtttagacaggcccctggcaaagagagagagttcgtcgccgccatcacatacagcggcggcagcccttactacgcctcttctgtcagaggccggttcaccatcagccgggacaacgccaagaacaccgtgtacctccagatgaacagcctgaagccagaggacaccgccgtgtactactgtgccgccaatccaacctacggcagcgactggaatgccgagaattggggccagggcacccaagtgacagtgtctagtggatccggcggcggaggatctggcggaggcggatctgggggcggaggctctttcgaacaagttcagcttcaacagcctggcgctgagctggtcaaacctggcgcttctgtgaagatgagctgcaaagccagcggctacgccttcagcagctactggatcaactggatgaagcagaaacccggccagggactcgaatggatcggccaaatctatcccggcgacggcgacaccaactacaacggcaagttcaagggcagagccacactgaccgccgatacctctagcagcacagcctacatgcagctgagcagcctgaccagcgaagatagcgccgtgtacttctgtgcccggtccatcacaacagtcgtgggctgcgctatggactattggggccagggaacaagcgtgaccgtgtctagtacgcgtatccagaaccctgatcctgccgtgtaccagctgcgggatagcaagagcagcgacaagagcgtgtgtctgttcaccgacttcgacagccagaccaacgtgtcccagagcaaggactccgacgtgtacatcaccgataagtgcgtgctggacatgcggagcatggacttcaagagcaactccgccgtggcctggtccaacaagtccgatttcgcctgcgccaacgccttcaacaacagcattatccccgaggacacattcttcccaagcagcgacgtgccctgcgacgtgaagctggtggaaaagagcttcgagacagacaccaacctgaacttccagaacctgagcgtgatcggcttcagaatcctgctgctgaaagtggccggctttaacctgctgatgaccctgcggctgtggtccagccgcgccaagagaagcggatctggcgtgaagcagaccctgaatttcgacctgctgaagctggctggcgacgtggaatccaacccaggcccttctagaggccatatgaccgagtacaagcccacggtgcgcctcgccacccgcgacgacgtccccagggccgtacgcaccctcgccgccgcgttcgccgactaccccgccacgcgccacaccgtcgatccggaccgccacatcgagcgggtcaccgagctgcaagaactcttcctcacgcgcgtcgggctcgacatcggcaaggtgtgggtcgcggacgacggcgccgcggtggcggtctggaccacgccggagagcgtcgaagcgggggcggtgttcgccgagatcggcccgcgcatggccgagttgagcggttcccggctggccgcgcagcaacagatggaaggcctcctggcgccgcaccggcccaaggagcccgcgtggttcctggccaccgtcggcgtctcgcccgaccaccagggcaagggtctgggcagcgccgtcgtgctccccggagtggaggcggccgagcgcgccggggtgcccgccttcctggagacctccgcgccccgcaacctccccttctacgagcggctcggcttcaccgtcaccgccgacgtcgaggtgcccgaaggaccgcgcacctggtgcatgacccgcaagcccggtgcctga

SEQ ID NO: 5436 - DNA, 4170 bp, Artificial Sequence
  Synthetic Polynucloetide
atggccttaccagtgaccgccttgctcctgccgctggccttgctgctccacgccgccaggccggaggttcagctgcttgagtctggcggaggactggttcaacctggcggaagcctgagactgtcttgtgccgccagcggcttcacctttagcagctacgccatgagctgggtccgacaggctcctggcaaaggactggaatgggtgtccagcatcagcggcagcggcgactacatctactacgccgatagcgtgaagggcagattcaccatcagccgggacatcagcaagaacaccctgtacctccagatgaacagcctgagagccgaggacaccgccgtgtactactgtgccaaagaaggcaccggcgctaacagcagcctggccgattatagaggccagggcacactggtcaccgtgtctagtggcggaggaagcggcggaggatctgaagttcagctgcttgagtctggcggaggactggttcaacctggcggaagcctgagactgtcttgtgccgccagcggcttcatcttcagcagctacgccatgagctgggtccgacaggctcctggaaagggccaagaatgggtttccggcgttagcggcacaggcgtgaacacctactacgccgatagcgtgaagggcagattcaccatcagccgggacaacagcaagaacaccctgtacctccagatgaacagcctgagagccgaggacaccgccgtgtactattgtgcctctggcaaaggctgggacagcggctcttggtacgaggactatagaggccagggcaccctggtcacagtttcttcaggtaccggcggaggcggatctggcggcggaggtagcggtggcggaggatctgaattcgacatccagatgacacagagccctagcagcctgtctgccagcgtgggagacagagtgaccatcacatgcaaggccagcgaccacatcaacaactggctggcctggtatcagcagaagcctggacaggcccctaagctgctgatctacggcgctaccacactggaaacaggcgtgcccagcagattttctggcagcggctctggcaccgactacaccctgacaatatccagcctccagcctgaggacttcgccacctactactgtcagcagagctggaacaccccttggacattcggccagggcaccaagctggaaatcaagagactcgaggacctgaagaacgtgttcccacctgaggtggccgtgttcgagcctagcgaggccgagatcagccacacccagaaagccaccctcgtgtgcctggctaccggcttctaccccgaccatgtggaactgtcttggtgggtcaacggcaaagaggtgcacagcggcgtgtgtaccgacccccagccactgaaagaacagcccgccctgaacgacagccggtactgcctgagcagcagactgagagtgtccgccaccttctggcagaacccccggaaccacttcagatgccaggtgcagttctacggcctgagcgagaacgacgagtggacccaggacagagccaagcccgtgacccagatcgtgtctgccgaagcctggggcagagccgattgcggctttaccagcgagagctaccagcagggcgtgctgagcgccaccatcctgtacgagatcctgctgggcaaggccaccctgtacgccgtgctggtgtctgccctggtgctgatggctatggtcaagcggaaggacagccggggaagggccaagcgatctggatctggagcaacaaacttctcactactcaaacaagcaggtgacgtggaggagaatcccgggcctactagtatggactggatttggcgcatccttttccttgtcggcgctgctaccggcgcccattcccagctccagttgcaagagagcggccctggcttggtaaaaccttccgagacccttagcctcacatgcacggttagtgggggcagcatttcctcaggtgattactattggggatggattcggcaacccccgggtaaaggattggagtggattggtcatatttattatagtggagcgacgtactacaacccaagtctcaaatccagggttacaatatccgtcgatacgagcaggaaccaattcagcttgaaactttctagtgtcaccgcagcagacacagccgtctattactgtacgcgggatgactccagtaattggcggtcccgagggcaagggacactggtcacggtctcctcatctggaggcggtggaagcggtggaggaggatctcaggttcagctgcaagagtctggcggaggacttgctcaagctggcggaagcctgagactgtcttgtgccgcctctggcagaaccttcagcatgggctggtttagacaggcccctggcaaagagagagagttcgtcgccgccatcacatacagcggcggcagcccttactacgcctcttctgtcagaggccggttcaccatcagccgggacaacgccaagaacaccgtgtacctccagatgaacagcctgaagccagaggacaccgccgtgtactactgtgccgccaatccaacctacggcagcgactggaatgccgagaattggggccagggcacccaagtgacagtgtctagtggatccggcggcggaggatctggcggaggcggatctgggggcggaggctctttcgaacaagttcagcttcaacagcctggcgctgagctggtcaaacctggcgcttctgtgaagatgagctgcaaagccagcggctacgccttcagcagctactggatcaactggatgaagcagaaacccggccagggactcgaatggatcggccaaatctatcccggcgacggcgacaccaactacaacggcaagttcaagggcagagccacactgaccgccgatacctctagcagcacagcctacatgcagctgagcagcctgaccagcgaagatagcgccgtgtacttctgtgcccggtccatcacaacagtcgtgggctgcgctatggactattggggccagggaacaagcgtgaccgtgtctagtacgcgtatccagaaccctgatcctgccgtgtaccagctgcgggatagcaagagcagcgacaagagcgtgtgtctgttcaccgacttcgacagccagaccaacgtgtcccagagcaaggactccgacgtgtacatcaccgataagtgcgtgctggacatgcggagcatggacttcaagagcaactccgccgtggcctggtccaacaagtccgatttcgcctgcgccaacgccttcaacaacagcattatccccgaggacacattcttcccaagccccgagagcagctgcgacgtgaagctggtggaaaagagcttcgagacagacaccaacctgaacttccagaacctgagcgtgatcggcttcagaatcctgctgctgaaagtggccggctttaacctgctgatgaccctgcggctgtggtccagccgcgccaagagaagcggatctggcgtgaagcagaccctgaatttcgacctgctgaagctggctggcgacgtggaatccaacccaggcccttctagaggccatatgaccgagtacaagcccacggtgcgcctcgccacccgcgacgacgtccccagggccgtacgcaccctcgccgccgcgttcgccgactaccccgccacgcgccacaccgtcgatccggaccgccacatcgagcgggtcaccgagctgcaagaactcttcctcacgcgcgtcgggctcgacatcggcaaggtgtgggtcgcggacgacggcgccgcggtggcggtctggaccacgccggagagcgtcgaagcgggggcggtgttcgccgagatcggcccgcgcatggccgagttgagcggttcccggctggccgcgcagcaacagatggaaggcctcctggcgccgcaccggcccaaggagcccgcgtggttcctggccaccgtcggcgtctcgcccgaccaccagggcaagggtctgggcagcgccgtcgtgctccccggagtggaggcggccgagcgcgccggggtgcccgccttcctggagacctccgcgccccgcaacctccccttctacgagcggctcggcttcaccgtcaccgccgacgtcgaggtgcccgaaggaccgcgcacctggtgcatgacccgcaagcccggtgcctga

SEQ ID NO: 5437 - DNA, 3468 bp, Artificial Sequence
  Synthetic Polynucloetide
atggccttaccagtgaccgccttgctcctgccgctggccttgctgctccacgccgccaggccggaggttcagctgcttgagtctggcggaggactggttcaacctggcggaagcctgagactgtcttgtgccgccagcggcttcacctttagcagctacgccatgagctgggtccgacaggctcctggcaaaggactggaatgggtgtccagcatcagcggcagcggcgactacatctactacgccgatagcgtgaagggcagattcaccatcagccgggacatcagcaagaacaccctgtacctccagatgaacagcctgagagccgaggacaccgccgtgtactactgtgccaaagaaggcaccggcgctaacagcagcctggccgattatagaggccagggcacactggtcaccgtgtctagtggcggaggaagcggcggaggatctgaagttcagctgcttgagtctggcggaggactggttcaacctggcggaagcctgagactgtcttgtgccgccagcggcttcatcttcagcagctacgccatgagctgggtccgacaggctcctggaaagggccaagaatgggtttccggcgttagcggcacaggcgtgaacacctactacgccgatagcgtgaagggcagattcaccatcagccgggacaacagcaagaacaccctgtacctccagatgaacagcctgagagccgaggacaccgccgtgtactattgtgcctctggcaaaggctgggacagcggctcttggtacgaggactatagaggccagggcaccctggtcacagtttcttcaggtaccggcggaggcggatctggcggcggaggtagcggtggcggaggatctgaattcgacatccagatgacacagagccctagcagcctgtctgccagcgtgggagacagagtgaccatcacatgcaaggccagcgaccacatcaacaactggctggcctggtatcagcagaagcctggacaggcccctaagctgctgatctacggcgctaccacactggaaacaggcgtgcccagcagattttctggcagcggctctggcaccgactacaccctgacaatatccagcctccagcctgaggacttcgccacctactactgtcagcagagctggaacaccccttggacattcggccagggcaccaagctggaaatcaagagactcgaggacctgaagaacgtgttcccacctgaggtggccgtgttcgagcctagcgaggccgagatcagccacacccagaaagccaccctcgtgtgcctggctaccggcttctaccccgaccatgtggaactgtcttggtgggtcaacggcaaagaggtgcacagcggcgtgtgtaccgacccccagccactgaaagaacagcccgccctgaacgacagccggtactgcctgagcagcagactgagagtgtccgccaccttctggcagaacccccggaaccacttcagatgccaggtgcagttctacggcctgagcgagaacgacgagtggacccaggacagagccaagcccgtgacccagatcgtgtctgccgaagcctggggcagagccgattgcggctttaccagcgagagctaccagcagggcgtgctgagcgccaccatcctgtacgagatcctgctgggcaaggccaccctgtacgccgtgctggtgtctgccctggtgctgatggctatggtcaagcggaaggacagccggggaagggccaagcgatctggatctggagcaacaaacttctcactactcaaacaagcaggtgacgtggaggagaatcccgggcctactagtatggactggatttggcgcatccttttccttgtcggcgctgctaccggcgcccattcccagctccagttgcaagagagcggccctggcttggtaaaaccttccgagacccttagcctcacatgcacggttagtgggggcagcatttcctcaggtgattactattggggatggattcggcaacccccgggtaaaggattggagtggattggtcatatttattatagtggagcgacgtactacaacccaagtctcaaatccagggttacaatatccgtcgatacgagcaggaaccaattcagcttgaaactttctagtgtcaccgcagcagacacagccgtctattactgtacgcgggatgactccagtaattggcggtcccgagggcaagggacactggtcacggtctcctcatctggaggcggtggaagcggtggaggaggatctcaggttcagctgcaagagtctggcggaggacttgctcaagctggcggaagcctgagactgtcttgtgccgcctctggcagaaccttcagcatgggctggtttagacaggcccctggcaaagagagagagttcgtcgccgccatcacatacagcggcggcagcccttactacgcctcttctgtcagaggccggttcaccatcagccgggacaacgccaagaacaccgtgtacctccagatgaacagcctgaagccagaggacaccgccgtgtactactgtgccgccaatccaacctacggcagcgactggaatgccgagaattggggccagggcacccaagtgacagtgtctagtggatccggcggcggaggatctggcggaggcggatctgggggcggaggctctttcgaacaagttcagcttcaacagcctggcgctgagctggtcaaacctggcgcttctgtgaagatgagctgcaaagccagcggctacgccttcagcagctactggatcaactggatgaagcagaaacccggccagggactcgaatggatcggccaaatctatcccggcgacggcgacaccaactacaacggcaagttcaagggcagagccacactgaccgccgatacctctagcagcacagcctacatgcagctgagcagcctgaccagcgaagatagcgccgtgtacttctgtgcccggtccatcacaacagtcgtgggctgcgctatggactattggggccagggaacaagcgtgaccgtgtctagtacgcgtatccagaaccctgatcctgccgtgtaccagctgcgggatagcaagagcagcgacaagagcgtgtgtctgttcaccgacttcgacagccagaccaacgtgtcccagagcaaggactccgacgtgtacatcaccgataagtgcgtgctggacatgcggagcatggacttcaagagcaactccgccgtggcctggtccaacaagtccgatttcgcctgcgccaacgccttcaacaacagcattatccccgaggacacattcttcccaagccccgagagcagctgcgacgtgaagctggtggaaaagagcttcgagacagacaccaacctgaacttccagaacctgagcgtgatcggcttcagaatcctgctgctgaaagtggccggctttaacctgctgatgaccctgcggctgtggtccagc

SEQ ID NO: 5438 - DNA, 4143 bp, Artificial Sequence
  Synthetic Polynucloetide
atggccttaccagtgaccgccttgctcctgccgctggccttgctgctccacgccgccaggccggaggttcagctgcttgagtctggcggaggactggttcaacctggcggaagcctgagactgtcttgtgccgccagcggcttcacctttagcagctacgccatgagctgggtccgacaggctcctggcaaaggactggaatgggtgtccagcatcagcggcagcggcgactacatctactacgccgatagcgtgaagggcagattcaccatcagccgggacatcagcaagaacaccctgtacctccagatgaacagcctgagagccgaggacaccgccgtgtactactgtgccaaagaaggcaccggcgctaacagcagcctggccgattatagaggccagggcacactggtcaccgtgtctagtggcggaggaagcggcggaggatctgaagttcagctgcttgagtctggcggaggactggttcaacctggcggaagcctgagactgtcttgtgccgccagcggcttcatcttcagcagctacgccatgagctgggtccgacaggctcctggaaagggccaagaatgggtttccggcgttagcggcacaggcgtgaacacctactacgccgatagcgtgaagggcagattcaccatcagccgggacaacagcaagaacaccctgtacctccagatgaacagcctgagagccgaggacaccgccgtgtactattgtgcctctggcaaaggctgggacagcggctcttggtacgaggactatagaggccagggcaccctggtcacagtttcttcaggtaccggcggaggcggatctggcggcggaggtagcggtggcggaggatctgaattcgacatccagatgacacagagccctagcagcctgtctgccagcgtgggagacagagtgaccatcacatgcaaggccagcgaccacatcaacaactggctggcctggtatcagcagaagcctggacaggcccctaagctgctgatctacggcgctaccacactggaaacaggcgtgcccagcagattttctggcagcggctctggcaccgactacaccctgacaatatccagcctccagcctgaggacttcgccacctactactgtcagcagagctggaacaccccttggacattcggccagggcaccaagctggaaatcaagagactcgaggacctgaagaacgtgttcccacctgaggtggccgtgttcgagcctagcgaggccgagatcagccacacccagaaagccaccctcgtgtgcctggctaccggcttctaccccgaccatgtggaactgtcttggtgggtcaacggcaaagaggtgcacagcggcgtgtgtaccgacccccagccactgaaagaacagcccgccctgaacgacagccggtactgcctgagcagcagactgagagtgtccgccaccttctggcagaacccccggaaccacttcagatgccaggtgcagttctacggcctgagcgagaacgacgagtggacccaggacagagccaagcccgtgacccagatcgtgtctgccgaagcctggggcagagccgattgcggctttaccagcgagagctaccagcagggcgtgctgagcgccaccatcctgtacgagatcctgctgggcaaggccaccctgtacgccgtgctggtgtctgccctggtgctgatggctatggtcaagcggaaggacagccggggaagggccaagcgatctggatctggagcaacaaacttctcactactcaaacaagcaggtgacgtggaggagaatcccgggcctactagtatggactggatttggcgcatccttttccttgtcggcgctgctaccggcgcccattcccagctccagttgcaagagagcggccctggcttggtaaaaccttccgagacccttagcctcacatgcacggttagtgggggcagcatttcctcaggtgattactattggggatggattcggcaacccccgggtaaaggattggagtggattggtcatatttattatagtggagcgacgtactacaacccaagtctcaaatccagggttacaatatccgtcgatacgagcaggaaccaattcagcttgaaactttctagtgtcaccgcagcagacacagccgtctattactgtacgcgggatgactccagtaattggcggtcccgagggcaagggacactggtcacggtctcctcatctggaggcggtggaagcggtggaggaggatctcaggttcagctgcaagagtctggcggaggacttgctcaagctggcggaagcctgagactgtcttgtgccgcctctggcagaaccttcagcatgggctggtttagacaggcccctggcaaagagagagagttcgtcgccgccatcacatacagcggcggcagcccttactacgcctcttctgtcagaggccggttcaccatcagccgggacaacgccaagaacaccgtgtacctccagatgaacagcctgaagccagaggacaccgccgtgtactactgtgccgccaatccaacctacggcagcgactggaatgccgagaattggggccagggcacccaagtgacagtgtctagtggatccggcggcggaggatctggcggaggcggatctgggggcggaggctctttcgaacaagttcagcttcaacagcctggcgctgagctggtcaaacctggcgcttctgtgaagatgagctgcaaagccagcggctacgccttcagcagctactggatcaactggatgaagcagaaacccggccagggactcgaatggatcggccaaatctatcccggcgacggcgacaccaactacaacggcaagttcaagggcagagccacactgaccgccgatacctctagcagcacagcctacatgcagctgagcagcctgaccagcgaagatagcgccgtgtacttctgtgcccggtccatcacaacagtcgtgggctgcgctatggactattggggccagggaacaagcgtgaccgtgtctagtacgcgtatccagaaccctgatcctgccgtgtaccagctgcgggatagcaagagcagcgacaagagcgtgtgtctgttcaccgacttcgacagccagaccaacgtgtcccagagcaaggactccgacgtgtacatcaccgataagtgcgtgctggacatgcggagcatggacttcaagagcaactccgccgtggcctggtccaacaagtccgatttcgcctgcgccaacgccttcaacaacagcattatccccgaggacacattcttcccaagccccgagagcagctgcgacgtgaagctggtggaaaagagcttcgagacagacaccaacctgaacttccagaacctgagcgtgatcggcttcagaatcctgctgctgaaagtggccggctttaacctgctgatgaccctgcggctgtggtccagccgcgccaagagaagcggatctggcgtgaagcagaccctgaatttcgacctgctgaagctggctggcgacgtggaatccaacccaggcccttctagaggcgggatccacaccatggctacctacgaggtgctgtgcgaggtggcaagaaagctgggcaccgacgacagagaagtggtgctgttcctgctgaacgtgttcatccctcagcctacactggcccagctgatcggtgcactgagagccctgaaagaggaaggccggctgacctttcctctgctggccgaatgcctgttcagagccggaagaagggatctgctgcgggacctgctgcatctggaccccagatttctggaaagacacctggccggcaccatgagctacttcagcccttaccagctgaccgtgctgcacgttgacggcgaactgtgcgccagagatattcggagcctgatcttcctgagcaaggacaccatcggcagccggtctacccctcagacatttctgcactgggtgtactgcatggaaaacctggacctgctcggccccacagatgtggatgccctgatgtccatgctgagaagcctgagcagagtggacctccagagacaggtgcagacactgatgggactgcacctgagcggacctagccacagccagcactacagacacacccct

SEQ ID NO: 5439 - DNA, 3480 bp, Artificial Sequence
  Synthetic Polynucloetide
atggccttaccagtgaccgccttgctcctgccgctggccttgctgctccacgccgccaggccggaggttcagctgcttgagtctggcggaggactggttcaacctggcggaagcctgagactgtcttgtgccgccagcggcttcacctttagcagctacgccatgagctgggtccgacaggctcctggcaaaggactggaatgggtgtccagcatcagcggcagcggcgactacatctactacgccgatagcgtgaagggcagattcaccatcagccgggacatcagcaagaacaccctgtacctccagatgaacagcctgagagccgaggacaccgccgtgtactactgtgccaaagaaggcaccggcgctaacagcagcctggccgattatagaggccagggcacactggtcaccgtgtctagtggcggaggaagcggcggaggatctgaagttcagctgcttgagtctggcggaggactggttcaacctggcggaagcctgagactgtcttgtgccgccagcggcttcatcttcagcagctacgccatgagctgggtccgacaggctcctggaaagggccaagaatgggtttccggcgttagcggcacaggcgtgaacacctactacgccgatagcgtgaagggcagattcaccatcagccgggacaacagcaagaacaccctgtacctccagatgaacagcctgagagccgaggacaccgccgtgtactattgtgcctctggcaaaggctgggacagcggctcttggtacgaggactatagaggccagggcaccctggtcacagtttcttcaggtaccggcggaggcggatctggcggcggaggtagcggtggcggaggatctgaattcgacatccagatgacacagagccctagcagcctgtctgccagcgtgggagacagagtgaccatcacatgcaaggccagcgaccacatcaacaactggctggcctggtatcagcagaagcctggacaggcccctaagctgctgatctacggcgctaccacactggaaacaggcgtgcccagcagattttctggcagcggctctggcaccgactacaccctgacaatatccagcctccagcctgaggacttcgccacctactactgtcagcagagctggaacaccccttggacattcggccagggcaccaagctggaaatcaagagactcgagatccagaaccctgatcctgccgtgtaccagctgcgggatagcaagagcagcgacaagagcgtgtgtctgttcaccgacttcgacagccagaccaacgtgtcccagagcaaggactccgacgtgtacatcaccgataagtgcgtgctggacatgcggagcatggacttcaagagcaactccgccgtggcctggtccaacaagtccgatttcgcctgcgccaacgccttcaacaacagcattatccccgaggacacattcttcccaagccccgagagcagctgcgacgtgaagctggtggaaaagagcttcgagacagacaccaacctgaacttccagaacctgagcgtgatcggcttcagaatcctgctgctgaaagtggccggctttaacctgctgatgaccctgcggctgtggtccagccgcgccaagagaagcggatctggcgtgaagcagaccctgaatttcgacctgctgaagctggctggcgacgtggaatccaacccaggccctactagtatggactggatttggcgcatccttttccttgtcggcgctgctaccggcgcccattcccagctccagttgcaagagagcggccctggcttggtaaaaccttccgagacccttagcctcacatgcacggttagtgggggcagcatttcctcaggtgattactattggggatggattcggcaacccccgggtaaaggattggagtggattggtcatatttattatagtggagcgacgtactacaacccaagtctcaaatccagggttacaatatccgtcgatacgagcaggaaccaattcagcttgaaactttctagtgtcaccgcagcagacacagccgtctattactgtacgcgggatgactccagtaattggcggtcccgagggcaagggacactggtcacggtctcctcatctggaggcggtggaagcggtggaggaggatctcaggttcagctgcaagagtctggcggaggacttgctcaagctggcggaagcctgagactgtcttgtgccgcctctggcagaaccttcagcatgggctggtttagacaggcccctggcaaagagagagagttcgtcgccgccatcacatacagcggcggcagcccttactacgcctcttctgtcagaggccggttcaccatcagccgggacaacgccaagaacaccgtgtacctccagatgaacagcctgaagccagaggacaccgccgtgtactactgtgccgccaatccaacctacggcagcgactggaatgccgagaattggggccagggcacccaagtgacagtgtctagtggatccggcggcggaggatctggcggaggcggatctgggggcggaggctctttcgaacaagttcagcttcaacagcctggcgctgagctggtcaaacctggcgcttctgtgaagatgagctgcaaagccagcggctacgccttcagcagctactggatcaactggatgaagcagaaacccggccagggactcgaatggatcggccaaatctatcccggcgacggcgacaccaactacaacggcaagttcaagggcagagccacactgaccgccgatacctctagcagcacagcctacatgcagctgagcagcctgaccagcgaagatagcgccgtgtacttctgtgcccggtccatcacaacagtcgtgggctgcgctatggactattggggccagggaacaagcgtgaccgtgtctagtacgcgtgaggacctgaagaacgtgttcccacctgaggtggccgtgttcgagcctagcgaggccgagatcagccacacccagaaagccaccctcgtgtgcctggctaccggcttctaccccgaccatgtggaactgtcttggtgggtcaacggcaaagaggtgcacagcggcgtgtgtaccgacccccagccactgaaagaacagcccgccctgaacgacagccggtactgcctgagcagcagactgagagtgtccgccaccttctggcagaacccccggaaccacttcagatgccaggtgcagttctacggcctgagcgagaacgacgagtggacccaggacagagccaagcccgtgacccagatcgtgtctgccgaagcctggggcagagccgattgcggctttaccagcgagagctaccagcagggcgtgctgagcgccaccatcctgtacgagatcctgctgggcaaggccaccctgtacgccgtgctggtgtctgccctggtgctgatggctatggtcaagcggaaggacagccgggga

SEQ ID NO: 5440 - DNA, 4146 bp, Artificial Sequence
  Synthetic Polynucloetide
atggccttaccagtgaccgccttgctcctgccgctggccttgctgctccacgccgccaggccggaggttcagctgcttgagtctggcggaggactggttcaacctggcggaagcctgagactgtcttgtgccgccagcggcttcacctttagcagctacgccatgagctgggtccgacaggctcctggcaaaggactggaatgggtgtccagcatcagcggcagcggcgactacatctactacgccgatagcgtgaagggcagattcaccatcagccgggacatcagcaagaacaccctgtacctccagatgaacagcctgagagccgaggacaccgccgtgtactactgtgccaaagaaggcaccggcgctaacagcagcctggccgattatagaggccagggcacactggtcaccgtgtctagtggcggaggaagcggcggaggatctgaagttcagctgcttgagtctggcggaggactggttcaacctggcggaagcctgagactgtcttgtgccgccagcggcttcatcttcagcagctacgccatgagctgggtccgacaggctcctggaaagggccaagaatgggtttccggcgttagcggcacaggcgtgaacacctactacgccgatagcgtgaagggcagattcaccatcagccgggacaacagcaagaacaccctgtacctccagatgaacagcctgagagccgaggacaccgccgtgtactattgtgcctctggcaaaggctgggacagcggctcttggtacgaggactatagaggccagggcaccctggtcacagtttcttcaggtaccggcggaggcggatctggcggcggaggtagcggtggcggaggatctgaattcgacatccagatgacacagagccctagcagcctgtctgccagcgtgggagacagagtgaccatcacatgcaaggccagcgaccacatcaacaactggctggcctggtatcagcagaagcctggacaggcccctaagctgctgatctacggcgctaccacactggaaacaggcgtgcccagcagattttctggcagcggctctggcaccgactacaccctgacaatatccagcctccagcctgaggacttcgccacctactactgtcagcagagctggaacaccccttggacattcggccagggcaccaagctggaaatcaagagactcgagatccagaaccctgatcctgccgtgtaccagctgcgggatagcaagagcagcgacaagagcgtgtgtctgttcaccgacttcgacagccagaccaacgtgtcccagagcaaggactccgacgtgtacatcaccgataagtgcgtgctggacatgcggagcatggacttcaagagcaactccgccgtggcctggtccaacaagtccgatttcgcctgcgccaacgccttcaacaacagcattatccccgaggacacattcttcccaagccccgagagcagctgcgacgtgaagctggtggaaaagagcttcgagacagacaccaacctgaacttccagaacctgagcgtgatcggcttcagaatcctgctgctgaaagtggccggctttaacctgctgatgaccctgcggctgtggtccagccgcgccaagagaagcggatctggcgtgaagcagaccctgaatttcgacctgctgaagctggctggcgacgtggaatccaacccaggccctactagtatggactggatttggcgcatccttttccttgtcggcgctgctaccggcgcccattcccagctccagttgcaagagagcggccctggcttggtaaaaccttccgagacccttagcctcacatgcacggttagtgggggcagcatttcctcaggtgattactattggggatggattcggcaacccccgggtaaaggattggagtggattggtcatatttattatagtggagcgacgtactacaacccaagtctcaaatccagggttacaatatccgtcgatacgagcaggaaccaattcagcttgaaactttctagtgtcaccgcagcagacacagccgtctattactgtacgcgggatgactccagtaattggcggtcccgagggcaagggacactggtcacggtctcctcatctggaggcggtggaagcggtggaggaggatctcaggttcagctgcaagagtctggcggaggacttgctcaagctggcggaagcctgagactgtcttgtgccgcctctggcagaaccttcagcatgggctggtttagacaggcccctggcaaagagagagagttcgtcgccgccatcacatacagcggcggcagcccttactacgcctcttctgtcagaggccggttcaccatcagccgggacaacgccaagaacaccgtgtacctccagatgaacagcctgaagccagaggacaccgccgtgtactactgtgccgccaatccaacctacggcagcgactggaatgccgagaattggggccagggcacccaagtgacagtgtctagtggatccggcggcggaggatctggcggaggcggatctgggggcggaggctctttcgaacaagttcagcttcaacagcctggcgctgagctggtcaaacctggcgcttctgtgaagatgagctgcaaagccagcggctacgccttcagcagctactggatcaactggatgaagcagaaacccggccagggactcgaatggatcggccaaatctatcccggcgacggcgacaccaactacaacggcaagttcaagggcagagccacactgaccgccgatacctctagcagcacagcctacatgcagctgagcagcctgaccagcgaagatagcgccgtgtacttctgtgcccggtccatcacaacagtcgtgggctgcgctatggactattggggccagggaacaagcgtgaccgtgtctagtacgcgtgaggacctgaagaacgtgttcccacctgaggtggccgtgttcgagcctagcgaggccgagatcagccacacccagaaagccaccctcgtgtgcctggctaccggcttctaccccgaccatgtggaactgtcttggtgggtcaacggcaaagaggtgcacagcggcgtgtgtaccgacccccagccactgaaagaacagcccgccctgaacgacagccggtactgcctgagcagcagactgagagtgtccgccaccttctggcagaacccccggaaccacttcagatgccaggtgcagttctacggcctgagcgagaacgacgagtggacccaggacagagccaagcccgtgacccagatcgtgtctgccgaagcctggggcagagccgattgcggctttaccagcgagagctaccagcagggcgtgctgagcgccaccatcctgtacgagatcctgctgggcaaggccaccctgtacgccgtgctggtgtctgccctggtgctgatggctatggtcaagcggaaggacagccggggaagggccaagcgatctggatctggagcaacaaacttctcactactcaaacaagcaggtgacgtggaggagaatcccgggccttctagaggcgggatccacaccatggctacctacgaggtgctgtgcgaggtggcaagaaagctgggcaccgacgacagagaagtggtgctgttcctgctgaacgtgttcatccctcagcctacactggcccagctgatcggtgcactgagagccctgaaagaggaaggccggctgacctttcctctgctggccgaatgcctgttcagagccggaagaagggatctgctgcgggacctgctgcatctggaccccagatttctggaaagacacctggccggcaccatgagctacttcagcccttaccagctgaccgtgctgcacgttgacggcgaactgtgcgccagagatattcggagcctgatcttcctgagcaaggacaccatcggcagccggtctacccctcagacatttctgcactgggtgtactgcatggaaaacctggacctgctcggccccacagatgtggatgccctgatgtccatgctgagaagcctgagcagagtggacctccagagacaggtgcagacactgatgggactgcacctgagcggacctagccacagccagcactacagacacacccct

SEQ ID NO: 5441 - DNA, 4170 bp, Artificial Sequence
  Synthetic Polynucloetide
atggccttaccagtgaccgccttgctcctgccgctggccttgctgctccacgccgccaggccggaggttcagctgcttgagtctggcggaggactggttcaacctggcggaagcctgagactgtcttgtgccgccagcggcttcacctttagcagctacgccatgagctgggtccgacaggctcctggcaaaggactggaatgggtgtccagcatcagcggcagcggcgactacatctactacgccgatagcgtgaagggcagattcaccatcagccgggacatcagcaagaacaccctgtacctccagatgaacagcctgagagccgaggacaccgccgtgtactactgtgccaaagaaggcaccggcgctaacagcagcctggccgattatagaggccagggcacactggtcaccgtgtctagtggcggaggaagcggcggaggatctgaagttcagctgcttgagtctggcggaggactggttcaacctggcggaagcctgagactgtcttgtgccgccagcggcttcatcttcagcagctacgccatgagctgggtccgacaggctcctggaaagggccaagaatgggtttccggcgttagcggcacaggcgtgaacacctactacgccgatagcgtgaagggcagattcaccatcagccgggacaacagcaagaacaccctgtacctccagatgaacagcctgagagccgaggacaccgccgtgtactattgtgcctctggcaaaggctgggacagcggctcttggtacgaggactatagaggccagggcaccctggtcacagtttcttcaggtaccggcggaggcggatctggcggcggaggtagcggtggcggaggatctgaattcgacatccagatgacacagagccctagcagcctgtctgccagcgtgggagacagagtgaccatcacatgcaaggccagcgaccacatcaacaactggctggcctggtatcagcagaagcctggacaggcccctaagctgctgatctacggcgctaccacactggaaacaggcgtgcccagcagattttctggcagcggctctggcaccgactacaccctgacaatatccagcctccagcctgaggacttcgccacctactactgtcagcagagctggaacaccccttggacattcggccagggcaccaagctggaaatcaagagactcgaggacctgaagaacgtgttcccacctgaggtggccgtgttcgagcctagcgaggccgagatcagccacacccagaaagccaccctcgtgtgcctggctaccggcttctaccccgaccatgtggaactgtcttggtgggtcaacggcaaagaggtgcacagcggcgtgtctaccgacccccagccactgaaagaacagcccgccctgaacgacagccggtactgcctgagcagcagactgagagtgtccgccaccttctggcagaacccccggaaccacttcagatgccaggtgcagttctacggcctgagcgagaacgacgagtggacccaggacagagccaagcccgtgacccagatcgtgtctgccgaagcctggggcagagccgattgcggctttaccagcgagagctaccagcagggcgtgctgagcgccaccatcctgtacgagatcctgctgggcaaggccaccctgtacgccgtgctggtgtctgccctggtgctgatggctatggtcaagcggaaggacagccggggaagggccaagcgatctggatctggagcaacaaacttctcactactcaaacaagcaggtgacgtggaggagaatcccgggcctactagtatggactggatttggcgcatccttttccttgtcggcgctgctaccggcgcccattcccagctccagttgcaagagagcggccctggcttggtaaaaccttccgagacccttagcctcacatgcacggttagtgggggcagcatttcctcaggtgattactattggggatggattcggcaacccccgggtaaaggattggagtggattggtcatatttattatagtggagcgacgtactacaacccaagtctcaaatccagggttacaatatccgtcgatacgagcaggaaccaattcagcttgaaactttctagtgtcaccgcagcagacacagccgtctattactgtacgcgggatgactccagtaattggcggtcccgagggcaagggacactggtcacggtctcctcatctggaggcggtggaagcggtggaggaggatctcaggttcagctgcaagagtctggcggaggacttgctcaagctggcggaagcctgagactgtcttgtgccgcctctggcagaaccttcagcatgggctggtttagacaggcccctggcaaagagagagagttcgtcgccgccatcacatacagcggcggcagcccttactacgcctcttctgtcagaggccggttcaccatcagccgggacaacgccaagaacaccgtgtacctccagatgaacagcctgaagccagaggacaccgccgtgtactactgtgccgccaatccaacctacggcagcgactggaatgccgagaattggggccagggcacccaagtgacagtgtctagtggatccggcggcggaggatctggcggaggcggatctgggggcggaggctctttcgaacaagttcagcttcaacagcctggcgctgagctggtcaaacctggcgcttctgtgaagatgagctgcaaagccagcggctacgccttcagcagctactggatcaactggatgaagcagaaacccggccagggactcgaatggatcggccaaatctatcccggcgacggcgacaccaactacaacggcaagttcaagggcagagccacactgaccgccgatacctctagcagcacagcctacatgcagctgagcagcctgaccagcgaagatagcgccgtgtacttctgtgcccggtccatcacaacagtcgtgggctgcgctatggactattggggccagggaacaagcgtgaccgtgtctagtacgcgtatccagaaccctgatcctgccgtgtaccagctgcgggatagcaagagcagcgacaagagcgtgtgtctgttcaccgacttcgacagccagaccaacgtgtcccagagcaaggactccgacgtgtacatcaccgataagaccgtgctggacatgcggagcatggacttcaagagcaactccgccgtggcctggtccaacaagtccgatttcgcctgcgccaacgccttcaacaacagcattatccccgaggacacattcttcccaagccccgagagcagctgcgacgtgaagctggtggaaaagagcttcgagacagacaccaacctgaacttccagaacctgagcgtgatcggcttcagaatcctgctgctgaaagtggccggctttaacctgctgatgaccctgcggctgtggtccagccgcgccaagagaagcggatctggcgtgaagcagaccctgaatttcgacctgctgaagctggctggcgacgtggaatccaacccaggcccttctagaggccatatgaccgagtacaagcccacggtgcgcctcgccacccgcgacgacgtccccagggccgtacgcaccctcgccgccgcgttcgccgactaccccgccacgcgccacaccgtcgatccggaccgccacatcgagcgggtcaccgagctgcaagaactcttcctcacgcgcgtcgggctcgacatcggcaaggtgtgggtcgcggacgacggcgccgcggtggcggtctggaccacgccggagagcgtcgaagcgggggcggtgttcgccgagatcggcccgcgcatggccgagttgagcggttcccggctggccgcgcagcaacagatggaaggcctcctggcgccgcaccggcccaaggagcccgcgtggttcctggccaccgtcggcgtctcgcccgaccaccagggcaagggtctgggcagcgccgtcgtgctccccggagtggaggcggccgagcgcgccggggtgcccgccttcctggagacctccgcgccccgcaacctccccttctacgagcggctcggcttcaccgtcaccgccgacgtcgaggtgcccgaaggaccgcgcacctggtgcatgacccgcaagcccggtgcctga

SEQ ID NO: 5442 - DNA, 4416 bp, Artificial Sequence
  Synthetic Polynucloetide
atggccttaccagtgaccgccttgctcctgccgctggccttgctgctccacgccgccaggccggaggttcagctgcttgagtctggcggaggactggttcaacctggcggaagcctgagactgtcttgtgccgccagcggcttcacctttagcagctacgccatgagctgggtccgacaggctcctggcaaaggactggaatgggtgtccagcatcagcggcagcggcgactacatctactacgccgatagcgtgaagggcagattcaccatcagccgggacatcagcaagaacaccctgtacctccagatgaacagcctgagagccgaggacaccgccgtgtactactgtgccaaagaaggcaccggcgctaacagcagcctggccgattatagaggccagggcacactggtcaccgtgtctagtggcggaggaagcggcggaggatctgaagttcagctgcttgagtctggcggaggactggttcaacctggcggaagcctgagactgtcttgtgccgccagcggcttcatcttcagcagctacgccatgagctgggtccgacaggctcctggaaagggccaagaatgggtttccggcgttagcggcacaggcgtgaacacctactacgccgatagcgtgaagggcagattcaccatcagccgggacaacagcaagaacaccctgtacctccagatgaacagcctgagagccgaggacaccgccgtgtactattgtgcctctggcaaaggctgggacagcggctcttggtacgaggactatagaggccagggcaccctggtcacagtttcttcaggtaccggcggaggcggatctggcggcggaggtagcggtggcggaggatctgaattcgacatccagatgacacagagccctagcagcctgtctgccagcgtgggagacagagtgaccatcacatgcaaggccagcgaccacatcaacaactggctggcctggtatcagcagaagcctggacaggcccctaagctgctgatctacggcgctaccacactggaaacaggcgtgcccagcagattttctggcagcggctctggcaccgactacaccctgacaatatccagcctccagcctgaggacttcgccacctactactgtcagcagagctggaacaccccttggacattcggccagggcaccaagctggaaatcaagagactcgaggacctgaagaacgtgttcccacctgaggtggccgtgttcgagcctagcgaggccgagatcagccacacccagaaagccaccctcgtgtgcctggctaccggcttctaccccgaccatgtggaactgtcttggtgggtcaacggcaaagaggtgcacagcggcgtgtctaccgacccccagccactgaaagaacagcccgccctgaacgacagccggtactgcctgagcagcagactgagagtgtccgccaccttctggcagaacccccggaaccacttcagatgccaggtgcagttctacggcctgagcgagaacgacgagtggacccaggacagagccaagcccgtgacccagatcgtgtctgccgaagcctggggcagagccgattgcggctttaccagcgagagctaccagcagggcgtgctgagcgccaccatcctgtacgagatcctgctgggcaaggccaccctgtacgccgtgctggtgtctgccctggtgctgatggctatggtcaagcggaaggacagccggggaagggccaagcgatctggatctggagcaacaaacttctcactactcaaacaagcaggtgacgtggaggagaatcccgggcctactagtatggactggatttggcgcatccttttccttgtcggcgctgctaccggcgcccattcccagctccagttgcaagagagcggccctggcttggtaaaaccttccgagacccttagcctcacatgcacggttagtgggggcagcatttcctcaggtgattactattggggatggattcggcaacccccgggtaaaggattggagtggattggtcatatttattatagtggagcgacgtactacaacccaagtctcaaatccagggttacaatatccgtcgatacgagcaggaaccaattcagcttgaaactttctagtgtcaccgcagcagacacagccgtctattactgtacgcgggatgactccagtaattggcggtcccgagggcaagggacactggtcacggtctcctcatctggaggcggtggaagcggtggaggaggatctcaggttcagctgcaagagtctggcggaggacttgctcaagctggcggaagcctgagactgtcttgtgccgcctctggcagaaccttcagcatgggctggtttagacaggcccctggcaaagagagagagttcgtcgccgccatcacatacagcggcggcagcccttactacgcctcttctgtcagaggccggttcaccatcagccgggacaacgccaagaacaccgtgtacctccagatgaacagcctgaagccagaggacaccgccgtgtactactgtgccgccaatccaacctacggcagcgactggaatgccgagaattggggccagggcacccaagtgacagtgtctagtggatccggcggcggaggatctggcggaggcggatctgggggcggaggctctttcgaacaagttcagcttcaacagcctggcgctgagctggtcaaacctggcgcttctgtgaagatgagctgcaaagccagcggctacgccttcagcagctactggatcaactggatgaagcagaaacccggccagggactcgaatggatcggccaaatctatcccggcgacggcgacaccaactacaacggcaagttcaagggcagagccacactgaccgccgatacctctagcagcacagcctacatgcagctgagcagcctgaccagcgaagatagcgccgtgtacttctgtgcccggtccatcacaacagtcgtgggctgcgctatggactattggggccagggaacaagcgtgaccgtgtctagtacgcgtgagcagaaactgatctcggaagaggatgggagcggcaccccattcccttctctggcccctcccatcatgctgctggtggacggcaagcagcagatggtggtcgtgtgcctggtgctggatgtggccccacctggactggacagccccatctggtttagcgccggcaatggctctgccctggacgcctttacctacggcccaagccctgccaccgatggcacctggacaaatctggcccacctgagcctgcccagcgaggaactggcttcttgggagcctctcgtgtgccacacaggacctggcgctgagggacacagcagatccacccagcctatgcacctgtctggcgaggccagcaccgccagaacctgtcctcaggaacctctgagaggcacccctggcggagcactgtggctgggagtgctgagactgctgctgttcaagctgctgctgtttgacctgctgctgacctgctcctgtctgtgcgatcctgccggccctctgccttctcctgccaccaccacaagactgagagccctgggcagccacagactgcaccctgccacagagacaggcggcagagaggccacaagcagccctagaccccagcccagagacagaagatggggcgataccccccctggcagaaagcctggatctccagtccgcgccaagagaagcggatctggcgtgaagcagaccctgaatttcgacctgctgaagctggctggcgacgtggaatccaacccaggcccttctagaggccatatgaccgagtacaagcccacggtgcgcctcgccacccgcgacgacgtccccagggccgtacgcaccctcgccgccgcgttcgccgactaccccgccacgcgccacaccgtcgatccggaccgccacatcgagcgggtcaccgagctgcaagaactcttcctcacgcgcgtcgggctcgacatcggcaaggtgtgggtcgcggacgacggcgccgcggtggcggtctggaccacgccggagagcgtcgaagcgggggcggtgttcgccgagatcggcccgcgcatggccgagttgagcggttcccggctggccgcgcagcaacagatggaaggcctcctggcgccgcaccggcccaaggagcccgcgtggttcctggccaccgtcggcgtctcgcccgaccaccagggcaagggtctgggcagcgccgtcgtgctccccggagtggaggcggccgagcgcgccggggtgcccgccttcctggagacctccgcgccccgcaacctccccttctacgagcggctcggcttcaccgtcaccgccgacgtcgaggtgcccgaaggaccgcgcacctggtgcatgacccgcaagcccggtgcctga

SEQ ID NO: 5443 - DNA, 4281 bp, Artificial Sequence
  Synthetic Polynucloetide
atggccttaccagtgaccgccttgctcctgccgctggccttgctgctccacgccgccaggccggaggttcagctgcttgagtctggcggaggactggttcaacctggcggaagcctgagactgtcttgtgccgccagcggcttcacctttagcagctacgccatgagctgggtccgacaggctcctggcaaaggactggaatgggtgtccagcatcagcggcagcggcgactacatctactacgccgatagcgtgaagggcagattcaccatcagccgggacatcagcaagaacaccctgtacctccagatgaacagcctgagagccgaggacaccgccgtgtactactgtgccaaagaaggcaccggcgctaacagcagcctggccgattatagaggccagggcacactggtcaccgtgtctagtggcggaggaagcggcggaggatctgaagttcagctgcttgagtctggcggaggactggttcaacctggcggaagcctgagactgtcttgtgccgccagcggcttcatcttcagcagctacgccatgagctgggtccgacaggctcctggaaagggccaagaatgggtttccggcgttagcggcacaggcgtgaacacctactacgccgatagcgtgaagggcagattcaccatcagccgggacaacagcaagaacaccctgtacctccagatgaacagcctgagagccgaggacaccgccgtgtactattgtgcctctggcaaaggctgggacagcggctcttggtacgaggactatagaggccagggcaccctggtcacagtttcttcaggtaccggcggaggcggatctggcggcggaggtagcggtggcggaggatctgaattcgacatccagatgacacagagccctagcagcctgtctgccagcgtgggagacagagtgaccatcacatgcaaggccagcgaccacatcaacaactggctggcctggtatcagcagaagcctggacaggcccctaagctgctgatctacggcgctaccacactggaaacaggcgtgcccagcagattttctggcagcggctctggcaccgactacaccctgacaatatccagcctccagcctgaggacttcgccacctactactgtcagcagagctggaacaccccttggacattcggccagggcaccaagctggaaatcaagagactcgaggggaaaccaattcccaaccctcttctgggactggattcaaccggcagcggcgacaagcagctggacgccgacgtgtcccccaagcctaccatcttcctgccctctatcgccgagacaaagctccagaaggccggcacctacctgtgcctgctggaaaagttcttcccagatgtgattaagatccactggcaggaaaagaagtccaacaccatcctgggcagccaggaaggcaacaccatgaagaccaacgacacctacatgaagttcagctggctgaccgtgcccgagaagtccctggacaaagaacacagatgcatcgtgcggcacgaaaacaacaagaacggcgtggaccaggaaatcatcttcccacccatcaagaccgatgtgattacaatggaccccaaggacaactgctccaaggacgccaacgataccctgctgctccagctgaccaacaccagcgcctactacatgtacttgttgctgctgctgaagtccgtggtgtacttcgccatcatcacatgctgcctgctgcggagaaccgccttctgctgcaacggcgagaagtctagggccaagcgatctggatctggagcaacaaacttctcactactcaaacaagcaggtgacgtggaggagaatcccgggcctactagtatggactggatttggcgcatccttttccttgtcggcgctgctaccggcgcccattcccagctccagttgcaagagagcggccctggcttggtaaaaccttccgagacccttagcctcacatgcacggttagtgggggcagcatttcctcaggtgattactattggggatggattcggcaacccccgggtaaaggattggagtggattggtcatatttattatagtggagcgacgtactacaacccaagtctcaaatccagggttacaatatccgtcgatacgagcaggaaccaattcagcttgaaactttctagtgtcaccgcagcagacacagccgtctattactgtacgcgggatgactccagtaattggcggtcccgagggcaagggacactggtcacggtctcctcatctggaggcggtggaagcggtggaggaggatctcaggttcagctgcaagagtctggcggaggacttgctcaagctggcggaagcctgagactgtcttgtgccgcctctggcagaaccttcagcatgggctggtttagacaggcccctggcaaagagagagagttcgtcgccgccatcacatacagcggcggcagcccttactacgcctcttctgtcagaggccggttcaccatcagccgggacaacgccaagaacaccgtgtacctccagatgaacagcctgaagccagaggacaccgccgtgtactactgtgccgccaatccaacctacggcagcgactggaatgccgagaattggggccagggcacccaagtgacagtgtctagtggatccggcggcggaggatctggcggaggcggatctgggggcggaggctctttcgaacaagttcagcttcaacagcctggcgctgagctggtcaaacctggcgcttctgtgaagatgagctgcaaagccagcggctacgccttcagcagctactggatcaactggatgaagcagaaacccggccagggactcgaatggatcggccaaatctatcccggcgacggcgacaccaactacaacggcaagttcaagggcagagccacactgaccgccgatacctctagcagcacagcctacatgcagctgagcagcctgaccagcgaagatagcgccgtgtacttctgtgcccggtccatcacaacagtcgtgggctgcgctatggactattggggccagggaacaagcgtgaccgtgtctagtacgcgtgagcagaaactgatctcggaagaggatgggagcggcagccagcctcacaccaagcccagcgtgttcgtgatgaagaacggcaccaacgtggcctgcctcgtgaaagagttctaccccaaggacatcaggatcaacctggtgtccagcaagaagatcaccgagttcgaccccgccatcgtgatctcccccagcggcaagtacaacgccgtgaagctggggaagtacgaggacagcaacagcgtgacctgctccgtgcagcacgacaacaagaccgtgcacagcaccgactttgaagtgaaaaccgactccaccgaccacgtgaagcccaaagagacagagaacaccaagcagcccagcaagagctgccacaagcccaaggccatcgtgcacaccgagaaagtgaacatgatgagcctgaccgtgctgggcctgcggatgctgttcgccaaaaccgtggccgtgaacttcctgctgaccgccaagctgttcttcctccgcgccaagagaagcggatctggcgtgaagcagaccctgaatttcgacctgctgaagctggctggcgacgtggaatccaacccaggcccttctagaggccatatgaccgagtacaagcccacggtgcgcctcgccacccgcgacgacgtccccagggccgtacgcaccctcgccgccgcgttcgccgactaccccgccacgcgccacaccgtcgatccggaccgccacatcgagcgggtcaccgagctgcaagaactcttcctcacgcgcgtcgggctcgacatcggcaaggtgtgggtcgcggacgacggcgccgcggtggcggtctggaccacgccggagagcgtcgaagcgggggcggtgttcgccgagatcggcccgcgcatggccgagttgagcggttcccggctggccgcgcagcaacagatggaaggcctcctggcgccgcaccggcccaaggagcccgcgtggttcctggccaccgtcggcgtctcgcccgaccaccagggcaagggtctgggcagcgccgtcgtgctccccggagtggaggcggccgagcgcgccggggtgcccgccttcctggagacctccgcgccccgcaacctccccttctacgagcggctcggcttcaccgtcaccgccgacgtcgaggtgcccgaaggaccgcgcacctggtgcatgacccgcaagcccggtgcctga

SEQ ID NO: 5444 - DNA, 3492 bp, Artificial Sequence
  Synthetic Polynucloetide
atggccttaccagtgaccgccttgctcctgccgctggccttgctgctccacgccgccaggccggaggttcagctgcttgagtctggcggaggactggttcaacctggcggaagcctgagactgtcttgtgccgccagcggcttcacctttagcagctacgccatgagctgggtccgacaggctcctggcaaaggactggaatgggtgtccagcatcagcggcagcggcgactacatctactacgccgatagcgtgaagggcagattcaccatcagccgggacatcagcaagaacaccctgtacctccagatgaacagcctgagagccgaggacaccgccgtgtactactgtgccaaagaaggcaccggcgctaacagcagcctggccgattatagaggccagggcacactggtcaccgtgtctagtggcggaggaagcggcggaggatctgaagttcagctgcttgagtctggcggaggactggttcaacctggcggaagcctgagactgtcttgtgccgccagcggcttcatcttcagcagctacgccatgagctgggtccgacaggctcctggaaagggccaagaatgggtttccggcgttagcggcacaggcgtgaacacctactacgccgatagcgtgaagggcagattcaccatcagccgggacaacagcaagaacaccctgtacctccagatgaacagcctgagagccgaggacaccgccgtgtactattgtgcctctggcaaaggctgggacagcggctcttggtacgaggactatagaggccagggcaccctggtcacagtttcttcaggtaccggcggaggcggatctggcggcggaggtagcggtggcggaggatctgaattcgacatccagatgacacagagccctagcagcctgtctgccagcgtgggagacagagtgaccatcacatgcaaggccagcgaccacatcaacaactggctggcctggtatcagcagaagcctggacaggcccctaagctgctgatctacggcgctaccacactggaaacaggcgtgcccagcagattttctggcagcggctctggcaccgactacaccctgacaatatccagcctccagcctgaggacttcgccacctactactgtcagcagagctggaacaccccttggacattcggccagggcaccaagctggaaatcaagagactcgagagccagcctcacaccaagcccagcgtgttcgtgatgaagaacggcaccaacgtggcctgcctcgtgaaagagttctaccccaaggacatcaggatcaacctggtgtccagcaagaagatcaccgagttcgaccccgccatcgtgatctcccccagcggcaagtacaacgccgtgaagctggggaagtacgaggacagcaacagcgtgacctgctccgtgcagcacgacaacaagaccgtgcacagcaccgactttgaagtgaaaaccgactccaccgaccacgtgaagcccaaagagacagagaacaccaagcagcccagcaagagctgccacaagcccaaggccatcgtgcacaccgagaaagtgaacatgatgagcctgaccgtgctgggcctgcggatgctgttcgccaaaaccgtggccgtgaacttcctgctgaccgccaagctgttcttcctcagggccaagcgatctggatctggagcaacaaacttctcactactcaaacaagcaggtgacgtggaggagaatcccgggcctactagtatggactggatttggcgcatccttttccttgtcggcgctgctaccggcgcccattcccagctccagttgcaagagagcggccctggcttggtaaaaccttccgagacccttagcctcacatgcacggttagtgggggcagcatttcctcaggtgattactattggggatggattcggcaacccccgggtaaaggattggagtggattggtcatatttattatagtggagcgacgtactacaacccaagtctcaaatccagggttacaatatccgtcgatacgagcaggaaccaattcagcttgaaactttctagtgtcaccgcagcagacacagccgtctattactgtacgcgggatgactccagtaattggcggtcccgagggcaagggacactggtcacggtctcctcatctggaggcggtggaagcggtggaggaggatctcaggttcagctgcaagagtctggcggaggacttgctcaagctggcggaagcctgagactgtcttgtgccgcctctggcagaaccttcagcatgggctggtttagacaggcccctggcaaagagagagagttcgtcgccgccatcacatacagcggcggcagcccttactacgcctcttctgtcagaggccggttcaccatcagccgggacaacgccaagaacaccgtgtacctccagatgaacagcctgaagccagaggacaccgccgtgtactactgtgccgccaatccaacctacggcagcgactggaatgccgagaattggggccagggcacccaagtgacagtgtctagtggatccggcggcggaggatctggcggaggcggatctgggggcggaggctctttcgaacaagttcagcttcaacagcctggcgctgagctggtcaaacctggcgcttctgtgaagatgagctgcaaagccagcggctacgccttcagcagctactggatcaactggatgaagcagaaacccggccagggactcgaatggatcggccaaatctatcccggcgacggcgacaccaactacaacggcaagttcaagggcagagccacactgaccgccgatacctctagcagcacagcctacatgcagctgagcagcctgaccagcgaagatagcgccgtgtacttctgtgcccggtccatcacaacagtcgtgggctgcgctatggactattggggccagggaacaagcgtgaccgtgtctagtacgcgtgacaagcagctggacgccgacgtgtcccccaagcctaccatcttcctgccctctatcgccgagacaaagctccagaaggccggcacctacctgtgcctgctggaaaagttcttcccagatgtgattaagatccactggcaggaaaagaagtccaacaccatcctgggcagccaggaaggcaacaccatgaagaccaacgacacctacatgaagttcagctggctgaccgtgcccgagaagtccctggacaaagaacacagatgcatcgtgcggcacgaaaacaacaagaacggcgtggaccaggaaatcatcttcccacccatcaagaccgatgtgattacaatggaccccaaggacaactgctccaaggacgccaacgataccctgctgctccagctgaccaacaccagcgcctactacatgtacttgttgctgctgctgaagtccgtggtgtacttcgccatcatcacatgctgcctgctgcggagaaccgccttctgctgcaacggcgagaagtct

SEQ ID NO: 5445 - DNA, 4701 bp, Artificial Sequence
  Synthetic Polynucloetide
atggccttaccagtgaccgccttgctcctgccgctggccttgctgctccacgccgccaggccggaggttcagctgcttgagtctggcggaggactggttcaacctggcggaagcctgagactgtcttgtgccgccagcggcttcacctttagcagctacgccatgagctgggtccgacaggctcctggcaaaggactggaatgggtgtccagcatcagcggcagcggcgactacatctactacgccgatagcgtgaagggcagattcaccatcagccgggacatcagcaagaacaccctgtacctccagatgaacagcctgagagccgaggacaccgccgtgtactactgtgccaaagaaggcaccggcgctaacagcagcctggccgattatagaggccagggcacactggtcaccgtgtctagtggcggaggaagcggcggaggatctgaagttcagctgcttgagtctggcggaggactggttcaacctggcggaagcctgagactgtcttgtgccgccagcggcttcatcttcagcagctacgccatgagctgggtccgacaggctcctggaaagggccaagaatgggtttccggcgttagcggcacaggcgtgaacacctactacgccgatagcgtgaagggcagattcaccatcagccgggacaacagcaagaacaccctgtacctccagatgaacagcctgagagccgaggacaccgccgtgtactattgtgcctctggcaaaggctgggacagcggctcttggtacgaggactatagaggccagggcaccctggtcacagtttcttcaggtaccggcggaggcggatctggcggcggaggtagcggtggcggaggatctgaattcgacatccagatgacacagagccctagcagcctgtctgccagcgtgggagacagagtgaccatcacatgcaaggccagcgaccacatcaacaactggctggcctggtatcagcagaagcctggacaggcccctaagctgctgatctacggcgctaccacactggaaacaggcgtgcccagcagattttctggcagcggctctggcaccgactacaccctgacaatatccagcctccagcctgaggacttcgccacctactactgtcagcagagctggaacaccccttggacattcggccagggcaccaagctggaaatcaagagaggacagcctaaggccaatcctaccgtgacactgttccctccaagcagcgaagaactccaggccaacaaggccacacttgtgtgcctgatctccgacttctaccctggggctgtgacagtggcttggaaggccgatggatctcctgtgaaagccggcgtggaaaccaccaagccatccaagcagagcaacaacaaatacgccgccagctcctacctgagcctgacacctgagcagtggaagtcccacagatcctacagctgccaagtgacccacgaaggcagcaccgtggaaaagacagtggcccctacagagtgcagcggatcccagagcttcggcctgctggaccccaagctgtgctacctgctggatggcatcctgttcatctacggcgtgatcctgaccgccctgttcctgagagtgaagttcagcagaagcgccgacgcccctgcctaccagcagggacagaaccaactgtacaacgagctgaacctgggcagacgggaagagtacgacgtgctggacaagcggagaggcagggaccctgagatgggcggaaagccccagcggagaaagaacccccaggaaggactgtataacgaactccagaaagacaagatggccgaagcctacagcgagatcggcatgaagggcgagcggagaagaggcaagggccacgatggcctgtaccagggcctgagcaccgccaccaaggacacctatgacgccctgcacatgcaggccctgcctccaagaagggccaagcgatctggatctggagcaacaaacttctcactactcaaacaagcaggtgacgtggaggagaatcccgggcctactagtatggactggatttggcgcatccttttccttgtcggcgctgctaccggcgcccattcccagctccagttgcaagagagcggccctggcttggtaaaaccttccgagacccttagcctcacatgcacggttagtgggggcagcatttcctcaggtgattactattggggatggattcggcaacccccgggtaaaggattggagtggattggtcatatttattatagtggagcgacgtactacaacccaagtctcaaatccagggttacaatatccgtcgatacgagcaggaaccaattcagcttgaaactttctagtgtcaccgcagcagacacagccgtctattactgtacgcgggatgactccagtaattggcggtcccgagggcaagggacactggtcacggtctcctcatctggaggcggtggaagcggtggaggaggatctcaggttcagctgcaagagtctggcggaggacttgctcaagctggcggaagcctgagactgtcttgtgccgcctctggcagaaccttcagcatgggctggtttagacaggcccctggcaaagagagagagttcgtcgccgccatcacatacagcggcggcagcccttactacgcctcttctgtcagaggccggttcaccatcagccgggacaacgccaagaacaccgtgtacctccagatgaacagcctgaagccagaggacaccgccgtgtactactgtgccgccaatccaacctacggcagcgactggaatgccgagaattggggccagggcacccaagtgacagtgtctagtggatccggcggcggaggatctggcggaggcggatctgggggcggaggctctttcgaacaagttcagcttcaacagcctggcgctgagctggtcaaacctggcgcttctgtgaagatgagctgcaaagccagcggctacgccttcagcagctactggatcaactggatgaagcagaaacccggccagggactcgaatggatcggccaaatctatcccggcgacggcgacaccaactacaacggcaagttcaagggcagagccacactgaccgccgatacctctagcagcacagcctacatgcagctgagcagcctgaccagcgaagatagcgccgtgtacttctgtgcccggtccatcacaacagtcgtgggctgcgctatggactattggggccagggaacaagcgtgaccgtgtctagtgcctctacaaagggaccctccgtgtttcctctggctcccagcagcaagtctacaagcggaggaacagccgctctgggctgcctggtcaaggattactttcccgagcctgtgaccgtgtcctggaatagcggagcactgacaagcggcgtgcacacctttccagccgtgctgcaaagcagcggcctgtactctctgagcagcgtggtcacagtgcctagctctagcctgggcacccagacctacatctgcaatgtgaaccacaagcctagcaacaccaaggtggacaagagagtggaacccaagagctgtggtacccagagttttgggttgttggaccctaaattgtgctatctgttggacggaatcctgttcatttacggagtgatcctgaccgcattgttcctgcgggttaagttttccagatccgcagacgcacccgcttaccaacaagggcagaaccaactctacaatgaacttaatttggggcggagggaagagtacgacgttctggacaaaaggaggggacgagatcccgagatgggcggaaagcctcagcgaaggaagaatccgcaagaggggctttataacgaactccagaaagataaaatggcagaagcctatagtgagattgggatgaagggagaaaggaggaggggtaaaggtcacgatgggttgtaccaaggattgagcacagccactaaagatacctatgatgcgctccacatgcaggccctgccgccaagacgcgccaagagaagcggatctggcgtgaagcagaccctgaatttcgacctgctgaagctggctggcgacgtggaatccaacccaggcccttctagaggccatatgaccgagtacaagcccacggtgcgcctcgccacccgcgacgacgtccccagggccgtacgcaccctcgccgccgcgttcgccgactaccccgccacgcgccacaccgtcgatccggaccgccacatcgagcgggtcaccgagctgcaagaactcttcctcacgcgcgtcgggctcgacatcggcaaggtgtgggtcgcggacgacggcgccgcggtggcggtctggaccacgccggagagcgtcgaagcgggggcggtgttcgccgagatcggcccgcgcatggccgagttgagcggttcccggctggccgcgcagcaacagatggaaggcctcctggcgccgcaccggcccaaggagcccgcgtggttcctggccaccgtcggcgtctcgcccgaccaccagggcaagggtctgggcagcgccgtcgtgctccccggagtggaggcggccgagcgcgccggggtgcccgccttcctggagacctccgcgccccgcaacctccccttctacgagcggctcggcttcaccgtcaccgccgacgtcgaggtgcccgaaggaccgcgcacctggtgcatgacccgcaagcccggtgcctga

SEQ ID NO: 5446 - DNA, 4056 bp, Artificial Sequence
  Synthetic Polynucloetide
atggccttaccagtgaccgccttgctcctgccgctggccttgctgctccacgccgccaggccggaggttcagctgcttgagtctggcggaggactggttcaacctggcggaagcctgagactgtcttgtgccgccagcggcttcacctttagcagctacgccatgagctgggtccgacaggctcctggcaaaggactggaatgggtgtccagcatcagcggcagcggcgactacatctactacgccgatagcgtgaagggcagattcaccatcagccgggacatcagcaagaacaccctgtacctccagatgaacagcctgagagccgaggacaccgccgtgtactactgtgccaaagaaggcaccggcgctaacagcagcctggccgattatagaggccagggcacactggtcaccgtgtctagtggcggaggaagcggcggaggatctgaagttcagctgcttgagtctggcggaggactggttcaacctggcggaagcctgagactgtcttgtgccgccagcggcttcatcttcagcagctacgccatgagctgggtccgacaggctcctggaaagggccaagaatgggtttccggcgttagcggcacaggcgtgaacacctactacgccgatagcgtgaagggcagattcaccatcagccgggacaacagcaagaacaccctgtacctccagatgaacagcctgagagccgaggacaccgccgtgtactattgtgcctctggcaaaggctgggacagcggctcttggtacgaggactatagaggccagggcaccctggtcacagtttcttcaggtaccggcggaggcggatctggcggcggaggtagcggtggcggaggatctgaattcgacatccagatgacacagagccctagcagcctgtctgccagcgtgggagacagagtgaccatcacatgcaaggccagcgaccacatcaacaactggctggcctggtatcagcagaagcctggacaggcccctaagctgctgatctacggcgctaccacactggaaacaggcgtgcccagcagattttctggcagcggctctggcaccgactacaccctgacaatatccagcctccagcctgaggacttcgccacctactactgtcagcagagctggaacaccccttggacattcggccagggcaccaagctggaaatcaagagactcgaggacctgaagaacgtgttcccacctgaggtggccgtgttcgagcctagcgaggccgagatcagccacacccagaaagccaccctcgtgtgcctggctaccggcttctaccccgaccatgtggaactgtcttggtgggtcaacggcaaagaggtgcacagcggcgtgtctaccgacccccagccactgaaagaacagcccgccctgaacgacagccggtactgcctgagcagcagactgagagtgtccgccaccttctggcagaacccccggaaccacttcagatgccaggtgcagttctacggcctgagcgagaacgacgagtggacccaggacagagccaagcccgtgacccagatcgtgtctgccgaagcctggggcagagccgattgcggatcccagagcttcggcctgctggaccccaagctgtgctacctgctggatggcatcctgttcatctacggcgtgatcctgaccgccctgttcctgagagtgaagttcagcagaagcgccgacgcccctgcctaccagcagggacagaaccaactgtacaacgagctgaacctgggcagacgggaagagtacgacgtgctggacaagcggagaggcagggaccctgagatgggcggaaagccccagcggagaaagaacccccaggaaggactgtataacgaactccagaaagacaagatggccgaagcctacagcgagatcggcatgaagggcgagcggagaagaggcaagggccacgatggcctgtaccagggcctgagcaccgccaccaaggacacctatgacgccctgcacatgcaggccctgcctccaagaagggccaagcgatctggatctggagcaacaaacttctcactactcaaacaagcaggtgacgtggaggagaatcccgggcctactagtatggactggatttggcgcatccttttccttgtcggcgctgctaccggcgcccattcccagctccagttgcaagagagcggccctggcttggtaaaaccttccgagacccttagcctcacatgcacggttagtgggggcagcatttcctcaggtgattactattggggatggattcggcaacccccgggtaaaggattggagtggattggtcatatttattatagtggagcgacgtactacaacccaagtctcaaatccagggttacaatatccgtcgatacgagcaggaaccaattcagcttgaaactttctagtgtcaccgcagcagacacagccgtctattactgtacgcgggatgactccagtaattggcggtcccgagggcaagggacactggtcacggtctcctcatctggaggcggtggaagcggtggaggaggatctcaggttcagctgcaagagtctggcggaggacttgctcaagctggcggaagcctgagactgtcttgtgccgcctctggcagaaccttcagcatgggctggtttagacaggcccctggcaaagagagagagttcgtcgccgccatcacatacagcggcggcagcccttactacgcctcttctgtcagaggccggttcaccatcagccgggacaacgccaagaacaccgtgtacctccagatgaacagcctgaagccagaggacaccgccgtgtactactgtgccgccaatccaacctacggcagcgactggaatgccgagaattggggccagggcacccaagtgacagtgtctagtggatccggcggcggaggatctggcggaggcggatctgggggcggaggctctttcgaacaagttcagcttcaacagcctggcgctgagctggtcaaacctggcgcttctgtgaagatgagctgcaaagccagcggctacgccttcagcagctactggatcaactggatgaagcagaaacccggccagggactcgaatggatcggccaaatctatcccggcgacggcgacaccaactacaacggcaagttcaagggcagagccacactgaccgccgatacctctagcagcacagcctacatgcagctgagcagcctgaccagcgaagatagcgccgtgtacttctgtgcccggtccatcacaacagtcgtgggctgcgctatggactattggggccagggaacaagcgtgaccgtgtctagtacgcgtatccagaaccctgatcctgccgtgtaccagctgcgggatagcaagagcagcgacaagagcgtgtgtctgttcaccgacttcgacagccagaccaacgtgtcccagagcaaggactccgacgtgtacatcaccgataagaccgtgctggacatgcggagcatggacttcaagagcaactccgccgtggcctggtccaacaagtccgatttcgcctgcgccaacgccttcaacaacagcattatccccgaggacacattcttcccaagccccgagagcagctgcggtacccagagttttgggttgttggaccctaaattgtgctatctgttggacggaatcctgttcatttacggagtgatcctgaccgcattgttcctgcgggttaagttttccagatccgcagacgcacccgcttaccaacaagggcagaaccaactctacaatgaacttaatttggggcggagggaagagtacgacgttctggacaaaaggaggggacgagatcccgagatgggcggaaagcctcagcgaaggaagaatccgcaagaggggctttataacgaactccagaaagataaaatggcagaagcctatagtgagattgggatgaagggagaaaggaggaggggtaaaggtcacgatgggttgtaccaaggattgagcacagccactaaagatacctatgatgcgctccacatgcaggccctgccgccaaga

SEQ ID NO: 5447 - DNA, 4056 bp, Artificial Sequence
  Synthetic Polynucloetide
atggccttaccagtgaccgccttgctcctgccgctggccttgctgctccacgccgccaggccggaggttcagctgcttgagtctggcggaggactggttcaacctggcggaagcctgagactgtcttgtgccgccagcggcttcacctttagcagctacgccatgagctgggtccgacaggctcctggcaaaggactggaatgggtgtccagcatcagcggcagcggcgactacatctactacgccgatagcgtgaagggcagattcaccatcagccgggacatcagcaagaacaccctgtacctccagatgaacagcctgagagccgaggacaccgccgtgtactactgtgccaaagaaggcaccggcgctaacagcagcctggccgattatagaggccagggcacactggtcaccgtgtctagtggcggaggaagcggcggaggatctgaagttcagctgcttgagtctggcggaggactggttcaacctggcggaagcctgagactgtcttgtgccgccagcggcttcatcttcagcagctacgccatgagctgggtccgacaggctcctggaaagggccaagaatgggtttccggcgttagcggcacaggcgtgaacacctactacgccgatagcgtgaagggcagattcaccatcagccgggacaacagcaagaacaccctgtacctccagatgaacagcctgagagccgaggacaccgccgtgtactattgtgcctctggcaaaggctgggacagcggctcttggtacgaggactatagaggccagggcaccctggtcacagtttcttcaggtaccggcggaggcggatctggcggcggaggtagcggtggcggaggatctgaattcgacatccagatgacacagagccctagcagcctgtctgccagcgtgggagacagagtgaccatcacatgcaaggccagcgaccacatcaacaactggctggcctggtatcagcagaagcctggacaggcccctaagctgctgatctacggcgctaccacactggaaacaggcgtgcccagcagattttctggcagcggctctggcaccgactacaccctgacaatatccagcctccagcctgaggacttcgccacctactactgtcagcagagctggaacaccccttggacattcggccagggcaccaagctggaaatcaagagactcgaggacctgaagaacgtgttcccacctgaggtggccgtgttcgagcctagcaaggccgagatcgcccacacccagaaagccaccctcgtgtgcctggctaccggcttctaccccgaccatgtggaactgtcttggtgggtcaacggcaaagaggtgcacagcggcgtgtgtaccgacccccagccactgaaagaacagcccgccctgaacgacagccggtactgcctgagcagcagactgagagtgtccgccaccttctggcagaacccccggaaccacttcagatgccaggtgcagttctacggcctgagcgagaacgacgagtggacccaggacagagccaagcccgtgacccagatcgtgtctgccgaagcctggggcagagccgattgcggatcccagagcttcggcctgctggaccccaagctgtgctacctgctggatggcatcctgttcatctacggcgtgatcctgaccgccctgttcctgagagtgaagttcagcagaagcgccgacgcccctgcctaccagcagggacagaaccaactgtacaacgagctgaacctgggcagacgggaagagtacgacgtgctggacaagcggagaggcagggaccctgagatgggcggaaagccccagcggagaaagaacccccaggaaggactgtataacgaactccagaaagacaagatggccgaagcctacagcgagatcggcatgaagggcgagcggagaagaggcaagggccacgatggcctgtaccagggcctgagcaccgccaccaaggacacctatgacgccctgcacatgcaggccctgcctccaagaagggccaagcgatctggatctggagcaacaaacttctcactactcaaacaagcaggtgacgtggaggagaatcccgggcctactagtatggactggatttggcgcatccttttccttgtcggcgctgctaccggcgcccattcccagctccagttgcaagagagcggccctggcttggtaaaaccttccgagacccttagcctcacatgcacggttagtgggggcagcatttcctcaggtgattactattggggatggattcggcaacccccgggtaaaggattggagtggattggtcatatttattatagtggagcgacgtactacaacccaagtctcaaatccagggttacaatatccgtcgatacgagcaggaaccaattcagcttgaaactttctagtgtcaccgcagcagacacagccgtctattactgtacgcgggatgactccagtaattggcggtcccgagggcaagggacactggtcacggtctcctcatctggaggcggtggaagcggtggaggaggatctcaggttcagctgcaagagtctggcggaggacttgctcaagctggcggaagcctgagactgtcttgtgccgcctctggcagaaccttcagcatgggctggtttagacaggcccctggcaaagagagagagttcgtcgccgccatcacatacagcggcggcagcccttactacgcctcttctgtcagaggccggttcaccatcagccgggacaacgccaagaacaccgtgtacctccagatgaacagcctgaagccagaggacaccgccgtgtactactgtgccgccaatccaacctacggcagcgactggaatgccgagaattggggccagggcacccaagtgacagtgtctagtggatccggcggcggaggatctggcggaggcggatctgggggcggaggctctttcgaacaagttcagcttcaacagcctggcgctgagctggtcaaacctggcgcttctgtgaagatgagctgcaaagccagcggctacgccttcagcagctactggatcaactggatgaagcagaaacccggccagggactcgaatggatcggccaaatctatcccggcgacggcgacaccaactacaacggcaagttcaagggcagagccacactgaccgccgatacctctagcagcacagcctacatgcagctgagcagcctgaccagcgaagatagcgccgtgtacttctgtgcccggtccatcacaacagtcgtgggctgcgctatggactattggggccagggaacaagcgtgaccgtgtctagtacgcgtatccagaaccctgatcctgccgtgtaccagctgcgggatagcaagagcagcgacaagagcgtgtgtctgttcaccgacttcgacagccagaccaacgtgtcccagagcaaggactccgacgtgtacatcaccgataagtgcgtgctggacatgcggagcatggacttcaagagcaactccgccgtggcctggtccaacaagtccgatttcgcctgcgccaacgccttcaacaacagcattatccccgaggacacattcttcccaagcagcgacgtgccctgcggtacccagagttttgggttgttggaccctaaattgtgctatctgttggacggaatcctgttcatttacggagtgatcctgaccgcattgttcctgcgggttaagttttccagatccgcagacgcacccgcttaccaacaagggcagaaccaactctacaatgaacttaatttggggcggagggaagagtacgacgttctggacaaaaggaggggacgagatcccgagatgggcggaaagcctcagcgaaggaagaatccgcaagaggggctttataacgaactccagaaagataaaatggcagaagcctatagtgagattgggatgaagggagaaaggaggaggggtaaaggtcacgatgggttgtaccaaggattgagcacagccactaaagatacctatgatgcgctccacatgcaggccctgccgccaaga

SEQ ID NO: 5448 - DNA, 4269 bp, Artificial Sequence
  Synthetic Polynucloetide
atggccttaccagtgaccgccttgctcctgccgctggccttgctgctccacgccgccaggccggaggttcagctgcttgagtctggcggaggactggttcaacctggcggaagcctgagactgtcttgtgccgccagcggcttcacctttagcagctacgccatgagctgggtccgacaggctcctggcaaaggactggaatgggtgtccagcatcagcggcagcggcgactacatctactacgccgatagcgtgaagggcagattcaccatcagccgggacatcagcaagaacaccctgtacctccagatgaacagcctgagagccgaggacaccgccgtgtactactgtgccaaagaaggcaccggcgctaacagcagcctggccgattatagaggccagggcacactggtcaccgtgtctagtggcggaggaagcggcggaggatctgaagttcagctgcttgagtctggcggaggactggttcaacctggcggaagcctgagactgtcttgtgccgccagcggcttcatcttcagcagctacgccatgagctgggtccgacaggctcctggaaagggccaagaatgggtttccggcgttagcggcacaggcgtgaacacctactacgccgatagcgtgaagggcagattcaccatcagccgggacaacagcaagaacaccctgtacctccagatgaacagcctgagagccgaggacaccgccgtgtactattgtgcctctggcaaaggctgggacagcggctcttggtacgaggactatagaggccagggcaccctggtcacagtttcttcaggtaccggcggaggcggatctggcggcggaggtagcggtggcggaggatctgaattcgacatccagatgacacagagccctagcagcctgtctgccagcgtgggagacagagtgaccatcacatgcaaggccagcgaccacatcaacaactggctggcctggtatcagcagaagcctggacaggcccctaagctgctgatctacggcgctaccacactggaaacaggcgtgcccagcagattttctggcagcggctctggcaccgactacaccctgacaatatccagcctccagcctgaggacttcgccacctactactgtcagcagagctggaacaccccttggacattcggccagggcaccaagctggaaatcaagagactcgaggggaaaccaattcccaaccctcttctgggactggattcaaccggcagcggcgaggacctgaagaacgtgttcccacctgaggtggccgtgttcgagcctagcgaggccgagatcagccacacccagaaagccaccctcgtgtgcctggctaccggcttctaccccgaccatgtggaactgtcttggtgggtcaacggcaaagaggtgcacagcggcgtgtctaccgacccccagccactgaaagaacagcccgccctgaacgacagccggtactgcctgagcagcagactgagagtgtccgccaccttctggcagaacccccggaaccacttcagatgccaggtgcagttctacggcctgagcgagaacgacgagtggacccaggacagagccaagcccgtgacccagatcgtgtctgccgaagcctggggcagagccgattgcggatcccagagcttcggcctgctggaccccaagctgtgctacctgctggatggcatcctgttcatctacggcgtgatcctgaccgccctgttcctgagagtgaagttcagcagaagcgccgacgcccctgcctaccagcagggacagaaccaactgtacaacgagctgaacctgggcagacgggaagagtacgacgtgctggacaagcggagaggcagggaccctgagatgggcggaaagccccagcggagaaagaacccccaggaaggactgtataacgaactccagaaagacaagatggccgaagcctacagcgagatcggcatgaagggcgagcggagaagaggcaagggccacgatggcctgtaccagggcctgagcaccgccaccaaggacacctatgacgccctgcacatgcaggccctgcctccaagaagggccaagcgatctggatctggagcaacaaacttctcactactcaaacaagcaggtgacgtggaggagaatcccgggcctactagtatggactggatttggcgcatccttttccttgtcggcgctgctaccggcgcccattcccagctccagttgcaagagagcggccctggcttggtaaaaccttccgagacccttagcctcacatgcacggttagtgggggcagcatttcctcaggtgattactattggggatggattcggcaacccccgggtaaaggattggagtggattggtcatatttattatagtggagcgacgtactacaacccaagtctcaaatccagggttacaatatccgtcgatacgagcaggaaccaattcagcttgaaactttctagtgtcaccgcagcagacacagccgtctattactgtacgcgggatgactccagtaattggcggtcccgagggcaagggacactggtcacggtctcctcatctggaggcggtggaagcggtggaggaggatctcaggttcagctgcaagagtctggcggaggacttgctcaagctggcggaagcctgagactgtcttgtgccgcctctggcagaaccttcagcatgggctggtttagacaggcccctggcaaagagagagagttcgtcgccgccatcacatacagcggcggcagcccttactacgcctcttctgtcagaggccggttcaccatcagccgggacaacgccaagaacaccgtgtacctccagatgaacagcctgaagccagaggacaccgccgtgtactactgtgccgccaatccaacctacggcagcgactggaatgccgagaattggggccagggcacccaagtgacagtgtctagtggatccggcggcggaggatctggcggaggcggatctgggggcggaggctctttcgaacaagttcagcttcaacagcctggcgctgagctggtcaaacctggcgcttctgtgaagatgagctgcaaagccagcggctacgccttcagcagctactggatcaactggatgaagcagaaacccggccagggactcgaatggatcggccaaatctatcccggcgacggcgacaccaactacaacggcaagttcaagggcagagccacactgaccgccgatacctctagcagcacagcctacatgcagctgagcagcctgaccagcgaagatagcgccgtgtacttctgtgcccggtccatcacaacagtcgtgggctgcgctatggactattggggccagggaacaagcgtgaccgtgtctagtacgcgtgagcagaaactgatctcggaagaggatgggagcggcatccagaaccctgatcctgccgtgtaccagctgcgggatagcaagagcagcgacaagagcgtgtgtctgttcaccgacttcgacagccagaccaacgtgtcccagagcaaggactccgacgtgtacatcaccgataagaccgtgctggacatgcggagcatggacttcaagagcaactccgccgtggcctggtccaacaagtccgatttcgcctgcgccaacgccttcaacaacagcattatccccgaggacacattcttcccaagccccgagagcagctgcggtacccagagttttgggttgttggaccctaaattgtgctatctgttggacggaatcctgttcatttacggagtgatcctgaccgcattgttcctgaggagcaagcggtcacggctgctccacagcgattacatgaatatgacaccacgaagaccgggtcctactcgcaaacactaccaaccctacgcacctccccgcgactttgcagcgtaccgatctcgggttaagttttccagatccgcagacgcacccgcttaccaacaagggcagaaccaactctacaatgaacttaatttggggcggagggaagagtacgacgttctggacaaaaggaggggacgagatcccgagatgggcggaaagcctcagcgaaggaagaatccgcaagaggggctttataacgaactccagaaagataaaatggcagaagcctatagtgagattgggatgaagggagaaaggaggaggggtaaaggtcacgatgggttgtaccaaggattgagcacagccactaaagatacctatgatgcgctccacatgcaggccctgccgccaaga

SEQ ID NO: 5449 - DNA, 4392 bp, Artificial Sequence
  Synthetic Polynucloetide
atggccttaccagtgaccgccttgctcctgccgctggccttgctgctccacgccgccaggccggaggttcagctgcttgagtctggcggaggactggttcaacctggcggaagcctgagactgtcttgtgccgccagcggcttcacctttagcagctacgccatgagctgggtccgacaggctcctggcaaaggactggaatgggtgtccagcatcagcggcagcggcgactacatctactacgccgatagcgtgaagggcagattcaccatcagccgggacatcagcaagaacaccctgtacctccagatgaacagcctgagagccgaggacaccgccgtgtactactgtgccaaagaaggcaccggcgctaacagcagcctggccgattatagaggccagggcacactggtcaccgtgtctagtggcggaggaagcggcggaggatctgaagttcagctgcttgagtctggcggaggactggttcaacctggcggaagcctgagactgtcttgtgccgccagcggcttcatcttcagcagctacgccatgagctgggtccgacaggctcctggaaagggccaagaatgggtttccggcgttagcggcacaggcgtgaacacctactacgccgatagcgtgaagggcagattcaccatcagccgggacaacagcaagaacaccctgtacctccagatgaacagcctgagagccgaggacaccgccgtgtactattgtgcctctggcaaaggctgggacagcggctcttggtacgaggactatagaggccagggcaccctggtcacagtttcttcaggtaccggcggaggcggatctggcggcggaggtagcggtggcggaggatctgaattcgacatccagatgacacagagccctagcagcctgtctgccagcgtgggagacagagtgaccatcacatgcaaggccagcgaccacatcaacaactggctggcctggtatcagcagaagcctggacaggcccctaagctgctgatctacggcgctaccacactggaaacaggcgtgcccagcagattttctggcagcggctctggcaccgactacaccctgacaatatccagcctccagcctgaggacttcgccacctactactgtcagcagagctggaacaccccttggacattcggccagggcaccaagctggaaatcaagagactcgaggggaaaccaattcccaaccctcttctgggactggattcaaccggcagcggcgaggacctgaagaacgtgttcccacctgaggtggccgtgttcgagcctagcgaggccgagatcagccacacccagaaagccaccctcgtgtgcctggctaccggcttctaccccgaccatgtggaactgtcttggtgggtcaacggcaaagaggtgcacagcggcgtgtctaccgacccccagccactgaaagaacagcccgccctgaacgacagccggtactgcctgagcagcagactgagagtgtccgccaccttctggcagaacccccggaaccacttcagatgccaggtgcagttctacggcctgagcgagaacgacgagtggacccaggacagagccaagcccgtgacccagatcgtgtctgccgaagcctggggcagagccgattgcggatcccagagcttcggcctgctggaccccaagctgtgctacctgctggatggcatcctgttcatctacggcgtgatcctgaccgccctgttcctgaggagtaagaggagcaggctcctgcacagtgactacatgaacatgactccacgccgccccggacccacccgcaagcattaccagccctatgccccaccacgcgacttcgcagcctatcgctccagagtgaagttcagcagaagcgccgacgcccctgcctaccagcagggacagaaccaactgtacaacgagctgaacctgggcagacgggaagagtacgacgtgctggacaagcggagaggcagggaccctgagatgggcggaaagccccagcggagaaagaacccccaggaaggactgtataacgaactccagaaagacaagatggccgaagcctacagcgagatcggcatgaagggcgagcggagaagaggcaagggccacgatggcctgtaccagggcctgagcaccgccaccaaggacacctatgacgccctgcacatgcaggccctgcctccaagaagggccaagcgatctggatctggagcaacaaacttctcactactcaaacaagcaggtgacgtggaggagaatcccgggcctactagtatggactggatttggcgcatccttttccttgtcggcgctgctaccggcgcccattcccagctccagttgcaagagagcggccctggcttggtaaaaccttccgagacccttagcctcacatgcacggttagtgggggcagcatttcctcaggtgattactattggggatggattcggcaacccccgggtaaaggattggagtggattggtcatatttattatagtggagcgacgtactacaacccaagtctcaaatccagggttacaatatccgtcgatacgagcaggaaccaattcagcttgaaactttctagtgtcaccgcagcagacacagccgtctattactgtacgcgggatgactccagtaattggcggtcccgagggcaagggacactggtcacggtctcctcatctggaggcggtggaagcggtggaggaggatctcaggttcagctgcaagagtctggcggaggacttgctcaagctggcggaagcctgagactgtcttgtgccgcctctggcagaaccttcagcatgggctggtttagacaggcccctggcaaagagagagagttcgtcgccgccatcacatacagcggcggcagcccttactacgcctcttctgtcagaggccggttcaccatcagccgggacaacgccaagaacaccgtgtacctccagatgaacagcctgaagccagaggacaccgccgtgtactactgtgccgccaatccaacctacggcagcgactggaatgccgagaattggggccagggcacccaagtgacagtgtctagtggatccggcggcggaggatctggcggaggcggatctgggggcggaggctctttcgaacaagttcagcttcaacagcctggcgctgagctggtcaaacctggcgcttctgtgaagatgagctgcaaagccagcggctacgccttcagcagctactggatcaactggatgaagcagaaacccggccagggactcgaatggatcggccaaatctatcccggcgacggcgacaccaactacaacggcaagttcaagggcagagccacactgaccgccgatacctctagcagcacagcctacatgcagctgagcagcctgaccagcgaagatagcgccgtgtacttctgtgcccggtccatcacaacagtcgtgggctgcgctatggactattggggccagggaacaagcgtgaccgtgtctagtacgcgtgagcagaaactgatctcggaagaggatgggagcggcatccagaaccctgatcctgccgtgtaccagctgcgggatagcaagagcagcgacaagagcgtgtgtctgttcaccgacttcgacagccagaccaacgtgtcccagagcaaggactccgacgtgtacatcaccgataagaccgtgctggacatgcggagcatggacttcaagagcaactccgccgtggcctggtccaacaagtccgatttcgcctgcgccaacgccttcaacaacagcattatccccgaggacacattcttcccaagccccgagagcagctgcggtacccagagttttgggttgttggaccctaaattgtgctatctgttggacggaatcctgttcatttacggagtgatcctgaccgcattgttcctgaggagcaagcggtcacggctgctccacagcgattacatgaatatgacaccacgaagaccgggtcctactcgcaaacactaccaaccctacgcacctccccgcgactttgcagcgtaccgatctcgggttaagttttccagatccgcagacgcacccgcttaccaacaagggcagaaccaactctacaatgaacttaatttggggcggagggaagagtacgacgttctggacaaaaggaggggacgagatcccgagatgggcggaaagcctcagcgaaggaagaatccgcaagaggggctttataacgaactccagaaagataaaatggcagaagcctatagtgagattgggatgaagggagaaaggaggaggggtaaaggtcacgatgggttgtaccaaggattgagcacagccactaaagatacctatgatgcgctccacatgcaggccctgccgccaaga

SEQ ID NO: 5450 - DNA, 4275 bp, Artificial Sequence
  Synthetic Polynucloetide
atggccttaccagtgaccgccttgctcctgccgctggccttgctgctccacgccgccaggccggaggttcagctgcttgagtctggcggaggactggttcaacctggcggaagcctgagactgtcttgtgccgccagcggcttcacctttagcagctacgccatgagctgggtccgacaggctcctggcaaaggactggaatgggtgtccagcatcagcggcagcggcgactacatctactacgccgatagcgtgaagggcagattcaccatcagccgggacatcagcaagaacaccctgtacctccagatgaacagcctgagagccgaggacaccgccgtgtactactgtgccaaagaaggcaccggcgctaacagcagcctggccgattatagaggccagggcacactggtcaccgtgtctagtggcggaggaagcggcggaggatctgaagttcagctgcttgagtctggcggaggactggttcaacctggcggaagcctgagactgtcttgtgccgccagcggcttcatcttcagcagctacgccatgagctgggtccgacaggctcctggaaagggccaagaatgggtttccggcgttagcggcacaggcgtgaacacctactacgccgatagcgtgaagggcagattcaccatcagccgggacaacagcaagaacaccctgtacctccagatgaacagcctgagagccgaggacaccgccgtgtactattgtgcctctggcaaaggctgggacagcggctcttggtacgaggactatagaggccagggcaccctggtcacagtttcttcaggtaccggcggaggcggatctggcggcggaggtagcggtggcggaggatctgaattcgacatccagatgacacagagccctagcagcctgtctgccagcgtgggagacagagtgaccatcacatgcaaggccagcgaccacatcaacaactggctggcctggtatcagcagaagcctggacaggcccctaagctgctgatctacggcgctaccacactggaaacaggcgtgcccagcagattttctggcagcggctctggcaccgactacaccctgacaatatccagcctccagcctgaggacttcgccacctactactgtcagcagagctggaacaccccttggacattcggccagggcaccaagctggaaatcaagagactcgaggggaaaccaattcccaaccctcttctgggactggattcaaccggcagcggcgaggacctgaagaacgtgttcccacctgaggtggccgtgttcgagcctagcgaggccgagatcagccacacccagaaagccaccctcgtgtgcctggctaccggcttctaccccgaccatgtggaactgtcttggtgggtcaacggcaaagaggtgcacagcggcgtgtctaccgacccccagccactgaaagaacagcccgccctgaacgacagccggtactgcctgagcagcagactgagagtgtccgccaccttctggcagaacccccggaaccacttcagatgccaggtgcagttctacggcctgagcgagaacgacgagtggacccaggacagagccaagcccgtgacccagatcgtgtctgccgaagcctggggcagagccgattgcggatcccagagcttcggcctgctggaccccaagctgtgctacctgctggatggcatcctgttcatctacggcgtgatcctgaccgccctgttcctgagagtgaagttcagcagaagcgccgacgcccctgcctaccagcagggacagaaccaactgtacaacgagctgaacctgggcagacgggaagagtacgacgtgctggacaagcggagaggcagggaccctgagatgggcggaaagccccagcggagaaagaacccccaggaaggactgtataacgaactccagaaagacaagatggccgaagcctacagcgagatcggcatgaagggcgagcggagaagaggcaagggccacgatggcctgtaccagggcctgagcaccgccaccaaggacacctatgacgccctgcacatgcaggccctgcctccaagaagggccaagcgatctggatctggagcaacaaacttctcactactcaaacaagcaggtgacgtggaggagaatcccgggcctactagtatggactggatttggcgcatccttttccttgtcggcgctgctaccggcgcccattcccagctccagttgcaagagagcggccctggcttggtaaaaccttccgagacccttagcctcacatgcacggttagtgggggcagcatttcctcaggtgattactattggggatggattcggcaacccccgggtaaaggattggagtggattggtcatatttattatagtggagcgacgtactacaacccaagtctcaaatccagggttacaatatccgtcgatacgagcaggaaccaattcagcttgaaactttctagtgtcaccgcagcagacacagccgtctattactgtacgcgggatgactccagtaattggcggtcccgagggcaagggacactggtcacggtctcctcatctggaggcggtggaagcggtggaggaggatctcaggttcagctgcaagagtctggcggaggacttgctcaagctggcggaagcctgagactgtcttgtgccgcctctggcagaaccttcagcatgggctggtttagacaggcccctggcaaagagagagagttcgtcgccgccatcacatacagcggcggcagcccttactacgcctcttctgtcagaggccggttcaccatcagccgggacaacgccaagaacaccgtgtacctccagatgaacagcctgaagccagaggacaccgccgtgtactactgtgccgccaatccaacctacggcagcgactggaatgccgagaattggggccagggcacccaagtgacagtgtctagtggatccggcggcggaggatctggcggaggcggatctgggggcggaggctctttcgaacaagttcagcttcaacagcctggcgctgagctggtcaaacctggcgcttctgtgaagatgagctgcaaagccagcggctacgccttcagcagctactggatcaactggatgaagcagaaacccggccagggactcgaatggatcggccaaatctatcccggcgacggcgacaccaactacaacggcaagttcaagggcagagccacactgaccgccgatacctctagcagcacagcctacatgcagctgagcagcctgaccagcgaagatagcgccgtgtacttctgtgcccggtccatcacaacagtcgtgggctgcgctatggactattggggccagggaacaagcgtgaccgtgtctagtacgcgtgagcagaaactgatctcggaagaggatctggggagcggcatccagaaccctgatcctgccgtgtaccagctgcgggatagcaagagcagcgacaagagcgtgtgtctgttcaccgacttcgacagccagaccaacgtgtcccagagcaaggactccgacgtgtacatcaccgataagaccgtgctggacatgcggagcatggacttcaagagcaactccgccgtggcctggtccaacaagtccgatttcgcctgcgccaacgccttcaacaacagcattatccccgaggacacattcttcccaagccccgagagcagctgcggtacccagagttttgggttgttggaccctaaattgtgctatctgttggacggaatcctgttcatttacggagtgatcctgaccgcattgttcctgaagagaggccggaagaagctgctgtacatcttcaagcagcctttcatgcggcccgtgcagaccacccaggaagaggacggctgctcctgccggttccccgaggaagaagaaggcggctgcgagctgcgggttaagttttccagatccgcagacgcacccgcttaccaacaagggcagaaccaactctacaatgaacttaatttggggcggagggaagagtacgacgttctggacaaaaggaggggacgagatcccgagatgggcggaaagcctcagcgaaggaagaatccgcaagaggggctttataacgaactccagaaagataaaatggcagaagcctatagtgagattgggatgaagggagaaaggaggaggggtaaaggtcacgatgggttgtaccaaggattgagcacagccactaaagatacctatgatgcgctccacatgcaggccctgccgccaaga

SEQ ID NO: 5451 - DNA, 4401 bp, Artificial Sequence
  Synthetic Polynucloetide
atggccttaccagtgaccgccttgctcctgccgctggccttgctgctccacgccgccaggccggaggttcagctgcttgagtctggcggaggactggttcaacctggcggaagcctgagactgtcttgtgccgccagcggcttcacctttagcagctacgccatgagctgggtccgacaggctcctggcaaaggactggaatgggtgtccagcatcagcggcagcggcgactacatctactacgccgatagcgtgaagggcagattcaccatcagccgggacatcagcaagaacaccctgtacctccagatgaacagcctgagagccgaggacaccgccgtgtactactgtgccaaagaaggcaccggcgctaacagcagcctggccgattatagaggccagggcacactggtcaccgtgtctagtggcggaggaagcggcggaggatctgaagttcagctgcttgagtctggcggaggactggttcaacctggcggaagcctgagactgtcttgtgccgccagcggcttcatcttcagcagctacgccatgagctgggtccgacaggctcctggaaagggccaagaatgggtttccggcgttagcggcacaggcgtgaacacctactacgccgatagcgtgaagggcagattcaccatcagccgggacaacagcaagaacaccctgtacctccagatgaacagcctgagagccgaggacaccgccgtgtactattgtgcctctggcaaaggctgggacagcggctcttggtacgaggactatagaggccagggcaccctggtcacagtttcttcaggtaccggcggaggcggatctggcggcggaggtagcggtggcggaggatctgaattcgacatccagatgacacagagccctagcagcctgtctgccagcgtgggagacagagtgaccatcacatgcaaggccagcgaccacatcaacaactggctggcctggtatcagcagaagcctggacaggcccctaagctgctgatctacggcgctaccacactggaaacaggcgtgcccagcagattttctggcagcggctctggcaccgactacaccctgacaatatccagcctccagcctgaggacttcgccacctactactgtcagcagagctggaacaccccttggacattcggccagggcaccaagctggaaatcaagagactcgaggggaaaccaattcccaaccctcttctgggactggattcaaccggcagcggcgaggacctgaagaacgtgttcccacctgaggtggccgtgttcgagcctagcgaggccgagatcagccacacccagaaagccaccctcgtgtgcctggctaccggcttctaccccgaccatgtggaactgtcttggtgggtcaacggcaaagaggtgcacagcggcgtgtctaccgacccccagccactgaaagaacagcccgccctgaacgacagccggtactgcctgagcagcagactgagagtgtccgccaccttctggcagaacccccggaaccacttcagatgccaggtgcagttctacggcctgagcgagaacgacgagtggacccaggacagagccaagcccgtgacccagatcgtgtctgccgaagcctggggcagagccgattgcggatcccagagcttcggcctgctggaccccaagctgtgctacctgctggatggcatcctgttcatctacggcgtgatcctgaccgccctgttcctgaaacggggcagaaagaaactcctgtatatattcaaacaaccatttatgagaccagtacaaactactcaagaggaagatggctgtagctgccgatttccagaagaagaagaaggaggatgtgaactgagagtgaagttcagcagaagcgccgacgcccctgcctaccagcagggacagaaccaactgtacaacgagctgaacctgggcagacgggaagagtacgacgtgctggacaagcggagaggcagggaccctgagatgggcggaaagccccagcggagaaagaacccccaggaaggactgtataacgaactccagaaagacaagatggccgaagcctacagcgagatcggcatgaagggcgagcggagaagaggcaagggccacgatggcctgtaccagggcctgagcaccgccaccaaggacacctatgacgccctgcacatgcaggccctgcctccaagaagggccaagcgatctggatctggagcaacaaacttctcactactcaaacaagcaggtgacgtggaggagaatcccgggcctactagtatggactggatttggcgcatccttttccttgtcggcgctgctaccggcgcccattcccagctccagttgcaagagagcggccctggcttggtaaaaccttccgagacccttagcctcacatgcacggttagtgggggcagcatttcctcaggtgattactattggggatggattcggcaacccccgggtaaaggattggagtggattggtcatatttattatagtggagcgacgtactacaacccaagtctcaaatccagggttacaatatccgtcgatacgagcaggaaccaattcagcttgaaactttctagtgtcaccgcagcagacacagccgtctattactgtacgcgggatgactccagtaattggcggtcccgagggcaagggacactggtcacggtctcctcatctggaggcggtggaagcggtggaggaggatctcaggttcagctgcaagagtctggcggaggacttgctcaagctggcggaagcctgagactgtcttgtgccgcctctggcagaaccttcagcatgggctggtttagacaggcccctggcaaagagagagagttcgtcgccgccatcacatacagcggcggcagcccttactacgcctcttctgtcagaggccggttcaccatcagccgggacaacgccaagaacaccgtgtacctccagatgaacagcctgaagccagaggacaccgccgtgtactactgtgccgccaatccaacctacggcagcgactggaatgccgagaattggggccagggcacccaagtgacagtgtctagtggatccggcggcggaggatctggcggaggcggatctgggggcggaggctctttcgaacaagttcagcttcaacagcctggcgctgagctggtcaaacctggcgcttctgtgaagatgagctgcaaagccagcggctacgccttcagcagctactggatcaactggatgaagcagaaacccggccagggactcgaatggatcggccaaatctatcccggcgacggcgacaccaactacaacggcaagttcaagggcagagccacactgaccgccgatacctctagcagcacagcctacatgcagctgagcagcctgaccagcgaagatagcgccgtgtacttctgtgcccggtccatcacaacagtcgtgggctgcgctatggactattggggccagggaacaagcgtgaccgtgtctagtacgcgtgagcagaaactgatctcggaagaggatctggggagcggcatccagaaccctgatcctgccgtgtaccagctgcgggatagcaagagcagcgacaagagcgtgtgtctgttcaccgacttcgacagccagaccaacgtgtcccagagcaaggactccgacgtgtacatcaccgataagaccgtgctggacatgcggagcatggacttcaagagcaactccgccgtggcctggtccaacaagtccgatttcgcctgcgccaacgccttcaacaacagcattatccccgaggacacattcttcccaagccccgagagcagctgcggtacccagagttttgggttgttggaccctaaattgtgctatctgttggacggaatcctgttcatttacggagtgatcctgaccgcattgttcctgaagagaggccggaagaagctgctgtacatcttcaagcagcctttcatgcggcccgtgcagaccacccaggaagaggacggctgctcctgccggttccccgaggaagaagaaggcggctgcgagctgcgggttaagttttccagatccgcagacgcacccgcttaccaacaagggcagaaccaactctacaatgaacttaatttggggcggagggaagagtacgacgttctggacaaaaggaggggacgagatcccgagatgggcggaaagcctcagcgaaggaagaatccgcaagaggggctttataacgaactccagaaagataaaatggcagaagcctatagtgagattgggatgaagggagaaaggaggaggggtaaaggtcacgatgggttgtaccaaggattgagcacagccactaaagatacctatgatgcgctccacatgcaggccctgccgccaaga

SEQ ID NO: 5452 - DNA, 4074 bp, Artificial Sequence
  Synthetic Polynucloetide
atggccttaccagtgaccgccttgctcctgccgctggccttgctgctccacgccgccaggccggaggttcagctgcttgagtctggcggaggactggttcaacctggcggaagcctgagactgtcttgtgccgccagcggcttcacctttagcagctacgccatgagctgggtccgacaggctcctggcaaaggactggaatgggtgtccagcatcagcggcagcggcgactacatctactacgccgatagcgtgaagggcagattcaccatcagccgggacatcagcaagaacaccctgtacctccagatgaacagcctgagagccgaggacaccgccgtgtactactgtgccaaagaaggcaccggcgctaacagcagcctggccgattatagaggccagggcacactggtcaccgtgtctagtggcggaggaagcggcggaggatctgaagttcagctgcttgagtctggcggaggactggttcaacctggcggaagcctgagactgtcttgtgccgccagcggcttcatcttcagcagctacgccatgagctgggtccgacaggctcctggaaagggccaagaatgggtttccggcgttagcggcacaggcgtgaacacctactacgccgatagcgtgaagggcagattcaccatcagccgggacaacagcaagaacaccctgtacctccagatgaacagcctgagagccgaggacaccgccgtgtactattgtgcctctggcaaaggctgggacagcggctcttggtacgaggactatagaggccagggcaccctggtcacagtttcttcaggtaccggcggaggcggatctggcggcggaggtagcggtggcggaggatctgaattcgacatccagatgacacagagccctagcagcctgtctgccagcgtgggagacagagtgaccatcacatgcaaggccagcgaccacatcaacaactggctggcctggtatcagcagaagcctggacaggcccctaagctgctgatctacggcgctaccacactggaaacaggcgtgcccagcagattttctggcagcggctctggcaccgactacaccctgacaatatccagcctccagcctgaggacttcgccacctactactgtcagcagagctggaacaccccttggacattcggccagggcaccaagctggaaatcaagagactcgagcagagcttcggcctgctggaccccaagctgtgctacctgctggatggcatcctgttcatctacggcgtgatcctgaccgccctgttcctgagagtgaagttcagcagaagcgccgacgcccctgcctaccagcagggacagaaccaactgtacaacgagctgaacctgggcagacgggaagagtacgacgtgctggacaagcggagaggcagggaccctgagatgggcggaaagccccagcggagaaagaacccccaggaaggactgtataacgaactccagaaagacaagatggccgaagcctacagcgagatcggcatgaagggcgagcggagaagaggcaagggccacgatggcctgtaccagggcctgagcaccgccaccaaggacacctatgacgccctgcacatgcaggccctgcctccaagaagggccaagcgatctggatctggagcaacaaacttctcactactcaaacaagcaggtgacgtggaggagaatcccgggcctactagtatggactggatttggcgcatccttttccttgtcggcgctgctaccggcgcccattcccagctccagttgcaagagagcggccctggcttggtaaaaccttccgagacccttagcctcacatgcacggttagtgggggcagcatttcctcaggtgattactattggggatggattcggcaacccccgggtaaaggattggagtggattggtcatatttattatagtggagcgacgtactacaacccaagtctcaaatccagggttacaatatccgtcgatacgagcaggaaccaattcagcttgaaactttctagtgtcaccgcagcagacacagccgtctattactgtacgcgggatgactccagtaattggcggtcccgagggcaagggacactggtcacggtctcctcatctggaggcggtggaagcggtggaggaggatctcaggttcagctgcaagagtctggcggaggacttgctcaagctggcggaagcctgagactgtcttgtgccgcctctggcagaaccttcagcatgggctggtttagacaggcccctggcaaagagagagagttcgtcgccgccatcacatacagcggcggcagcccttactacgcctcttctgtcagaggccggttcaccatcagccgggacaacgccaagaacaccgtgtacctccagatgaacagcctgaagccagaggacaccgccgtgtactactgtgccgccaatccaacctacggcagcgactggaatgccgagaattggggccagggcacccaagtgacagtgtctagtggatccggcggcggaggatctggcggaggcggatctgggggcggaggctctttcgaacaagttcagcttcaacagcctggcgctgagctggtcaaacctggcgcttctgtgaagatgagctgcaaagccagcggctacgccttcagcagctactggatcaactggatgaagcagaaacccggccagggactcgaatggatcggccaaatctatcccggcgacggcgacaccaactacaacggcaagttcaagggcagagccacactgaccgccgatacctctagcagcacagcctacatgcagctgagcagcctgaccagcgaagatagcgccgtgtacttctgtgcccggtccatcacaacagtcgtgggctgcgctatggactattggggccagggaacaagcgtgaccgtgtctagtacgcgtcagagttttgggttgttggaccctaaattgtgctatctgttggacggaatcctgttcatttacggagtgatcctgaccgcattgttcctgcgggttaagttttccagatccgcagacgcacccgcttaccaacaagggcagaaccaactctacaatgaacttaatttggggcggagggaagagtacgacgttctggacaaaaggaggggacgagatcccgagatgggcggaaagcctcagcgaaggaagaatccgcaagaggggctttataacgaactccagaaagataaaatggcagaagcctatagtgagattgggatgaagggagaaaggaggaggggtaaaggtcacgatgggttgtaccaaggattgagcacagccactaaagatacctatgatgcgctccacatgcaggccctgccgccaagacgcgccaagagaagcggatctggcgtgaagcagaccctgaatttcgacctgctgaagctggctggcgacgtggaatccaacccaggcccttctagaggccatatgaccgagtacaagcccacggtgcgcctcgccacccgcgacgacgtccccagggccgtacgcaccctcgccgccgcgttcgccgactaccccgccacgcgccacaccgtcgatccggaccgccacatcgagcgggtcaccgagctgcaagaactcttcctcacgcgcgtcgggctcgacatcggcaaggtgtgggtcgcggacgacggcgccgcggtggcggtctggaccacgccggagagcgtcgaagcgggggcggtgttcgccgagatcggcccgcgcatggccgagttgagcggttcccggctggccgcgcagcaacagatggaaggcctcctggcgccgcaccggcccaaggagcccgcgtggttcctggccaccgtcggcgtctcgcccgaccaccagggcaagggtctgggcagcgccgtcgtgctccccggagtggaggcggccgagcgcgccggggtgcccgccttcctggagacctccgcgccccgcaacctccccttctacgagcggctcggcttcaccgtcaccgccgacgtcgaggtgcccgaaggaccgcgcacctggtgcatgacccgcaagcccggtgcctga

SEQ ID NO: 5453 - DNA, 3546 bp, Artificial Sequence
  Synthetic Polynucloetide
atggccttaccagtgaccgccttgctcctgccgctggccttgctgctccacgccgccaggccggaggttcagctgcttgagtctggcggaggactggttcaacctggcggaagcctgagactgtcttgtgccgccagcggcttcacctttagcagctacgccatgagctgggtccgacaggctcctggcaaaggactggaatgggtgtccagcatcagcggcagcggcgactacatctactacgccgatagcgtgaagggcagattcaccatcagccgggacatcagcaagaacaccctgtacctccagatgaacagcctgagagccgaggacaccgccgtgtactactgtgccaaagaaggcaccggcgctaacagcagcctggccgattatagaggccagggcacactggtcaccgtgtctagtggcggaggaagcggcggaggatctgaagttcagctgcttgagtctggcggaggactggttcaacctggcggaagcctgagactgtcttgtgccgccagcggcttcatcttcagcagctacgccatgagctgggtccgacaggctcctggaaagggccaagaatgggtttccggcgttagcggcacaggcgtgaacacctactacgccgatagcgtgaagggcagattcaccatcagccgggacaacagcaagaacaccctgtacctccagatgaacagcctgagagccgaggacaccgccgtgtactattgtgcctctggcaaaggctgggacagcggctcttggtacgaggactatagaggccagggcaccctggtcacagtttcttcaggtaccggcggaggcggatctggcggcggaggtagcggtggcggaggatctgaattcgacatccagatgacacagagccctagcagcctgtctgccagcgtgggagacagagtgaccatcacatgcaaggccagcgaccacatcaacaactggctggcctggtatcagcagaagcctggacaggcccctaagctgctgatctacggcgctaccacactggaaacaggcgtgcccagcagattttctggcagcggctctggcaccgactacaccctgacaatatccagcctccagcctgaggacttcgccacctactactgtcagcagagctggaacaccccttggacattcggccagggcaccaagctggaaatcaagagactcgagggacagcctaaggccaatcctaccgtgacactgttccctccaagcagcgaagaactccaggccaacaaggccacacttgtgtgcctgatctccgacttctaccctggggctgtgacagtggcttggaaggccgatggatctcctgtgaaagccggcgtggaaaccaccaagccatccaagcagagcaacaacaaatacgccgccagctcctacctgagcctgacacctgagcagtggaagtcccacagatcctacagctgccaagtgacccacgaaggcagcaccgtggaaaagacagtggcccctacagagtgcagccccatcaagaccgatgtgattacaatggaccccaaggacaactgctccaaggacgccaacgataccctgctgctccagctgaccaacaccagcgcctactacatgtacttgttgctgctgctgaagtccgtggtgtacttcgccatcatcacatgctgcctgctgcggagaaccgccttctgctgcaacggcgagaagtctagggccaagcgatctggatctggagcaacaaacttctcactactcaaacaagcaggtgacgtggaggagaatcccgggcctactagtatggactggatttggcgcatccttttccttgtcggcgctgctaccggcgcccattcccagctccagttgcaagagagcggccctggcttggtaaaaccttccgagacccttagcctcacatgcacggttagtgggggcagcatttcctcaggtgattactattggggatggattcggcaacccccgggtaaaggattggagtggattggtcatatttattatagtggagcgacgtactacaacccaagtctcaaatccagggttacaatatccgtcgatacgagcaggaaccaattcagcttgaaactttctagtgtcaccgcagcagacacagccgtctattactgtacgcgggatgactccagtaattggcggtcccgagggcaagggacactggtcacggtctcctcatctggaggcggtggaagcggtggaggaggatctcaggttcagctgcaagagtctggcggaggacttgctcaagctggcggaagcctgagactgtcttgtgccgcctctggcagaaccttcagcatgggctggtttagacaggcccctggcaaagagagagagttcgtcgccgccatcacatacagcggcggcagcccttactacgcctcttctgtcagaggccggttcaccatcagccgggacaacgccaagaacaccgtgtacctccagatgaacagcctgaagccagaggacaccgccgtgtactactgtgccgccaatccaacctacggcagcgactggaatgccgagaattggggccagggcacccaagtgacagtgtctagtggatccggcggcggaggatctggcggaggcggatctgggggcggaggctctttcgaacaagttcagcttcaacagcctggcgctgagctggtcaaacctggcgcttctgtgaagatgagctgcaaagccagcggctacgccttcagcagctactggatcaactggatgaagcagaaacccggccagggactcgaatggatcggccaaatctatcccggcgacggcgacaccaactacaacggcaagttcaagggcagagccacactgaccgccgatacctctagcagcacagcctacatgcagctgagcagcctgaccagcgaagatagcgccgtgtacttctgtgcccggtccatcacaacagtcgtgggctgcgctatggactattggggccagggaacaagcgtgaccgtgtctagtacgcgtgcctctacaaagggaccctccgtgtttcctctggctcccagcagcaagtctacaagcggaggaacagccgctctgggctgcctggtcaaggattactttcccgagcctgtgaccgtgtcctggaatagcggagcactgacaagcggcgtgcacacctttccagccgtgctgcaaagcagcggcctgtactctctgagcagcgtggtcacagtgcctagctctagcctgggcacccagacctacatctgcaatgtgaaccacaagcctagcaacaccaaggtggacaagagagtggaacccaagagctgtgaagtgaaaaccgactccaccgaccacgtgaagcccaaagagacagagaacaccaagcagcccagcaagagctgccacaagcccaaggccatcgtgcacaccgagaaagtgaacatgatgagcctgaccgtgctgggcctgcggatgctgttcgccaaaaccgtggccgtgaacttcctgctgaccgccaagctgttcttcctc

SEQ ID NO: 5454 - DNA, 3480 bp, Artificial Sequence
  Synthetic Polynucloetide
atggccttaccagtgaccgccttgctcctgccgctggccttgctgctccacgccgccaggccggaggttcagctgcttgagtctggcggaggactggttcaacctggcggaagcctgagactgtcttgtgccgccagcggcttcacctttagcagctacgccatgagctgggtccgacaggctcctggcaaaggactggaatgggtgtccagcatcagcggcagcggcgactacatctactacgccgatagcgtgaagggcagattcaccatcagccgggacatcagcaagaacaccctgtacctccagatgaacagcctgagagccgaggacaccgccgtgtactactgtgccaaagaaggcaccggcgctaacagcagcctggccgattatagaggccagggcacactggtcaccgtgtctagtggcggaggaagcggcggaggatctgaagttcagctgcttgagtctggcggaggactggttcaacctggcggaagcctgagactgtcttgtgccgccagcggcttcatcttcagcagctacgccatgagctgggtccgacaggctcctggaaagggccaagaatgggtttccggcgttagcggcacaggcgtgaacacctactacgccgatagcgtgaagggcagattcaccatcagccgggacaacagcaagaacaccctgtacctccagatgaacagcctgagagccgaggacaccgccgtgtactattgtgcctctggcaaaggctgggacagcggctcttggtacgaggactatagaggccagggcaccctggtcacagtttcttcaggtaccggcggaggcggatctggcggcggaggtagcggtggcggaggatctgaattcgacatccagatgacacagagccctagcagcctgtctgccagcgtgggagacagagtgaccatcacatgcaaggccagcgaccacatcaacaactggctggcctggtatcagcagaagcctggacaggcccctaagctgctgatctacggcgctaccacactggaaacaggcgtgcccagcagattttctggcagcggctctggcaccgactacaccctgacaatatccagcctccagcctgaggacttcgccacctactactgtcagcagagctggaacaccccttggacattcggccagggcaccaagctggaaatcaagagactcgagggacagcctaaggccaatcctaccgtgacactgttccctccaagcagcgaagaactccaggccaacaaggccacacttgtgtgcctgatctccgacttctaccctggggctgtgacagtggcttggaaggccgatggatctcctgtgaaagccggcgtggaaaccaccaagccatccaagcagagcaacaacaaatacgccgccagctcctacctgagcctgacacctgagcagtggaagtcccacagatcctacagctgccaagtgacccacgaaggcagcaccgtggaaaagacagtggcccctacagagtgcagcggcagagccgattgcggcatcaccagcgccagctaccaccagggcgtgctgagcgccaccatcctgtacgagatcctgctgggcaaggccaccctgtacgccgtgctggtgtctgccctggtgctgatggctatggtcaagcggaaggacagccggggaagggccaagcgatctggatctggagcaacaaacttctcactactcaaacaagcaggtgacgtggaggagaatcccgggcctactagtatggactggatttggcgcatccttttccttgtcggcgctgctaccggcgcccattcccagctccagttgcaagagagcggccctggcttggtaaaaccttccgagacccttagcctcacatgcacggttagtgggggcagcatttcctcaggtgattactattggggatggattcggcaacccccgggtaaaggattggagtggattggtcatatttattatagtggagcgacgtactacaacccaagtctcaaatccagggttacaatatccgtcgatacgagcaggaaccaattcagcttgaaactttctagtgtcaccgcagcagacacagccgtctattactgtacgcgggatgactccagtaattggcggtcccgagggcaagggacactggtcacggtctcctcatctggaggcggtggaagcggtggaggaggatctcaggttcagctgcaagagtctggcggaggacttgctcaagctggcggaagcctgagactgtcttgtgccgcctctggcagaaccttcagcatgggctggtttagacaggcccctggcaaagagagagagttcgtcgccgccatcacatacagcggcggcagcccttactacgcctcttctgtcagaggccggttcaccatcagccgggacaacgccaagaacaccgtgtacctccagatgaacagcctgaagccagaggacaccgccgtgtactactgtgccgccaatccaacctacggcagcgactggaatgccgagaattggggccagggcacccaagtgacagtgtctagtggatccggcggcggaggatctggcggaggcggatctgggggcggaggctctttcgaacaagttcagcttcaacagcctggcgctgagctggtcaaacctggcgcttctgtgaagatgagctgcaaagccagcggctacgccttcagcagctactggatcaactggatgaagcagaaacccggccagggactcgaatggatcggccaaatctatcccggcgacggcgacaccaactacaacggcaagttcaagggcagagccacactgaccgccgatacctctagcagcacagcctacatgcagctgagcagcctgaccagcgaagatagcgccgtgtacttctgtgcccggtccatcacaacagtcgtgggctgcgctatggactattggggccagggaacaagcgtgaccgtgtctagtacgcgtgcctctacaaagggaccctccgtgtttcctctggctcccagcagcaagtctacaagcggaggaacagccgctctgggctgcctggtcaaggattactttcccgagcctgtgaccgtgtcctggaatagcggagcactgacaagcggcgtgcacacctttccagccgtgctgcaaagcagcggcctgtactctctgagcagcgtggtcacagtgcctagctctagcctgggcacccagacctacatctgcaatgtgaaccacaagcctagcaacaccaaggtggacaagagagtggaacccaagagctgtatccccgaggacacattcttcccaagcagcgacgtgccctgcgacgtgaagctggtggaaaagagcttcgagacagacaccaacctgaacttccagaacctgagcgtgatcggcttcagaatcctgctgctgaaagtggccggctttaacctgctgatgaccctgcggctgtggtccagc

SEQ ID NO: 5455 - DNA, 3480 bp, Artificial Sequence
  Synthetic Polynucloetide
atggccttaccagtgaccgccttgctcctgccgctggccttgctgctccacgccgccaggccggaggttcagctgcttgagtctggcggaggactggttcaacctggcggaagcctgagactgtcttgtgccgccagcggcttcacctttagcagctacgccatgagctgggtccgacaggctcctggcaaaggactggaatgggtgtccagcatcagcggcagcggcgactacatctactacgccgatagcgtgaagggcagattcaccatcagccgggacatcagcaagaacaccctgtacctccagatgaacagcctgagagccgaggacaccgccgtgtactactgtgccaaagaaggcaccggcgctaacagcagcctggccgattatagaggccagggcacactggtcaccgtgtctagtggcggaggaagcggcggaggatctgaagttcagctgcttgagtctggcggaggactggttcaacctggcggaagcctgagactgtcttgtgccgccagcggcttcatcttcagcagctacgccatgagctgggtccgacaggctcctggaaagggccaagaatgggtttccggcgttagcggcacaggcgtgaacacctactacgccgatagcgtgaagggcagattcaccatcagccgggacaacagcaagaacaccctgtacctccagatgaacagcctgagagccgaggacaccgccgtgtactattgtgcctctggcaaaggctgggacagcggctcttggtacgaggactatagaggccagggcaccctggtcacagtttcttcaggtaccggcggaggcggatctggcggcggaggtagcggtggcggaggatctgaattcgacatccagatgacacagagccctagcagcctgtctgccagcgtgggagacagagtgaccatcacatgcaaggccagcgaccacatcaacaactggctggcctggtatcagcagaagcctggacaggcccctaagctgctgatctacggcgctaccacactggaaacaggcgtgcccagcagattttctggcagcggctctggcaccgactacaccctgacaatatccagcctccagcctgaggacttcgccacctactactgtcagcagagctggaacaccccttggacattcggccagggcaccaagctggaaatcaagagactcgagggacagcctaaggccaatcctaccgtgacactgttccctccaagcagcgaagaactccaggccaacaaggccacacttgtgtgcctgatctccgacttctaccctggggctgtgacagtggcttggaaggccgatggatctcctgtgaaagccggcgtggaaaccaccaagccatccaagcagagcaacaacaaatacgccgccagctcctacctgagcctgacacctgagcagtggaagtcccacagatcctacagctgccaagtgacccacgaaggcagcaccgtggaaaagacagtggcccctacagagtgcagcggcagagccgattgcggctttaccagcgagagctaccagcagggcgtgctgagcgccaccatcctgtacgagatcctgctgggcaaggccaccctgtacgccgtgctggtgtctgccctggtgctgatggctatggtcaagcggaaggacagccggggaagggccaagcgatctggatctggagcaacaaacttctcactactcaaacaagcaggtgacgtggaggagaatcccgggcctactagtatggactggatttggcgcatccttttccttgtcggcgctgctaccggcgcccattcccagctccagttgcaagagagcggccctggcttggtaaaaccttccgagacccttagcctcacatgcacggttagtgggggcagcatttcctcaggtgattactattggggatggattcggcaacccccgggtaaaggattggagtggattggtcatatttattatagtggagcgacgtactacaacccaagtctcaaatccagggttacaatatccgtcgatacgagcaggaaccaattcagcttgaaactttctagtgtcaccgcagcagacacagccgtctattactgtacgcgggatgactccagtaattggcggtcccgagggcaagggacactggtcacggtctcctcatctggaggcggtggaagcggtggaggaggatctcaggttcagctgcaagagtctggcggaggacttgctcaagctggcggaagcctgagactgtcttgtgccgcctctggcagaaccttcagcatgggctggtttagacaggcccctggcaaagagagagagttcgtcgccgccatcacatacagcggcggcagcccttactacgcctcttctgtcagaggccggttcaccatcagccgggacaacgccaagaacaccgtgtacctccagatgaacagcctgaagccagaggacaccgccgtgtactactgtgccgccaatccaacctacggcagcgactggaatgccgagaattggggccagggcacccaagtgacagtgtctagtggatccggcggcggaggatctggcggaggcggatctgggggcggaggctctttcgaacaagttcagcttcaacagcctggcgctgagctggtcaaacctggcgcttctgtgaagatgagctgcaaagccagcggctacgccttcagcagctactggatcaactggatgaagcagaaacccggccagggactcgaatggatcggccaaatctatcccggcgacggcgacaccaactacaacggcaagttcaagggcagagccacactgaccgccgatacctctagcagcacagcctacatgcagctgagcagcctgaccagcgaagatagcgccgtgtacttctgtgcccggtccatcacaacagtcgtgggctgcgctatggactattggggccagggaacaagcgtgaccgtgtctagtacgcgtgcctctacaaagggaccctccgtgtttcctctggctcccagcagcaagtctacaagcggaggaacagccgctctgggctgcctggtcaaggattactttcccgagcctgtgaccgtgtcctggaatagcggagcactgacaagcggcgtgcacacctttccagccgtgctgcaaagcagcggcctgtactctctgagcagcgtggtcacagtgcctagctctagcctgggcacccagacctacatctgcaatgtgaaccacaagcctagcaacaccaaggtggacaagagagtggaacccaagagctgtatccccgaggacacattcttcccaagccccgagagcagctgcgacgtgaagctggtggaaaagagcttcgagacagacaccaacctgaacttccagaacctgagcgtgatcggcttcagaatcctgctgctgaaagtggccggctttaacctgctgatgaccctgcggctgtggtccagc

SEQ ID NO: 5456 - DNA, 3381 bp, Artificial Sequence
  Synthetic Polynucloetide
atggccttaccagtgaccgccttgctcctgccgctggccttgctgctccacgccgccaggccggaggttcagctgcttgagtctggcggaggactggttcaacctggcggaagcctgagactgtcttgtgccgccagcggcttcacctttagcagctacgccatgagctgggtccgacaggctcctggcaaaggactggaatgggtgtccagcatcagcggcagcggcgactacatctactacgccgatagcgtgaagggcagattcaccatcagccgggacatcagcaagaacaccctgtacctccagatgaacagcctgagagccgaggacaccgccgtgtactactgtgccaaagaaggcaccggcgctaacagcagcctggccgattatagaggccagggcacactggtcaccgtgtctagtggcggaggaagcggcggaggatctgaagttcagctgcttgagtctggcggaggactggttcaacctggcggaagcctgagactgtcttgtgccgccagcggcttcatcttcagcagctacgccatgagctgggtccgacaggctcctggaaagggccaagaatgggtttccggcgttagcggcacaggcgtgaacacctactacgccgatagcgtgaagggcagattcaccatcagccgggacaacagcaagaacaccctgtacctccagatgaacagcctgagagccgaggacaccgccgtgtactattgtgcctctggcaaaggctgggacagcggctcttggtacgaggactatagaggccagggcaccctggtcacagtttcttcactcgagggacagcctaaggccaatcctaccgtgacactgttccctccaagcagcgaagaactccaggccaacaaggccacacttgtgtgcctgatctccgacttctaccctggggctgtgacagtggcttggaaggccgatggatctcctgtgaaagccggcgtggaaaccaccaagccatccaagcagagcaacaacaaatacgccgccagctcctacctgagcctgacacctgagcagtggaagtcccacagatcctacagctgccaagtgacccacgaaggcagcaccgtggaaaagacagtggcccctacagagtgcagcggcagagccgattgcggctttaccagcgagagctaccagcagggcgtgctgagcgccaccatcctgtacgagatcctgctgggcaaggccaccctgtacgccgtgctggtgtctgccctggtgctgatggctatggtcaagcggaaggacagccggggaagggccaagcgatctggatctggagcaacaaacttctcactactcaaacaagcaggtgacgtggaggagaatcccgggcctactagtatggactggatttggcgcatccttttccttgtcggcgctgctaccggcgcgcattcccagctccagttgcaagagagcggccctggcttggtaaaaccttccgagacccttagcctcacatgcacggttagtgggggcagcatttcctcaggtgattactattggggatggattcggcaacccccgggtaaaggattggagtggattggtcatatttattatagtggagcgacgtactacaacccaagtctcaaatccagggttacaatatccgtcgatacgagcaggaaccaattcagcttgaaactttctagtgtcaccgcagcagacacagccgtctattactgtacgcgggatgactccagtaattggcggtcccgagggcaagggacactggtcacggtctcctcatctggaggcggtggaagcggtggaggaggatctcaggttcagctgcaagagtctggcggaggacttgctcaagctggcggaagcctgagactgtcttgtgccgcctctggcagaaccttcagcatgggctggtttagacaggcccctggcaaagagagagagttcgtcgccgccatcacatacagcggcggcagcccttactacgcctcttctgtcagaggccggttcaccatcagccgggacaacgccaagaacaccgtgtacctccagatgaacagcctgaagccagaggacaccgccgtgtactactgtgccgccaatccaacctacggcagcgactggaatgccgagaattggggccagggcacccaagtgacagtgtctagtacgcgtgcctctacaaagggaccctccgtgtttcctctggctcccagcagcaagtctacaagcggaggaacagccgctctgggctgcctggtcaaggattactttcccgagcctgtgaccgtgtcctggaatagcggagcactgacaagcggcgtgcacacctttccagccgtgctgcaaagcagcggcctgtactctctgagcagcgtggtcacagtgcctagctctagcctgggcacccagacctacatctgcaatgtgaaccacaagcctagcaacaccaaggtggacaagagagtggaacccaagagctgtatccccgaggacacattcttcccaagccccgagagcagctgcgacgtgaagctggtggaaaagagcttcgagacagacaccaacctgaacttccagaacctgagcgtgatcggcttcagaatcctgctgctgaaagtggccggctttaacctgctgatgaccctgcggctgtggtccagccgcgccaagagaagcggatctggcgtgaagcagaccctgaatttcgacctgctgaagctggctggcgacgtggaatccaacccaggcccttctagaggccatatgaccgagtacaagcccacggtgcgcctcgccacccgcgacgacgtccccagggccgtacgcaccctcgccgccgcgttcgccgactaccccgccacgcgccacaccgtcgatccggaccgccacatcgagcgggtcaccgagctgcaagaactcttcctcacgcgcgtcgggctcgacatcggcaaggtgtgggtcgcggacgacggcgccgcggtggcggtctggaccacgccggagagcgtcgaagcgggggcggtgttcgccgagatcggcccgcgcatggccgagttgagcggttcccggctggccgcgcagcaacagatggaaggcctcctggcgccgcaccggcccaaggagcccgcgtggttcctggccaccgtcggcgtctcgcccgaccaccagggcaagggtctgggcagcgccgtcgtgctccccggagtggaggcggccgagcgcgccggggtgcccgccttcctggagacctccgcgccccgcaacctccccttctacgagcggctcggcttcaccgtcaccgccgacgtcgaggtgcccgaaggaccgcgcacctggtgcatgacccgcaagcccggtgcctga

SEQ ID NO: 5457 - DNA, 2679 bp, Artificial Sequence
  Synthetic Polynucloetide
atggccttaccagtgaccgccttgctcctgccgctggccttgctgctccacgccgccaggccggaggttcagctgcttgagtctggcggaggactggttcaacctggcggaagcctgagactgtcttgtgccgccagcggcttcacctttagcagctacgccatgagctgggtccgacaggctcctggcaaaggactggaatgggtgtccagcatcagcggcagcggcgactacatctactacgccgatagcgtgaagggcagattcaccatcagccgggacatcagcaagaacaccctgtacctccagatgaacagcctgagagccgaggacaccgccgtgtactactgtgccaaagaaggcaccggcgctaacagcagcctggccgattatagaggccagggcacactggtcaccgtgtctagtggcggaggaagcggcggaggatctgaagttcagctgcttgagtctggcggaggactggttcaacctggcggaagcctgagactgtcttgtgccgccagcggcttcatcttcagcagctacgccatgagctgggtccgacaggctcctggaaagggccaagaatgggtttccggcgttagcggcacaggcgtgaacacctactacgccgatagcgtgaagggcagattcaccatcagccgggacaacagcaagaacaccctgtacctccagatgaacagcctgagagccgaggacaccgccgtgtactattgtgcctctggcaaaggctgggacagcggctcttggtacgaggactatagaggccagggcaccctggtcacagtttcttcactcgagggacagcctaaggccaatcctaccgtgacactgttccctccaagcagcgaagaactccaggccaacaaggccacacttgtgtgcctgatctccgacttctaccctggggctgtgacagtggcttggaaggccgatggatctcctgtgaaagccggcgtggaaaccaccaagccatccaagcagagcaacaacaaatacgccgccagctcctacctgagcctgacacctgagcagtggaagtcccacagatcctacagctgccaagtgacccacgaaggcagcaccgtggaaaagacagtggcccctacagagtgcagcggcagagccgattgcggctttaccagcgagagctaccagcagggcgtgctgagcgccaccatcctgtacgagatcctgctgggcaaggccaccctgtacgccgtgctggtgtctgccctggtgctgatggctatggtcaagcggaaggacagccggggaagggccaagcgatctggatctggagcaacaaacttctcactactcaaacaagcaggtgacgtggaggagaatcccgggcctactagtatggactggatttggcgcatccttttccttgtcggcgctgctaccggcgcgcattcccagctccagttgcaagagagcggccctggcttggtaaaaccttccgagacccttagcctcacatgcacggttagtgggggcagcatttcctcaggtgattactattggggatggattcggcaacccccgggtaaaggattggagtggattggtcatatttattatagtggagcgacgtactacaacccaagtctcaaatccagggttacaatatccgtcgatacgagcaggaaccaattcagcttgaaactttctagtgtcaccgcagcagacacagccgtctattactgtacgcgggatgactccagtaattggcggtcccgagggcaagggacactggtcacggtctcctcatctggaggcggtggaagcggtggaggaggatctcaggttcagctgcaagagtctggcggaggacttgctcaagctggcggaagcctgagactgtcttgtgccgcctctggcagaaccttcagcatgggctggtttagacaggcccctggcaaagagagagagttcgtcgccgccatcacatacagcggcggcagcccttactacgcctcttctgtcagaggccggttcaccatcagccgggacaacgccaagaacaccgtgtacctccagatgaacagcctgaagccagaggacaccgccgtgtactactgtgccgccaatccaacctacggcagcgactggaatgccgagaattggggccagggcacccaagtgacagtgtctagtacgcgtgcctctacaaagggaccctccgtgtttcctctggctcccagcagcaagtctacaagcggaggaacagccgctctgggctgcctggtcaaggattactttcccgagcctgtgaccgtgtcctggaatagcggagcactgacaagcggcgtgcacacctttccagccgtgctgcaaagcagcggcctgtactctctgagcagcgtggtcacagtgcctagctctagcctgggcacccagacctacatctgcaatgtgaaccacaagcctagcaacaccaaggtggacaagagagtggaacccaagagctgtatccccgaggacacattcttcccaagccccgagagcagctgcgacgtgaagctggtggaaaagagcttcgagacagacaccaacctgaacttccagaacctgagcgtgatcggcttcagaatcctgctgctgaaagtggccggctttaacctgctgatgaccctgcggctgtggtccagc

SEQ ID NO: 5458 - DNA, 2766 bp, Artificial Sequence
  Synthetic Polynucloetide
atggccttaccagtgaccgccttgctcctgccgctggccttgctgctccacgccgccaggccggaggttcagctgcttgagtctggcggaggactggttcaacctggcggaagcctgagactgtcttgtgccgccagcggcttcacctttagcagctacgccatgagctgggtccgacaggctcctggcaaaggactggaatgggtgtccagcatcagcggcagcggcgactacatctactacgccgatagcgtgaagggcagattcaccatcagccgggacatcagcaagaacaccctgtacctccagatgaacagcctgagagccgaggacaccgccgtgtactactgtgccaaagaaggcaccggcgctaacagcagcctggccgattatagaggccagggcacactggtcaccgtgtctagtggcggaggaagcggcggaggatctgaagttcagctgcttgagtctggcggaggactggttcaacctggcggaagcctgagactgtcttgtgccgccagcggcttcatcttcagcagctacgccatgagctgggtccgacaggctcctggaaagggccaagaatgggtttccggcgttagcggcacaggcgtgaacacctactacgccgatagcgtgaagggcagattcaccatcagccgggacaacagcaagaacaccctgtacctccagatgaacagcctgagagccgaggacaccgccgtgtactattgtgcctctggcaaaggctgggacagcggctcttggtacgaggactatagaggccagggcaccctggtcacagtttcttcactcgagggatctggcagagccgattgcggctttaccagcgagagctaccagcagggcgtgctgagcgccaccatcctgtacgagatcctgctgggcaaggccaccctgtacgccgtgctggtgtctgccctggtgctgatggctatggtcaagcggaaggacagccggggaagggccaagcgatctggatctggagcaacaaacttctcactactcaaacaagcaggtgacgtggaggagaatcccgggcctactagtatggactggatttggcgcatccttttccttgtcggcgctgctaccggcgcgcattcccagctccagttgcaagagagcggccctggcttggtaaaaccttccgagacccttagcctcacatgcacggttagtgggggcagcatttcctcaggtgattactattggggatggattcggcaacccccgggtaaaggattggagtggattggtcatatttattatagtggagcgacgtactacaacccaagtctcaaatccagggttacaatatccgtcgatacgagcaggaaccaattcagcttgaaactttctagtgtcaccgcagcagacacagccgtctattactgtacgcgggatgactccagtaattggcggtcccgagggcaagggacactggtcacggtctcctcatctggaggcggtggaagcggtggaggaggatctcaggttcagctgcaagagtctggcggaggacttgctcaagctggcggaagcctgagactgtcttgtgccgcctctggcagaaccttcagcatgggctggtttagacaggcccctggcaaagagagagagttcgtcgccgccatcacatacagcggcggcagcccttactacgcctcttctgtcagaggccggttcaccatcagccgggacaacgccaagaacaccgtgtacctccagatgaacagcctgaagccagaggacaccgccgtgtactactgtgccgccaatccaacctacggcagcgactggaatgccgagaattggggccagggcacccaagtgacagtgtctagtacgcgtggcagcatccccgaggacacattcttcccaagccccgagagcagctgcgacgtgaagctggtggaaaagagcttcgagacagacaccaacctgaacttccagaacctgagcgtgatcggcttcagaatcctgctgctgaaagtggccggctttaacctgctgatgaccctgcggctgtggtccagccgcgccaagagaagcggatctggcgtgaagcagaccctgaatttcgacctgctgaagctggctggcgacgtggaatccaacccaggcccttctagaggccatatgaccgagtacaagcccacggtgcgcctcgccacccgcgacgacgtccccagggccgtacgcaccctcgccgccgcgttcgccgactaccccgccacgcgccacaccgtcgatccggaccgccacatcgagcgggtcaccgagctgcaagaactcttcctcacgcgcgtcgggctcgacatcggcaaggtgtgggtcgcggacgacggcgccgcggtggcggtctggaccacgccggagagcgtcgaagcgggggcggtgttcgccgagatcggcccgcgcatggccgagttgagcggttcccggctggccgcgcagcaacagatggaaggcctcctggcgccgcaccggcccaaggagcccgcgtggttcctggccaccgtcggcgtctcgcccgaccaccagggcaagggtctgggcagcgccgtcgtgctccccggagtggaggcggccgagcgcgccggggtgcccgccttcctggagacctccgcgccccgcaacctccccttctacgagcggctcggcttcaccgtcaccgccgacgtcgaggtgcccgaaggaccgcgcacctggtgcatgacccgcaagcccggtgcctga

SEQ ID NO: 5459 - DNA, 2064 bp, Artificial Sequence
  Synthetic Polynucloetide
atggccttaccagtgaccgccttgctcctgccgctggccttgctgctccacgccgccaggccggaggttcagctgcttgagtctggcggaggactggttcaacctggcggaagcctgagactgtcttgtgccgccagcggcttcacctttagcagctacgccatgagctgggtccgacaggctcctggcaaaggactggaatgggtgtccagcatcagcggcagcggcgactacatctactacgccgatagcgtgaagggcagattcaccatcagccgggacatcagcaagaacaccctgtacctccagatgaacagcctgagagccgaggacaccgccgtgtactactgtgccaaagaaggcaccggcgctaacagcagcctggccgattatagaggccagggcacactggtcaccgtgtctagtggcggaggaagcggcggaggatctgaagttcagctgcttgagtctggcggaggactggttcaacctggcggaagcctgagactgtcttgtgccgccagcggcttcatcttcagcagctacgccatgagctgggtccgacaggctcctggaaagggccaagaatgggtttccggcgttagcggcacaggcgtgaacacctactacgccgatagcgtgaagggcagattcaccatcagccgggacaacagcaagaacaccctgtacctccagatgaacagcctgagagccgaggacaccgccgtgtactattgtgcctctggcaaaggctgggacagcggctcttggtacgaggactatagaggccagggcaccctggtcacagtttcttcactcgagggatctggcagagccgattgcggctttaccagcgagagctaccagcagggcgtgctgagcgccaccatcctgtacgagatcctgctgggcaaggccaccctgtacgccgtgctggtgtctgccctggtgctgatggctatggtcaagcggaaggacagccggggaagggccaagcgatctggatctggagcaacaaacttctcactactcaaacaagcaggtgacgtggaggagaatcccgggcctactagtatggactggatttggcgcatccttttccttgtcggcgctgctaccggcgcgcattcccagctccagttgcaagagagcggccctggcttggtaaaaccttccgagacccttagcctcacatgcacggttagtgggggcagcatttcctcaggtgattactattggggatggattcggcaacccccgggtaaaggattggagtggattggtcatatttattatagtggagcgacgtactacaacccaagtctcaaatccagggttacaatatccgtcgatacgagcaggaaccaattcagcttgaaactttctagtgtcaccgcagcagacacagccgtctattactgtacgcgggatgactccagtaattggcggtcccgagggcaagggacactggtcacggtctcctcatctggaggcggtggaagcggtggaggaggatctcaggttcagctgcaagagtctggcggaggacttgctcaagctggcggaagcctgagactgtcttgtgccgcctctggcagaaccttcagcatgggctggtttagacaggcccctggcaaagagagagagttcgtcgccgccatcacatacagcggcggcagcccttactacgcctcttctgtcagaggccggttcaccatcagccgggacaacgccaagaacaccgtgtacctccagatgaacagcctgaagccagaggacaccgccgtgtactactgtgccgccaatccaacctacggcagcgactggaatgccgagaattggggccagggcacccaagtgacagtgtctagtacgcgtggcagcatccccgaggacacattcttcccaagccccgagagcagctgcgacgtgaagctggtggaaaagagcttcgagacagacaccaacctgaacttccagaacctgagcgtgatcggcttcagaatcctgctgctgaaagtggccggctttaacctgctgatgaccctgcggctgtggtccagc

SEQ ID NO: 5460 - DNA, 2793 bp, Artificial Sequence
  Synthetic Polynucloetide
atggccttaccagtgaccgccttgctcctgccgctggccttgctgctccacgccgccaggccggaggttcagctgcttgagtctggcggaggactggttcaacctggcggaagcctgagactgtcttgtgccgccagcggcttcacctttagcagctacgccatgagctgggtccgacaggctcctggcaaaggactggaatgggtgtccagcatcagcggcagcggcgactacatctactacgccgatagcgtgaagggcagattcaccatcagccgggacatcagcaagaacaccctgtacctccagatgaacagcctgagagccgaggacaccgccgtgtactactgtgccaaagaaggcaccggcgctaacagcagcctggccgattatagaggccagggcacactggtcaccgtgtctagtggcggaggaagcggcggaggatctgaagttcagctgcttgagtctggcggaggactggttcaacctggcggaagcctgagactgtcttgtgccgccagcggcttcatcttcagcagctacgccatgagctgggtccgacaggctcctggaaagggccaagaatgggtttccggcgttagcggcacaggcgtgaacacctactacgccgatagcgtgaagggcagattcaccatcagccgggacaacagcaagaacaccctgtacctccagatgaacagcctgagagccgaggacaccgccgtgtactattgtgcctctggcaaaggctgggacagcggctcttggtacgaggactatagaggccagggcaccctggtcacagtttcttcactcgaggacaaaactcacacatgcccaccgtgcccagcaggcagagccgattgcggctttaccagcgagagctaccagcagggcgtgctgagcgccaccatcctgtacgagatcctgctgggcaaggccaccctgtacgccgtgctggtgtctgccctggtgctgatggctatggtcaagcggaaggacagccggggaagggccaagcgatctggatctggagcaacaaacttctcactactcaaacaagcaggtgacgtggaggagaatcccgggcctactagtatggactggatttggcgcatccttttccttgtcggcgctgctaccggcgcgcattcccagctccagttgcaagagagcggccctggcttggtaaaaccttccgagacccttagcctcacatgcacggttagtgggggcagcatttcctcaggtgattactattggggatggattcggcaacccccgggtaaaggattggagtggattggtcatatttattatagtggagcgacgtactacaacccaagtctcaaatccagggttacaatatccgtcgatacgagcaggaaccaattcagcttgaaactttctagtgtcaccgcagcagacacagccgtctattactgtacgcgggatgactccagtaattggcggtcccgagggcaagggacactggtcacggtctcctcatctggaggcggtggaagcggtggaggaggatctcaggttcagctgcaagagtctggcggaggacttgctcaagctggcggaagcctgagactgtcttgtgccgcctctggcagaaccttcagcatgggctggtttagacaggcccctggcaaagagagagagttcgtcgccgccatcacatacagcggcggcagcccttactacgcctcttctgtcagaggccggttcaccatcagccgggacaacgccaagaacaccgtgtacctccagatgaacagcctgaagccagaggacaccgccgtgtactactgtgccgccaatccaacctacggcagcgactggaatgccgagaattggggccagggcacccaagtgacagtgtctagtacgcgtggcagcatccccgaggacacattcttcccaagccccgagagcagctgcgacgtgaagctggtggaaaagagcttcgagacagacaccaacctgaacttccagaacctgagcgtgatcggcttcagaatcctgctgctgaaagtggccggctttaacctgctgatgaccctgcggctgtggtccagccgcgccaagagaagcggatctggcgtgaagcagaccctgaatttcgacctgctgaagctggctggcgacgtggaatccaacccaggcccttctagaggccatatgaccgagtacaagcccacggtgcgcctcgccacccgcgacgacgtccccagggccgtacgcaccctcgccgccgcgttcgccgactaccccgccacgcgccacaccgtcgatccggaccgccacatcgagcgggtcaccgagctgcaagaactcttcctcacgcgcgtcgggctcgacatcggcaaggtgtgggtcgcggacgacggcgccgcggtggcggtctggaccacgccggagagcgtcgaagcgggggcggtgttcgccgagatcggcccgcgcatggccgagttgagcggttcccggctggccgcgcagcaacagatggaaggcctcctggcgccgcaccggcccaaggagcccgcgtggttcctggccaccgtcggcgtctcgcccgaccaccagggcaagggtctgggcagcgccgtcgtgctccccggagtggaggcggccgagcgcgccggggtgcccgccttcctggagacctccgcgccccgcaacctccccttctacgagcggctcggcttcaccgtcaccgccgacgtcgaggtgcccgaaggaccgcgcacctggtgcatgacccgcaagcccggtgcctga

SEQ ID NO: 5461 - DNA, 2793 bp, Artificial Sequence
  Synthetic Polynucloetide
atggccttaccagtgaccgccttgctcctgccgctggccttgctgctccacgccgccaggccggaggttcagctgcttgagtctggcggaggactggttcaacctggcggaagcctgagactgtcttgtgccgccagcggcttcacctttagcagctacgccatgagctgggtccgacaggctcctggcaaaggactggaatgggtgtccagcatcagcggcagcggcgactacatctactacgccgatagcgtgaagggcagattcaccatcagccgggacatcagcaagaacaccctgtacctccagatgaacagcctgagagccgaggacaccgccgtgtactactgtgccaaagaaggcaccggcgctaacagcagcctggccgattatagaggccagggcacactggtcaccgtgtctagtggcggaggaagcggcggaggatctgaagttcagctgcttgagtctggcggaggactggttcaacctggcggaagcctgagactgtcttgtgccgccagcggcttcatcttcagcagctacgccatgagctgggtccgacaggctcctggaaagggccaagaatgggtttccggcgttagcggcacaggcgtgaacacctactacgccgatagcgtgaagggcagattcaccatcagccgggacaacagcaagaacaccctgtacctccagatgaacagcctgagagccgaggacaccgccgtgtactattgtgcctctggcaaaggctgggacagcggctcttggtacgaggactatagaggccagggcaccctggtcacagtttcttcactcgagggatctggcagagccgattgcggctttaccagcgagagctaccagcagggcgtgctgagcgccaccatcctgtacgagatcctgctgggcaaggccaccctgtacgccgtgctggtgtctgccctggtgctgatggctatggtcaagcggaaggacagccggggaagggccaagcgatctggatctggagcaacaaacttctcactactcaaacaagcaggtgacgtggaggagaatcccgggcctactagtatggactggatttggcgcatccttttccttgtcggcgctgctaccggcgcgcattcccagctccagttgcaagagagcggccctggcttggtaaaaccttccgagacccttagcctcacatgcacggttagtgggggcagcatttcctcaggtgattactattggggatggattcggcaacccccgggtaaaggattggagtggattggtcatatttattatagtggagcgacgtactacaacccaagtctcaaatccagggttacaatatccgtcgatacgagcaggaaccaattcagcttgaaactttctagtgtcaccgcagcagacacagccgtctattactgtacgcgggatgactccagtaattggcggtcccgagggcaagggacactggtcacggtctcctcatctggaggcggtggaagcggtggaggaggatctcaggttcagctgcaagagtctggcggaggacttgctcaagctggcggaagcctgagactgtcttgtgccgcctctggcagaaccttcagcatgggctggtttagacaggcccctggcaaagagagagagttcgtcgccgccatcacatacagcggcggcagcccttactacgcctcttctgtcagaggccggttcaccatcagccgggacaacgccaagaacaccgtgtacctccagatgaacagcctgaagccagaggacaccgccgtgtactactgtgccgccaatccaacctacggcagcgactggaatgccgagaattggggccagggcacccaagtgacagtgtctagtacgcgtgataaaactcatacctgtccgccatgcccggcaatccccgaggacacattcttcccaagccccgagagcagctgcgacgtgaagctggtggaaaagagcttcgagacagacaccaacctgaacttccagaacctgagcgtgatcggcttcagaatcctgctgctgaaagtggccggctttaacctgctgatgaccctgcggctgtggtccagccgcgccaagagaagcggatctggcgtgaagcagaccctgaatttcgacctgctgaagctggctggcgacgtggaatccaacccaggcccttctagaggccatatgaccgagtacaagcccacggtgcgcctcgccacccgcgacgacgtccccagggccgtacgcaccctcgccgccgcgttcgccgactaccccgccacgcgccacaccgtcgatccggaccgccacatcgagcgggtcaccgagctgcaagaactcttcctcacgcgcgtcgggctcgacatcggcaaggtgtgggtcgcggacgacggcgccgcggtggcggtctggaccacgccggagagcgtcgaagcgggggcggtgttcgccgagatcggcccgcgcatggccgagttgagcggttcccggctggccgcgcagcaacagatggaaggcctcctggcgccgcaccggcccaaggagcccgcgtggttcctggccaccgtcggcgtctcgcccgaccaccagggcaagggtctgggcagcgccgtcgtgctccccggagtggaggcggccgagcgcgccggggtgcccgccttcctggagacctccgcgccccgcaacctccccttctacgagcggctcggcttcaccgtcaccgccgacgtcgaggtgcccgaaggaccgcgcacctggtgcatgacccgcaagcccggtgcctga

SEQ ID NO: 5462 - DNA, 2820 bp, Artificial Sequence
  Synthetic Polynucloetide
atggccttaccagtgaccgccttgctcctgccgctggccttgctgctccacgccgccaggccggaggttcagctgcttgagtctggcggaggactggttcaacctggcggaagcctgagactgtcttgtgccgccagcggcttcacctttagcagctacgccatgagctgggtccgacaggctcctggcaaaggactggaatgggtgtccagcatcagcggcagcggcgactacatctactacgccgatagcgtgaagggcagattcaccatcagccgggacatcagcaagaacaccctgtacctccagatgaacagcctgagagccgaggacaccgccgtgtactactgtgccaaagaaggcaccggcgctaacagcagcctggccgattatagaggccagggcacactggtcaccgtgtctagtggcggaggaagcggcggaggatctgaagttcagctgcttgagtctggcggaggactggttcaacctggcggaagcctgagactgtcttgtgccgccagcggcttcatcttcagcagctacgccatgagctgggtccgacaggctcctggaaagggccaagaatgggtttccggcgttagcggcacaggcgtgaacacctactacgccgatagcgtgaagggcagattcaccatcagccgggacaacagcaagaacaccctgtacctccagatgaacagcctgagagccgaggacaccgccgtgtactattgtgcctctggcaaaggctgggacagcggctcttggtacgaggactatagaggccagggcaccctggtcacagtttcttcactcgaggacaaaactcacacatgcccaccgtgcccagcaggcagagccgattgcggctttaccagcgagagctaccagcagggcgtgctgagcgccaccatcctgtacgagatcctgctgggcaaggccaccctgtacgccgtgctggtgtctgccctggtgctgatggctatggtcaagcggaaggacagccggggaagggccaagcgatctggatctggagcaacaaacttctcactactcaaacaagcaggtgacgtggaggagaatcccgggcctactagtatggactggatttggcgcatccttttccttgtcggcgctgctaccggcgcgcattcccagctccagttgcaagagagcggccctggcttggtaaaaccttccgagacccttagcctcacatgcacggttagtgggggcagcatttcctcaggtgattactattggggatggattcggcaacccccgggtaaaggattggagtggattggtcatatttattatagtggagcgacgtactacaacccaagtctcaaatccagggttacaatatccgtcgatacgagcaggaaccaattcagcttgaaactttctagtgtcaccgcagcagacacagccgtctattactgtacgcgggatgactccagtaattggcggtcccgagggcaagggacactggtcacggtctcctcatctggaggcggtggaagcggtggaggaggatctcaggttcagctgcaagagtctggcggaggacttgctcaagctggcggaagcctgagactgtcttgtgccgcctctggcagaaccttcagcatgggctggtttagacaggcccctggcaaagagagagagttcgtcgccgccatcacatacagcggcggcagcccttactacgcctcttctgtcagaggccggttcaccatcagccgggacaacgccaagaacaccgtgtacctccagatgaacagcctgaagccagaggacaccgccgtgtactactgtgccgccaatccaacctacggcagcgactggaatgccgagaattggggccagggcacccaagtgacagtgtctagtacgcgtgataaaactcatacctgtccgccatgcccggcaatccccgaggacacattcttcccaagccccgagagcagctgcgacgtgaagctggtggaaaagagcttcgagacagacaccaacctgaacttccagaacctgagcgtgatcggcttcagaatcctgctgctgaaagtggccggctttaacctgctgatgaccctgcggctgtggtccagccgcgccaagagaagcggatctggcgtgaagcagaccctgaatttcgacctgctgaagctggctggcgacgtggaatccaacccaggcccttctagaggccatatgaccgagtacaagcccacggtgcgcctcgccacccgcgacgacgtccccagggccgtacgcaccctcgccgccgcgttcgccgactaccccgccacgcgccacaccgtcgatccggaccgccacatcgagcgggtcaccgagctgcaagaactcttcctcacgcgcgtcgggctcgacatcggcaaggtgtgggtcgcggacgacggcgccgcggtggcggtctggaccacgccggagagcgtcgaagcgggggcggtgttcgccgagatcggcccgcgcatggccgagttgagcggttcccggctggccgcgcagcaacagatggaaggcctcctggcgccgcaccggcccaaggagcccgcgtggttcctggccaccgtcggcgtctcgcccgaccaccagggcaagggtctgggcagcgccgtcgtgctccccggagtggaggcggccgagcgcgccggggtgcccgccttcctggagacctccgcgccccgcaacctccccttctacgagcggctcggcttcaccgtcaccgccgacgtcgaggtgcccgaaggaccgcgcacctggtgcatgacccgcaagcccggtgcctga

SEQ ID NO: 5463 - DNA, 2118 bp, Artificial Sequence
  Synthetic Polynucloetide
atggccttaccagtgaccgccttgctcctgccgctggccttgctgctccacgccgccaggccggaggttcagctgcttgagtctggcggaggactggttcaacctggcggaagcctgagactgtcttgtgccgccagcggcttcacctttagcagctacgccatgagctgggtccgacaggctcctggcaaaggactggaatgggtgtccagcatcagcggcagcggcgactacatctactacgccgatagcgtgaagggcagattcaccatcagccgggacatcagcaagaacaccctgtacctccagatgaacagcctgagagccgaggacaccgccgtgtactactgtgccaaagaaggcaccggcgctaacagcagcctggccgattatagaggccagggcacactggtcaccgtgtctagtggcggaggaagcggcggaggatctgaagttcagctgcttgagtctggcggaggactggttcaacctggcggaagcctgagactgtcttgtgccgccagcggcttcatcttcagcagctacgccatgagctgggtccgacaggctcctggaaagggccaagaatgggtttccggcgttagcggcacaggcgtgaacacctactacgccgatagcgtgaagggcagattcaccatcagccgggacaacagcaagaacaccctgtacctccagatgaacagcctgagagccgaggacaccgccgtgtactattgtgcctctggcaaaggctgggacagcggctcttggtacgaggactatagaggccagggcaccctggtcacagtttcttcactcgaggacaaaactcacacatgcccaccgtgcccagcaggcagagccgattgcggctttaccagcgagagctaccagcagggcgtgctgagcgccaccatcctgtacgagatcctgctgggcaaggccaccctgtacgccgtgctggtgtctgccctggtgctgatggctatggtcaagcggaaggacagccggggaagggccaagcgatctggatctggagcaacaaacttctcactactcaaacaagcaggtgacgtggaggagaatcccgggcctactagtatggactggatttggcgcatccttttccttgtcggcgctgctaccggcgcgcattcccagctccagttgcaagagagcggccctggcttggtaaaaccttccgagacccttagcctcacatgcacggttagtgggggcagcatttcctcaggtgattactattggggatggattcggcaacccccgggtaaaggattggagtggattggtcatatttattatagtggagcgacgtactacaacccaagtctcaaatccagggttacaatatccgtcgatacgagcaggaaccaattcagcttgaaactttctagtgtcaccgcagcagacacagccgtctattactgtacgcgggatgactccagtaattggcggtcccgagggcaagggacactggtcacggtctcctcatctggaggcggtggaagcggtggaggaggatctcaggttcagctgcaagagtctggcggaggacttgctcaagctggcggaagcctgagactgtcttgtgccgcctctggcagaaccttcagcatgggctggtttagacaggcccctggcaaagagagagagttcgtcgccgccatcacatacagcggcggcagcccttactacgcctcttctgtcagaggccggttcaccatcagccgggacaacgccaagaacaccgtgtacctccagatgaacagcctgaagccagaggacaccgccgtgtactactgtgccgccaatccaacctacggcagcgactggaatgccgagaattggggccagggcacccaagtgacagtgtctagtacgcgtgataaaactcatacctgtccgccatgcccggcaatccccgaggacacattcttcccaagccccgagagcagctgcgacgtgaagctggtggaaaagagcttcgagacagacaccaacctgaacttccagaacctgagcgtgatcggcttcagaatcctgctgctgaaagtggccggctttaacctgctgatgaccctgcggctgtggtccagc

SEQ ID NO: 5464 - DNA, 2091 bp, Artificial Sequence
  Synthetic Polynucloetide
atggccttaccagtgaccgccttgctcctgccgctggccttgctgctccacgccgccaggccggaggttcagctgcttgagtctggcggaggactggttcaacctggcggaagcctgagactgtcttgtgccgccagcggcttcacctttagcagctacgccatgagctgggtccgacaggctcctggcaaaggactggaatgggtgtccagcatcagcggcagcggcgactacatctactacgccgatagcgtgaagggcagattcaccatcagccgggacatcagcaagaacaccctgtacctccagatgaacagcctgagagccgaggacaccgccgtgtactactgtgccaaagaaggcaccggcgctaacagcagcctggccgattatagaggccagggcacactggtcaccgtgtctagtggcggaggaagcggcggaggatctgaagttcagctgcttgagtctggcggaggactggttcaacctggcggaagcctgagactgtcttgtgccgccagcggcttcatcttcagcagctacgccatgagctgggtccgacaggctcctggaaagggccaagaatgggtttccggcgttagcggcacaggcgtgaacacctactacgccgatagcgtgaagggcagattcaccatcagccgggacaacagcaagaacaccctgtacctccagatgaacagcctgagagccgaggacaccgccgtgtactattgtgcctctggcaaaggctgggacagcggctcttggtacgaggactatagaggccagggcaccctggtcacagtttcttcactcgagggatctggcagagccgattgcggctttaccagcgagagctaccagcagggcgtgctgagcgccaccatcctgtacgagatcctgctgggcaaggccaccctgtacgccgtgctggtgtctgccctggtgctgatggctatggtcaagcggaaggacagccggggaagggccaagcgatctggatctggagcaacaaacttctcactactcaaacaagcaggtgacgtggaggagaatcccgggcctactagtatggactggatttggcgcatccttttccttgtcggcgctgctaccggcgcgcattcccagctccagttgcaagagagcggccctggcttggtaaaaccttccgagacccttagcctcacatgcacggttagtgggggcagcatttcctcaggtgattactattggggatggattcggcaacccccgggtaaaggattggagtggattggtcatatttattatagtggagcgacgtactacaacccaagtctcaaatccagggttacaatatccgtcgatacgagcaggaaccaattcagcttgaaactttctagtgtcaccgcagcagacacagccgtctattactgtacgcgggatgactccagtaattggcggtcccgagggcaagggacactggtcacggtctcctcatctggaggcggtggaagcggtggaggaggatctcaggttcagctgcaagagtctggcggaggacttgctcaagctggcggaagcctgagactgtcttgtgccgcctctggcagaaccttcagcatgggctggtttagacaggcccctggcaaagagagagagttcgtcgccgccatcacatacagcggcggcagcccttactacgcctcttctgtcagaggccggttcaccatcagccgggacaacgccaagaacaccgtgtacctccagatgaacagcctgaagccagaggacaccgccgtgtactactgtgccgccaatccaacctacggcagcgactggaatgccgagaattggggccagggcacccaagtgacagtgtctagtacgcgtgataaaactcatacctgtccgccatgcccggcaatccccgaggacacattcttcccaagccccgagagcagctgcgacgtgaagctggtggaaaagagcttcgagacagacaccaacctgaacttccagaacctgagcgtgatcggcttcagaatcctgctgctgaaagtggccggctttaacctgctgatgaccctgcggctgtggtccagc

SEQ ID NO: 5465 - DNA, 3447 bp, Artificial Sequence
  Synthetic Polynucloetide
atggccttaccagtgaccgccttgctcctgccgctggccttgctgctccacgccgccaggccggaggttcagctgcttgagtctggcggaggactggttcaacctggcggaagcctgagactgtcttgtgccgccagcggcttcacctttagcagctacgccatgagctgggtccgacaggctcctggcaaaggactggaatgggtgtccagcatcagcggcagcggcgactacatctactacgccgatagcgtgaagggcagattcaccatcagccgggacatcagcaagaacaccctgtacctccagatgaacagcctgagagccgaggacaccgccgtgtactactgtgccaaagaaggcaccggcgctaacagcagcctggccgattatagaggccagggcacactggtcaccgtgtctagtggcggaggaagcggcggaggatctgaagttcagctgcttgagtctggcggaggactggttcaacctggcggaagcctgagactgtcttgtgccgccagcggcttcatcttcagcagctacgccatgagctgggtccgacaggctcctggaaagggccaagaatgggtttccggcgttagcggcacaggcgtgaacacctactacgccgatagcgtgaagggcagattcaccatcagccgggacaacagcaagaacaccctgtacctccagatgaacagcctgagagccgaggacaccgccgtgtactattgtgcctctggcaaaggctgggacagcggctcttggtacgaggactatagaggccagggcaccctggtcacagtttcttcactcgagggacagcctaaggccaatcctaccgtgacactgttccctccaagcagcgaagaactccaggccaacaaggccacacttgtgtgcctgatctccgacttctaccctggggctgtgacagtggcttggaaggccgatggatctcctgtgaaagccggcgtggaaaccaccaagccatccaagcagagcaacaacaaatacgccgccagctcctacctgagcctgacacctgagcagtggaagtcccacagatcctacagctgccaagtgacccacgaaggcagcaccgtggaaaagacagtggcccctacagagtgcagccccatcaagaccgatgtgattacaatggaccccaaggacaactgctccaaggacgccaacgataccctgctgctccagctgaccaacaccagcgcctactacatgtacttgttgctgctgctgaagtccgtggtgtacttcgccatcatcacatgctgcctgctgcggagaaccgccttctgctgcaacggcgagaagtctagggccaagcgatctggatctggagcaacaaacttctcactactcaaacaagcaggtgacgtggaggagaatcccgggcctactagtatggactggatttggcgcatccttttccttgtcggcgctgctaccggcgcgcattcccagctccagttgcaagagagcggccctggcttggtaaaaccttccgagacccttagcctcacatgcacggttagtgggggcagcatttcctcaggtgattactattggggatggattcggcaacccccgggtaaaggattggagtggattggtcatatttattatagtggagcgacgtactacaacccaagtctcaaatccagggttacaatatccgtcgatacgagcaggaaccaattcagcttgaaactttctagtgtcaccgcagcagacacagccgtctattactgtacgcgggatgactccagtaattggcggtcccgagggcaagggacactggtcacggtctcctcatctggaggcggtggaagcggtggaggaggatctcaggttcagctgcaagagtctggcggaggacttgctcaagctggcggaagcctgagactgtcttgtgccgcctctggcagaaccttcagcatgggctggtttagacaggcccctggcaaagagagagagttcgtcgccgccatcacatacagcggcggcagcccttactacgcctcttctgtcagaggccggttcaccatcagccgggacaacgccaagaacaccgtgtacctccagatgaacagcctgaagccagaggacaccgccgtgtactactgtgccgccaatccaacctacggcagcgactggaatgccgagaattggggccagggcacccaagtgacagtgtctagtacgcgtgcctctacaaagggaccctccgtgtttcctctggctcccagcagcaagtctacaagcggaggaacagccgctctgggctgcctggtcaaggattactttcccgagcctgtgaccgtgtcctggaatagcggagcactgacaagcggcgtgcacacctttccagccgtgctgcaaagcagcggcctgtactctctgagcagcgtggtcacagtgcctagctctagcctgggcacccagacctacatctgcaatgtgaaccacaagcctagcaacaccaaggtggacaagagagtggaacccaagagctgtgaagtgaaaaccgactccaccgaccacgtgaagcccaaagagacagagaacaccaagcagcccagcaagagctgccacaagcccaaggccatcgtgcacaccgagaaagtgaacatgatgagcctgaccgtgctgggcctgcggatgctgttcgccaaaaccgtggccgtgaacttcctgctgaccgccaagctgttcttcctccgcgccaagagaagcggatctggcgtgaagcagaccctgaatttcgacctgctgaagctggctggcgacgtggaatccaacccaggcccttctagaggccatatgaccgagtacaagcccacggtgcgcctcgccacccgcgacgacgtccccagggccgtacgcaccctcgccgccgcgttcgccgactaccccgccacgcgccacaccgtcgatccggaccgccacatcgagcgggtcaccgagctgcaagaactcttcctcacgcgcgtcgggctcgacatcggcaaggtgtgggtcgcggacgacggcgccgcggtggcggtctggaccacgccggagagcgtcgaagcgggggcggtgttcgccgagatcggcccgcgcatggccgagttgagcggttcccggctggccgcgcagcaacagatggaaggcctcctggcgccgcaccggcccaaggagcccgcgtggttcctggccaccgtcggcgtctcgcccgaccaccagggcaagggtctgggcagcgccgtcgtgctccccggagtggaggcggccgagcgcgccggggtgcccgccttcctggagacctccgcgccccgcaacctccccttctacgagcggctcggcttcaccgtcaccgccgacgtcgaggtgcccgaaggaccgcgcacctggtgcatgacccgcaagcccggtgcctga

SEQ ID NO: 5466 - DNA, 2745 bp, Artificial Sequence
  Synthetic Polynucloetide
atggccttaccagtgaccgccttgctcctgccgctggccttgctgctccacgccgccaggccggaggttcagctgcttgagtctggcggaggactggttcaacctggcggaagcctgagactgtcttgtgccgccagcggcttcacctttagcagctacgccatgagctgggtccgacaggctcctggcaaaggactggaatgggtgtccagcatcagcggcagcggcgactacatctactacgccgatagcgtgaagggcagattcaccatcagccgggacatcagcaagaacaccctgtacctccagatgaacagcctgagagccgaggacaccgccgtgtactactgtgccaaagaaggcaccggcgctaacagcagcctggccgattatagaggccagggcacactggtcaccgtgtctagtggcggaggaagcggcggaggatctgaagttcagctgcttgagtctggcggaggactggttcaacctggcggaagcctgagactgtcttgtgccgccagcggcttcatcttcagcagctacgccatgagctgggtccgacaggctcctggaaagggccaagaatgggtttccggcgttagcggcacaggcgtgaacacctactacgccgatagcgtgaagggcagattcaccatcagccgggacaacagcaagaacaccctgtacctccagatgaacagcctgagagccgaggacaccgccgtgtactattgtgcctctggcaaaggctgggacagcggctcttggtacgaggactatagaggccagggcaccctggtcacagtttcttcactcgagggacagcctaaggccaatcctaccgtgacactgttccctccaagcagcgaagaactccaggccaacaaggccacacttgtgtgcctgatctccgacttctaccctggggctgtgacagtggcttggaaggccgatggatctcctgtgaaagccggcgtggaaaccaccaagccatccaagcagagcaacaacaaatacgccgccagctcctacctgagcctgacacctgagcagtggaagtcccacagatcctacagctgccaagtgacccacgaaggcagcaccgtggaaaagacagtggcccctacagagtgcagccccatcaagaccgatgtgattacaatggaccccaaggacaactgctccaaggacgccaacgataccctgctgctccagctgaccaacaccagcgcctactacatgtacttgttgctgctgctgaagtccgtggtgtacttcgccatcatcacatgctgcctgctgcggagaaccgccttctgctgcaacggcgagaagtctagggccaagcgatctggatctggagcaacaaacttctcactactcaaacaagcaggtgacgtggaggagaatcccgggcctactagtatggactggatttggcgcatccttttccttgtcggcgctgctaccggcgcgcattcccagctccagttgcaagagagcggccctggcttggtaaaaccttccgagacccttagcctcacatgcacggttagtgggggcagcatttcctcaggtgattactattggggatggattcggcaacccccgggtaaaggattggagtggattggtcatatttattatagtggagcgacgtactacaacccaagtctcaaatccagggttacaatatccgtcgatacgagcaggaaccaattcagcttgaaactttctagtgtcaccgcagcagacacagccgtctattactgtacgcgggatgactccagtaattggcggtcccgagggcaagggacactggtcacggtctcctcatctggaggcggtggaagcggtggaggaggatctcaggttcagctgcaagagtctggcggaggacttgctcaagctggcggaagcctgagactgtcttgtgccgcctctggcagaaccttcagcatgggctggtttagacaggcccctggcaaagagagagagttcgtcgccgccatcacatacagcggcggcagcccttactacgcctcttctgtcagaggccggttcaccatcagccgggacaacgccaagaacaccgtgtacctccagatgaacagcctgaagccagaggacaccgccgtgtactactgtgccgccaatccaacctacggcagcgactggaatgccgagaattggggccagggcacccaagtgacagtgtctagtacgcgtgcctctacaaagggaccctccgtgtttcctctggctcccagcagcaagtctacaagcggaggaacagccgctctgggctgcctggtcaaggattactttcccgagcctgtgaccgtgtcctggaatagcggagcactgacaagcggcgtgcacacctttccagccgtgctgcaaagcagcggcctgtactctctgagcagcgtggtcacagtgcctagctctagcctgggcacccagacctacatctgcaatgtgaaccacaagcctagcaacaccaaggtggacaagagagtggaacccaagagctgtgaagtgaaaaccgactccaccgaccacgtgaagcccaaagagacagagaacaccaagcagcccagcaagagctgccacaagcccaaggccatcgtgcacaccgagaaagtgaacatgatgagcctgaccgtgctgggcctgcggatgctgttcgccaaaaccgtggccgtgaacttcctgctgaccgccaagctgttcttcctc

SEQ ID NO: 5467 - DNA, 2832 bp, Artificial Sequence
  Synthetic Polynucloetide
atggccttaccagtgaccgccttgctcctgccgctggccttgctgctccacgccgccaggccggaggttcagctgcttgagtctggcggaggactggttcaacctggcggaagcctgagactgtcttgtgccgccagcggcttcacctttagcagctacgccatgagctgggtccgacaggctcctggcaaaggactggaatgggtgtccagcatcagcggcagcggcgactacatctactacgccgatagcgtgaagggcagattcaccatcagccgggacatcagcaagaacaccctgtacctccagatgaacagcctgagagccgaggacaccgccgtgtactactgtgccaaagaaggcaccggcgctaacagcagcctggccgattatagaggccagggcacactggtcaccgtgtctagtggcggaggaagcggcggaggatctgaagttcagctgcttgagtctggcggaggactggttcaacctggcggaagcctgagactgtcttgtgccgccagcggcttcatcttcagcagctacgccatgagctgggtccgacaggctcctggaaagggccaagaatgggtttccggcgttagcggcacaggcgtgaacacctactacgccgatagcgtgaagggcagattcaccatcagccgggacaacagcaagaacaccctgtacctccagatgaacagcctgagagccgaggacaccgccgtgtactattgtgcctctggcaaaggctgggacagcggctcttggtacgaggactatagaggccagggcaccctggtcacagtttcttcactcgagggatctcccatcaagaccgatgtgattacaatggaccccaaggacaactgctccaaggacgccaacgataccctgctgctccagctgaccaacaccagcgcctactacatgtacttgttgctgctgctgaagtccgtggtgtacttcgccatcatcacatgctgcctgctgcggagaaccgccttctgctgcaacggcgagaagtctagggccaagcgatctggatctggagcaacaaacttctcactactcaaacaagcaggtgacgtggaggagaatcccgggcctactagtatggactggatttggcgcatccttttccttgtcggcgctgctaccggcgcgcattcccagctccagttgcaagagagcggccctggcttggtaaaaccttccgagacccttagcctcacatgcacggttagtgggggcagcatttcctcaggtgattactattggggatggattcggcaacccccgggtaaaggattggagtggattggtcatatttattatagtggagcgacgtactacaacccaagtctcaaatccagggttacaatatccgtcgatacgagcaggaaccaattcagcttgaaactttctagtgtcaccgcagcagacacagccgtctattactgtacgcgggatgactccagtaattggcggtcccgagggcaagggacactggtcacggtctcctcatctggaggcggtggaagcggtggaggaggatctcaggttcagctgcaagagtctggcggaggacttgctcaagctggcggaagcctgagactgtcttgtgccgcctctggcagaaccttcagcatgggctggtttagacaggcccctggcaaagagagagagttcgtcgccgccatcacatacagcggcggcagcccttactacgcctcttctgtcagaggccggttcaccatcagccgggacaacgccaagaacaccgtgtacctccagatgaacagcctgaagccagaggacaccgccgtgtactactgtgccgccaatccaacctacggcagcgactggaatgccgagaattggggccagggcacccaagtgacagtgtctagtacgcgtggcagcgaagtgaaaaccgactccaccgaccacgtgaagcccaaagagacagagaacaccaagcagcccagcaagagctgccacaagcccaaggccatcgtgcacaccgagaaagtgaacatgatgagcctgaccgtgctgggcctgcggatgctgttcgccaaaaccgtggccgtgaacttcctgctgaccgccaagctgttcttcctccgcgccaagagaagcggatctggcgtgaagcagaccctgaatttcgacctgctgaagctggctggcgacgtggaatccaacccaggcccttctagaggccatatgaccgagtacaagcccacggtgcgcctcgccacccgcgacgacgtccccagggccgtacgcaccctcgccgccgcgttcgccgactaccccgccacgcgccacaccgtcgatccggaccgccacatcgagcgggtcaccgagctgcaagaactcttcctcacgcgcgtcgggctcgacatcggcaaggtgtgggtcgcggacgacggcgccgcggtggcggtctggaccacgccggagagcgtcgaagcgggggcggtgttcgccgagatcggcccgcgcatggccgagttgagcggttcccggctggccgcgcagcaacagatggaaggcctcctggcgccgcaccggcccaaggagcccgcgtggttcctggccaccgtcggcgtctcgcccgaccaccagggcaagggtctgggcagcgccgtcgtgctccccggagtggaggcggccgagcgcgccggggtgcccgccttcctggagacctccgcgccccgcaacctccccttctacgagcggctcggcttcaccgtcaccgccgacgtcgaggtgcccgaaggaccgcgcacctggtgcatgacccgcaagcccggtgcctga

SEQ ID NO: 5468 - DNA, 2130 bp, Artificial Sequence
  Synthetic Polynucloetide
atggccttaccagtgaccgccttgctcctgccgctggccttgctgctccacgccgccaggccggaggttcagctgcttgagtctggcggaggactggttcaacctggcggaagcctgagactgtcttgtgccgccagcggcttcacctttagcagctacgccatgagctgggtccgacaggctcctggcaaaggactggaatgggtgtccagcatcagcggcagcggcgactacatctactacgccgatagcgtgaagggcagattcaccatcagccgggacatcagcaagaacaccctgtacctccagatgaacagcctgagagccgaggacaccgccgtgtactactgtgccaaagaaggcaccggcgctaacagcagcctggccgattatagaggccagggcacactggtcaccgtgtctagtggcggaggaagcggcggaggatctgaagttcagctgcttgagtctggcggaggactggttcaacctggcggaagcctgagactgtcttgtgccgccagcggcttcatcttcagcagctacgccatgagctgggtccgacaggctcctggaaagggccaagaatgggtttccggcgttagcggcacaggcgtgaacacctactacgccgatagcgtgaagggcagattcaccatcagccgggacaacagcaagaacaccctgtacctccagatgaacagcctgagagccgaggacaccgccgtgtactattgtgcctctggcaaaggctgggacagcggctcttggtacgaggactatagaggccagggcaccctggtcacagtttcttcactcgagggatctcccatcaagaccgatgtgattacaatggaccccaaggacaactgctccaaggacgccaacgataccctgctgctccagctgaccaacaccagcgcctactacatgtacttgttgctgctgctgaagtccgtggtgtacttcgccatcatcacatgctgcctgctgcggagaaccgccttctgctgcaacggcgagaagtctagggccaagcgatctggatctggagcaacaaacttctcactactcaaacaagcaggtgacgtggaggagaatcccgggcctactagtatggactggatttggcgcatccttttccttgtcggcgctgctaccggcgcgcattcccagctccagttgcaagagagcggccctggcttggtaaaaccttccgagacccttagcctcacatgcacggttagtgggggcagcatttcctcaggtgattactattggggatggattcggcaacccccgggtaaaggattggagtggattggtcatatttattatagtggagcgacgtactacaacccaagtctcaaatccagggttacaatatccgtcgatacgagcaggaaccaattcagcttgaaactttctagtgtcaccgcagcagacacagccgtctattactgtacgcgggatgactccagtaattggcggtcccgagggcaagggacactggtcacggtctcctcatctggaggcggtggaagcggtggaggaggatctcaggttcagctgcaagagtctggcggaggacttgctcaagctggcggaagcctgagactgtcttgtgccgcctctggcagaaccttcagcatgggctggtttagacaggcccctggcaaagagagagagttcgtcgccgccatcacatacagcggcggcagcccttactacgcctcttctgtcagaggccggttcaccatcagccgggacaacgccaagaacaccgtgtacctccagatgaacagcctgaagccagaggacaccgccgtgtactactgtgccgccaatccaacctacggcagcgactggaatgccgagaattggggccagggcacccaagtgacagtgtctagtacgcgtggcagcgaagtgaaaaccgactccaccgaccacgtgaagcccaaagagacagagaacaccaagcagcccagcaagagctgccacaagcccaaggccatcgtgcacaccgagaaagtgaacatgatgagcctgaccgtgctgggcctgcggatgctgttcgccaaaaccgtggccgtgaacttcctgctgaccgccaagctgttcttcctc

SEQ ID NO: 5469 - DNA, 2184 bp, Artificial Sequence
  Synthetic Polynucloetide
atggccttaccagtgaccgccttgctcctgccgctggccttgctgctccacgccgccaggccggaggttcagctgcttgagtctggcggaggactggttcaacctggcggaagcctgagactgtcttgtgccgccagcggcttcacctttagcagctacgccatgagctgggtccgacaggctcctggcaaaggactggaatgggtgtccagcatcagcggcagcggcgactacatctactacgccgatagcgtgaagggcagattcaccatcagccgggacatcagcaagaacaccctgtacctccagatgaacagcctgagagccgaggacaccgccgtgtactactgtgccaaagaaggcaccggcgctaacagcagcctggccgattatagaggccagggcacactggtcaccgtgtctagtggcggaggaagcggcggaggatctgaagttcagctgcttgagtctggcggaggactggttcaacctggcggaagcctgagactgtcttgtgccgccagcggcttcatcttcagcagctacgccatgagctgggtccgacaggctcctggaaagggccaagaatgggtttccggcgttagcggcacaggcgtgaacacctactacgccgatagcgtgaagggcagattcaccatcagccgggacaacagcaagaacaccctgtacctccagatgaacagcctgagagccgaggacaccgccgtgtactattgtgcctctggcaaaggctgggacagcggctcttggtacgaggactatagaggccagggcaccctggtcacagtttcttcactcgaggacaaaactcacacatgcccaccgtgcccagcacccatcaagaccgatgtgattacaatggaccccaaggacaactgctccaaggacgccaacgataccctgctgctccagctgaccaacaccagcgcctactacatgtacttgttgctgctgctgaagtccgtggtgtacttcgccatcatcacatgctgcctgctgcggagaaccgccttctgctgcaacggcgagaagtctagggccaagcgatctggatctggagcaacaaacttctcactactcaaacaagcaggtgacgtggaggagaatcccgggcctactagtatggactggatttggcgcatccttttccttgtcggcgctgctaccggcgcgcattcccagctccagttgcaagagagcggccctggcttggtaaaaccttccgagacccttagcctcacatgcacggttagtgggggcagcatttcctcaggtgattactattggggatggattcggcaacccccgggtaaaggattggagtggattggtcatatttattatagtggagcgacgtactacaacccaagtctcaaatccagggttacaatatccgtcgatacgagcaggaaccaattcagcttgaaactttctagtgtcaccgcagcagacacagccgtctattactgtacgcgggatgactccagtaattggcggtcccgagggcaagggacactggtcacggtctcctcatctggaggcggtggaagcggtggaggaggatctcaggttcagctgcaagagtctggcggaggacttgctcaagctggcggaagcctgagactgtcttgtgccgcctctggcagaaccttcagcatgggctggtttagacaggcccctggcaaagagagagagttcgtcgccgccatcacatacagcggcggcagcccttactacgcctcttctgtcagaggccggttcaccatcagccgggacaacgccaagaacaccgtgtacctccagatgaacagcctgaagccagaggacaccgccgtgtactactgtgccgccaatccaacctacggcagcgactggaatgccgagaattggggccagggcacccaagtgacagtgtctagtacgcgtgataaaactcatacctgtccgccatgcccggcagaagtgaaaaccgactccaccgaccacgtgaagcccaaagagacagagaacaccaagcagcccagcaagagctgccacaagcccaaggccatcgtgcacaccgagaaagtgaacatgatgagcctgaccgtgctgggcctgcggatgctgttcgccaaaaccgtggccgtgaacttcctgctgaccgccaagctgttcttcctc

SEQ ID NO: 5470 - DNA, 1293 bp, Artificial Sequence; identical to SEQ ID NO: 5222
  Synthetic Polynucloetide

SEQ ID NO: 5471 - DNA, 1317 bp, Artificial Sequence; identical to SEQ ID NO: 5223
  Synthetic Polynucloetide

SEQ ID NO: 5472 - DNA, 1926 bp, Artificial Sequence
  Synthetic Polynucloetide
atggccttaccagtgaccgccttgctcctgccgctggccttgctgctccacgccgccaggccggaagtgcaactggtggaatctggagggggaagcgtgcaggcaggcggatctctgagactgtcctgcaccacatctggcagagccctgaatatgtacgtgatgggatggtttcggcaggctcccggcaacgagcgggaatttgtggccgctacaagcagcagcggcggcagcacaagctaccccgattctgtgaagggcagattcacaatctcccgcgataatgccaagaatactgtgtacctgcagatgaatagtctgaagcctgaagatacagccgcctacagatgtgccgccagcccctacgtgtccacccccaccatgaacatcctggaagagtacagatactggggcctgggaacacaagtgacagtgtccagcggtaccggcggaggcggatctggcggcggaggtagcggtggcggaggatctgaattcgacatccagatgacacagagccctagcagcctgtctgccagcgtgggagacagagtgaccatcacatgcaaggccagcgaccacatcaacaactggctggcctggtatcagcagaagcctggacaggcccctaagctgctgatctacggcgctaccacactggaaacaggcgtgcccagcagattttctggcagcggctctggcaccgactacaccctgacaatatccagcctccagcctgaggacttcgccacctactactgtcagcagagctggaacaccccttggacattcggccagggcaccaagctggaaatcaagagaggcggaggcggaagtggaggcggaggatctggcggcggaggctctcaagttcagcttcaacagcctggcgctgagctggtcaaacctggcgcttctgtgaagatgagctgcaaagccagcggctacgccttcagcagctactggatcaactggatgaagcagaaacccggccagggactcgaatggatcggccaaatctatcccggcgacggcgacaccaactacaacggcaagttcaagggcagagccacactgaccgccgatacctctagcagcacagcctacatgcagctgagcagcctgaccagcgaagatagcgccgtgtacttctgtgcccggtccatcacaacagtcgtgggctgcgctatggactattggggccagggaacaagcgtgaccgtgtctagtacgcgtgagcagaaactgatctcggaagaggatctgaaaattgaagttatgtatcctcctccttacctagacaatgagaagagcaatggaaccattatccatgtgaaagggaaacacctttgtccaagtcccctatttcccggaccttctaagcccttttgggtgctggtggtggttgggggagtcctggcttgctatagcttgctagtaacagtggcctttattattttctgggtgaggagtaagaggagcaggctcctgcacagtgactacatgaacatgactccacgccgccccggacccacccgcaagcattaccagccctatgccccaccacgcgacttcgcagcctatcgctccagagtgaagttcagcaggagcgcagacgcccccgcgtaccagcagggccagaaccagctctataacgagctcaatctaggacgaagagaggagtacgatgttttggacaagagacgtggccgggaccctgagatggggggaaagccgagaaggaagaaccctcaggaaggcctgtacaatgaactgcagaaagataagatggcggaggcctacagtgagattgggatgaaaggcgagcgccggaggggcaaggggcacgatggcctttaccagggtctcagtacagccaccaaggacacctacgacgcccttcacatgcaggccctgccccctcgc

SEQ ID NO: 5473 - DNA, 1947 bp, Artificial Sequence
  Synthetic Polynucloetide
atggccttaccagtgaccgccttgctcctgccgctggccttgctgctccacgccgccaggccggaagtgcaactggtggaatctggagggggaagcgtgcaggcaggcggatctctgagactgtcctgcaccacatctggcagagccctgaatatgtacgtgatgggatggtttcggcaggctcccggcaacgagcgggaatttgtggccgctacaagcagcagcggcggcagcacaagctaccccgattctgtgaagggcagattcacaatctcccgcgataatgccaagaatactgtgtacctgcagatgaatagtctgaagcctgaagatacagccgcctacagatgtgccgccagcccctacgtgtccacccccaccatgaacatcctggaagagtacagatactggggcctgggaacacaagtgacagtgtccagcggtaccggcggaggcggatctggcggcggaggtagcggtggcggaggatctgaattcgacatccagatgacacagagccctagcagcctgtctgccagcgtgggagacagagtgaccatcacatgcaaggccagcgaccacatcaacaactggctggcctggtatcagcagaagcctggacaggcccctaagctgctgatctacggcgctaccacactggaaacaggcgtgcccagcagattttctggcagcggctctggcaccgactacaccctgacaatatccagcctccagcctgaggacttcgccacctactactgtcagcagagctggaacaccccttggacattcggccagggcaccaagctggaaatcaagagaggcggaggcggaagtggaggcggaggatctggcggcggaggctctcaagttcagcttcaacagcctggcgctgagctggtcaaacctggcgcttctgtgaagatgagctgcaaagccagcggctacgccttcagcagctactggatcaactggatgaagcagaaacccggccagggactcgaatggatcggccaaatctatcccggcgacggcgacaccaactacaacggcaagttcaagggcagagccacactgaccgccgatacctctagcagcacagcctacatgcagctgagcagcctgaccagcgaagatagcgccgtgtacttctgtgcccggtccatcacaacagtcgtgggctgcgctatggactattggggccagggaacaagcgtgaccgtgtctagtacgcgtgagcagaaactgatctcggaagaggatctggcgaagcccaccacgacgccagcgccgcgaccaccaacaccggcgcccaccatcgcgtcgcagcccctgtccctgcgcccagaggcgtgccggccagcggcggggggcgcagtgcacacgagggggctggacttcgcctgtgacatctacatctgggcgcccttggccgggacttgtggggtccttctcctgtcactggttatcaccctttactgcaaacggggcagaaagaaactcctgtatatattcaaacaaccatttatgagaccagtacaaactactcaagaggaagatggctgtagctgccgatttccagaagaagaagaaggaggatgtgaactgagagtgaagttcagcaggagcgcagacgcccccgcgtaccagcagggccagaaccagctctataacgagctgaatctaggacgaagagaggagtacgatgttttggacaagagacgtggccgggaccctgagatggggggaaagccgagaaggaagaaccctcaggaaggcctgtacaatgaactgcagaaagataagatggcggaggcctacagtgagattgggatgaaaggcgagcgccggaggggcaaggggcacgatggcctttaccagggtctcagtacagccaccaaggacacctacgacgcccttcacatgcaggccctgccccctcgctga

SEQ ID NO: 5474 - DNA, 3186 bp, Artificial Sequence
  Synthetic Polynucloetide
atggccttaccagtgaccgccttgctcctgccgctggccttgctgctccacgccgccaggccggaagtgcaactggtggaatctggagggggaagcgtgcaggcaggcggatctctgagactgtcctgcaccacatctggcagagccctgaatatgtacgtgatgggatggtttcggcaggctcccggcaacgagcgggaatttgtggccgctacaagcagcagcggcggcagcacaagctaccccgattctgtgaagggcagattcacaatctcccgcgataatgccaagaatactgtgtacctgcagatgaatagtctgaagcctgaagatacagccgcctacagatgtgccgccagcccctacgtgtccacccccaccatgaacatcctggaagagtacagatactggggcctgggaacacaagtgacagtgtccagcggtaccggcggaggcggatctggcggcggaggtagcggtggcggaggatctgaattcgacatccagatgacacagagccctagcagcctgtctgccagcgtgggagacagagtgaccatcacatgcaaggccagcgaccacatcaacaactggctggcctggtatcagcagaagcctggacaggcccctaagctgctgatctacggcgctaccacactggaaacaggcgtgcccagcagattttctggcagcggctctggcaccgactacaccctgacaatatccagcctccagcctgaggacttcgccacctactactgtcagcagagctggaacaccccttggacattcggccagggcaccaagctggaaatcaagagaggcggaggcggaagtggaggcggaggatctggcggcggaggctctcaagttcagcttcaacagcctggcgctgagctggtcaaacctggcgcttctgtgaagatgagctgcaaagccagcggctacgccttcagcagctactggatcaactggatgaagcagaaacccggccagggactcgaatggatcggccaaatctatcccggcgacggcgacaccaactacaacggcaagttcaagggcagagccacactgaccgccgatacctctagcagcacagcctacatgcagctgagcagcctgaccagcgaagatagcgccgtgtacttctgtgcccggtccatcacaacagtcgtgggctgcgctatggactattggggccagggaacaagcgtgaccgtgtctagtacgcgtgagcagaaactgatctcggaagaggatctggcgaagcccaccacgacgccagcgccgcgaccaccaacaccggcgcccaccatcgcgtcgcagcccctgtccctgcgcccagaggcgtgccggccagcggcggggggcgcagtgcacacgagggggctggacttcgcctgtgacatctacatctgggcgcccttggccgggacttgtggggtccttctcctgtcactggttatcaccctttactgcgggcgcgccagagtgaagttcagcaggagcgcagacgcccccgcgtaccagcagggccagaaccagctctataacgagctgaatctaggacgaagagaggagtacgatgttttggacaagagacgtggccgggaccctgagatggggggaaagccgagaaggaagaaccctcaggaaggcctgtacaatgaactgcagaaagataagatggcggaggcctacagtgagattgggatgaaaggcgagcgccggaggggcaaggggcacgatggcctttaccagggtctcagtacagccaccaaggacacctacgacgcccttcacatgcaggccctgccccctcgctctagaggatctggagcaacaaacttctcactactcaaacaagcaggtgacgtggaggagaatcccgggcctgggatccacatggccacttacgaggttctctgtgaggtggcgcggaaactgggcacggatgacagggaagtggtattgttcctcctaaacgtgttcatacctcaacccacactggcccaattaattggagctcttagagctttaaaggaggagggcaggttaacgtttcccctgttagcggaatgtctgtttcgtgcaggtcgcagagacctcttgcgcgacctgcttcacttagacccgcgttttttagagcgccacctagcgggcacaatgagttatttcagcccttatcagctcactgttctccacgtagacggggagctgtgtgcgagggatattaggtctttgatatttttaagcaaggacactatagggtctcgcagcacaccacagacattcttacactgggtgtactgtatggaaaacttagacctactgggtcccactgacgtggatgccctaatgtcaatgcttagatctttgtcaagagtagacctacagcgccaagtgcaaaccctaatgggccttcacctttccggcccatcacactcccaacactatcgccatacaccactcgagaccgatttctacgactacaaggacgacgatgacaagactagtggctccggcgagggcagaggaagtctactaacctgcggagatgtggaagaaaatcctggcccacatatgaccgagtacaagcccacggtgcgcctcgccacccgcgacgacgtccccagggccgtacgcaccctcgccgccgcgttcgccgactaccccgccacgcgccacaccgtcgatccggaccgccacatcgagcgggtcaccgagctgcaagaactcttcctcacgcgcgtcgggctcgacatcggcaaggtgtgggtcgcggacgacggcgccgcggtggcggtctggaccacgccggagagcgtcgaagcgggggcggtgttcgccgagatcggcccgcgcatggccgagttgagcggttcccggctggccgcgcagcaacagatggaaggcctcctggcgccgcaccggcccaaggagcccgcgtggttcctggccaccgtcggcgtctcgcccgaccaccagggcaagggtctgggcagcgccgtcgtgctccccggagtggaggcggccgagcgcgccggggtgcccgccttcctggagacctccgcgccccgcaacctccccttctacgagcggctcggcttcaccgtcaccgccgacgtcgaggtgcccgaaggaccgcgcacctggtgcatgacccgcaagcccggtgcctga

SEQ ID NO: 5475 - DNA, 3006 bp, Artificial Sequence
  Synthetic Polynucloetide
atggccttaccagtgaccgccttgctcctgccgctggccttgctgctccacgccgccaggccggaagtgcaactggtggaatctggagggggaagcgtgcaggcaggcggatctctgagactgtcctgcaccacatctggcagagccctgaatatgtacgtgatgggatggtttcggcaggctcccggcaacgagcgggaatttgtggccgctacaagcagcagcggcggcagcacaagctaccccgattctgtgaagggcagattcacaatctcccgcgataatgccaagaatactgtgtacctgcagatgaatagtctgaagcctgaagatacagccgcctacagatgtgccgccagcccctacgtgtccacccccaccatgaacatcctggaagagtacagatactggggcctgggaacacaagtgacagtgtccagcggtaccggcggaggcggatctggcggcggaggtagcggtggcggaggatctgaattcgacatccagatgacacagagccctagcagcctgtctgccagcgtgggagacagagtgaccatcacatgcaaggccagcgaccacatcaacaactggctggcctggtatcagcagaagcctggacaggcccctaagctgctgatctacggcgctaccacactggaaacaggcgtgcccagcagattttctggcagcggctctggcaccgactacaccctgacaatatccagcctccagcctgaggacttcgccacctactactgtcagcagagctggaacaccccttggacattcggccagggcaccaagctggaaatcaagagactcgagatccagaaccctgatcctgccgtgtaccagctgcgggatagcaagagcagcgacaagagcgtgtgtctgttcaccgacttcgacagccagaccaacgtgtcccagagcaaggactccgacgtgtacatcaccgataagtgcgtgctggacatgcggagcatggacttcaagagcaactccgccgtggcctggtccaacaagtccgatttcgcctgcgccaacgccttcaacaacagcattatccccgaggacacattcttcccaagcagcgacgtgccctgcgacgtgaagctggtggaaaagagcttcgagacagacaccaacctgaacttccagaacctgagcgtgatcggcttcagaatcctgctgctgaaagtggccggctttaacctgctgatgaccctgcggctgtggtccagccgcgccaagagaagcggatctggcgtgaagcagaccctgaatttcgacctgctgaagctggctggcgacgtggaatccaacccaggccctactagtatggactggatttggcgcatccttttccttgtcggcgctgctaccggcgcgcattccttcgaacaagttcagcttcaacagcctggcgctgagctggtcaaacctggcgcttctgtgaagatgagctgcaaagccagcggctacgccttcagcagctactggatcaactggatgaagcagaaacccggccagggactcgaatggatcggccaaatctatcccggcgacggcgacaccaactacaacggcaagttcaagggcagagccacactgaccgccgatacctctagcagcacagcctacatgcagctgagcagcctgaccagcgaagatagcgccgtgtacttctgtgcccggtccatcacaacagtcgtgggctgcgctatggactattggggccagggaacaagcgtgaccgtgtctagtacgcgtgaggacctgaagaacgtgttcccacctgaggtggccgtgttcgagcctagcaaggccgagatcgcccacacccagaaagccaccctcgtgtgcctggctaccggcttctaccccgaccatgtggaactgtcttggtgggtcaacggcaaagaggtgcacagcggcgtgtgtaccgacccccagccactgaaagaacagcccgccctgaacgacagccggtactgcctgagcagcagactgagagtgtccgccaccttctggcagaacccccggaaccacttcagatgccaggtgcagttctacggcctgagcgagaacgacgagtggacccaggacagagccaagcccgtgacccagatcgtgtctgccgaagcctggggcagagccgattgcggcatcaccagcgccagctaccaccagggcgtgctgagcgccaccatcctgtacgagatcctgctgggcaaggccaccctgtacgccgtgctggtgtctgccctggtgctgatggctatggtcaagcggaaggacagccggggaagggccaagcgatctggatctggagcaacaaacttctcactactcaaacaagcaggtgacgtggaggagaatcccgggccttctagaggccatatgaccgagtacaagcccacggtgcgcctcgccacccgcgacgacgtccccagggccgtacgcaccctcgccgccgcgttcgccgactaccccgccacgcgccacaccgtcgatccggaccgccacatcgagcgggtcaccgagctgcaagaactcttcctcacgcgcgtcgggctcgacatcggcaaggtgtgggtcgcggacgacggcgccgcggtggcggtctggaccacgccggagagcgtcgaagcgggggcggtgttcgccgagatcggcccgcgcatggccgagttgagcggttcccggctggccgcgcagcaacagatggaaggcctcctggcgccgcaccggcccaaggagcccgcgtggttcctggccaccgtcggcgtctcgcccgaccaccagggcaagggtctgggcagcgccgtcgtgctccccggagtggaggcggccgagcgcgccggggtgcccgccttcctggagacctccgcgccccgcaacctccccttctacgagcggctcggcttcaccgtcaccgccgacgtcgaggtgcccgaaggaccgcgcacctggtgcatgacccgcaagcccggtgcctga

SEQ ID NO: 5476 - DNA, 3003 bp, Artificial Sequence
  Synthetic Polynucloetide
atggccttaccagtgaccgccttgctcctgccgctggccttgctgctccacgccgccaggccggaagtgcaactggtggaatctggagggggaagcgtgcaggcaggcggatctctgagactgtcctgcaccacatctggcagagccctgaatatgtacgtgatgggatggtttcggcaggctcccggcaacgagcgggaatttgtggccgctacaagcagcagcggcggcagcacaagctaccccgattctgtgaagggcagattcacaatctcccgcgataatgccaagaatactgtgtacctgcagatgaatagtctgaagcctgaagatacagccgcctacagatgtgccgccagcccctacgtgtccacccccaccatgaacatcctggaagagtacagatactggggcctgggaacacaagtgacagtgtccagcggtaccggcggaggcggatctggcggcggaggtagcggtggcggaggatctgaattcgacatccagatgacacagagccctagcagcctgtctgccagcgtgggagacagagtgaccatcacatgcaaggccagcgaccacatcaacaactggctggcctggtatcagcagaagcctggacaggcccctaagctgctgatctacggcgctaccacactggaaacaggcgtgcccagcagattttctggcagcggctctggcaccgactacaccctgacaatatccagcctccagcctgaggacttcgccacctactactgtcagcagagctggaacaccccttggacattcggccagggcaccaagctggaaatcaagagactcgaggacctgaagaacgtgttcccacctgaggtggccgtgttcgagcctagcaaggccgagatcgcccacacccagaaagccaccctcgtgtgcctggctaccggcttctaccccgaccatgtggaactgtcttggtgggtcaacggcaaagaggtgcacagcggcgtgtgtaccgacccccagccactgaaagaacagcccgccctgaacgacagccggtactgcctgagcagcagactgagagtgtccgccaccttctggcagaacccccggaaccacttcagatgccaggtgcagttctacggcctgagcgagaacgacgagtggacccaggacagagccaagcccgtgacccagatcgtgtctgccgaagcctggggcagagccgattgcggcatcaccagcgccagctaccaccagggcgtgctgagcgccaccatcctgtacgagatcctgctgggcaaggccaccctgtacgccgtgctggtgtctgccctggtgctgatggctatggtcaagcggaaggacagccggggaagggccaagcgatctggatctggagcaacaaacttctcactactcaaacaagcaggtgacgtggaggagaatcccgggcctactagtatggactggatttggcgcatccttttccttgtcggcgctgctaccggcgcgcattccttcgaacaagttcagcttcaacagcctggcgctgagctggtcaaacctggcgcttctgtgaagatgagctgcaaagccagcggctacgccttcagcagctactggatcaactggatgaagcagaaacccggccagggactcgaatggatcggccaaatctatcccggcgacggcgacaccaactacaacggcaagttcaagggcagagccacactgaccgccgatacctctagcagcacagcctacatgcagctgagcagcctgaccagcgaagatagcgccgtgtacttctgtgcccggtccatcacaacagtcgtgggctgcgctatggactattggggccagggaacaagcgtgaccgtgtctagtacgcgtatccagaaccctgatcctgccgtgtaccagctgcgggatagcaagagcagcgacaagagcgtgtgtctgttcaccgacttcgacagccagaccaacgtgtcccagagcaaggactccgacgtgtacatcaccgataagtgcgtgctggacatgcggagcatggacttcaagagcaactccgccgtggcctggtccaacaagtccgatttcgcctgcgccaacgccttcaacaacagcattatccccgaggacacattcttcccaagcagcgacgtgccctgcgacgtgaagctggtggaaaagagcttcgagacagacaccaacctgaacttccagaacctgagcgtgatcggcttcagaatcctgctgctgaaagtggccggctttaacctgctgatgaccctgcggctgtggtccagccgcgccaagagaagcggatctggcgtgaagcagaccctgaatttcgacctgctgaagctggctggcgacgtggaatccaacccaggcccttctagaggccatatgaccgagtacaagcccacggtgcgcctcgccacccgcgacgacgtccccagggccgtacgcaccctcgccgccgcgttcgccgactaccccgccacgcgccacaccgtcgatccggaccgccacatcgagcgggtcaccgagctgcaagaactcttcctcacgcgcgtcgggctcgacatcggcaaggtgtgggtcgcggacgacggcgccgcggtggcggtctggaccacgccggagagcgtcgaagcgggggcggtgttcgccgagatcggcccgcgcatggccgagttgagcggttcccggctggccgcgcagcaacagatggaaggcctcctggcgccgcaccggcccaaggagcccgcgtggttcctggccaccgtcggcgtctcgcccgaccaccagggcaagggtctgggcagcgccgtcgtgctccccggagtggaggcggccgagcgcgccggggtgcccgccttcctggagacctccgcgccccgcaacctccccttctacgagcggctcggcttcaccgtcaccgccgacgtcgaggtgcccgaaggaccgcgcacctggtgcatgacccgcaagcccggtgcctga

SEQ ID NO: 5477 - DNA, 2301 bp, Artificial Sequence
  Synthetic Polynucloetide
atggccttaccagtgaccgccttgctcctgccgctggccttgctgctccacgccgccaggccggaagtgcaactggtggaatctggagggggaagcgtgcaggcaggcggatctctgagactgtcctgcaccacatctggcagagccctgaatatgtacgtgatgggatggtttcggcaggctcccggcaacgagcgggaatttgtggccgctacaagcagcagcggcggcagcacaagctaccccgattctgtgaagggcagattcacaatctcccgcgataatgccaagaatactgtgtacctgcagatgaatagtctgaagcctgaagatacagccgcctacagatgtgccgccagcccctacgtgtccacccccaccatgaacatcctggaagagtacagatactggggcctgggaacacaagtgacagtgtccagcggtaccggcggaggcggatctggcggcggaggtagcggtggcggaggatctgaattcgacatccagatgacacagagccctagcagcctgtctgccagcgtgggagacagagtgaccatcacatgcaaggccagcgaccacatcaacaactggctggcctggtatcagcagaagcctggacaggcccctaagctgctgatctacggcgctaccacactggaaacaggcgtgcccagcagattttctggcagcggctctggcaccgactacaccctgacaatatccagcctccagcctgaggacttcgccacctactactgtcagcagagctggaacaccccttggacattcggccagggcaccaagctggaaatcaagagactcgaggacctgaagaacgtgttcccacctgaggtggccgtgttcgagcctagcgaggccgagatcagccacacccagaaagccaccctcgtgtgcctggctaccggcttctaccccgaccatgtggaactgtcttggtgggtcaacggcaaagaggtgcacagcggcgtgtgtaccgacccccagccactgaaagaacagcccgccctgaacgacagccggtactgcctgagcagcagactgagagtgtccgccaccttctggcagaacccccggaaccacttcagatgccaggtgcagttctacggcctgagcgagaacgacgagtggacccaggacagagccaagcccgtgacccagatcgtgtctgccgaagcctggggcagagccgattgcggctttaccagcgagagctaccagcagggcgtgctgagcgccaccatcctgtacgagatcctgctgggcaaggccaccctgtacgccgtgctggtgtctgccctggtgctgatggctatggtcaagcggaaggacagccggggaagggccaagcgatctggatctggagcaacaaacttctcactactcaaacaagcaggtgacgtggaggagaatcccgggcctactagtatggactggatttggcgcatccttttccttgtcggcgctgctaccggcgcgcattccttcgaacaagttcagcttcaacagcctggcgctgagctggtcaaacctggcgcttctgtgaagatgagctgcaaagccagcggctacgccttcagcagctactggatcaactggatgaagcagaaacccggccagggactcgaatggatcggccaaatctatcccggcgacggcgacaccaactacaacggcaagttcaagggcagagccacactgaccgccgatacctctagcagcacagcctacatgcagctgagcagcctgaccagcgaagatagcgccgtgtacttctgtgcccggtccatcacaacagtcgtgggctgcgctatggactattggggccagggaacaagcgtgaccgtgtctagtacgcgtatccagaaccctgatcctgccgtgtaccagctgcgggatagcaagagcagcgacaagagcgtgtgtctgttcaccgacttcgacagccagaccaacgtgtcccagagcaaggactccgacgtgtacatcaccgataagtgcgtgctggacatgcggagcatggacttcaagagcaactccgccgtggcctggtccaacaagtccgatttcgcctgcgccaacgccttcaacaacagcattatccccgaggacacattcttcccaagccccgagagcagctgcgacgtgaagctggtggaaaagagcttcgagacagacaccaacctgaacttccagaacctgagcgtgatcggcttcagaatcctgctgctgaaagtggccggctttaacctgctgatgaccctgcggctgtggtccagc

SEQ ID NO: 5478 - DNA, 2976 bp, Artificial Sequence
  Synthetic Polynucloetide
atggccttaccagtgaccgccttgctcctgccgctggccttgctgctccacgccgccaggccggaagtgcaactggtggaatctggagggggaagcgtgcaggcaggcggatctctgagactgtcctgcaccacatctggcagagccctgaatatgtacgtgatgggatggtttcggcaggctcccggcaacgagcgggaatttgtggccgctacaagcagcagcggcggcagcacaagctaccccgattctgtgaagggcagattcacaatctcccgcgataatgccaagaatactgtgtacctgcagatgaatagtctgaagcctgaagatacagccgcctacagatgtgccgccagcccctacgtgtccacccccaccatgaacatcctggaagagtacagatactggggcctgggaacacaagtgacagtgtccagcggtaccggcggaggcggatctggcggcggaggtagcggtggcggaggatctgaattcgacatccagatgacacagagccctagcagcctgtctgccagcgtgggagacagagtgaccatcacatgcaaggccagcgaccacatcaacaactggctggcctggtatcagcagaagcctggacaggcccctaagctgctgatctacggcgctaccacactggaaacaggcgtgcccagcagattttctggcagcggctctggcaccgactacaccctgacaatatccagcctccagcctgaggacttcgccacctactactgtcagcagagctggaacaccccttggacattcggccagggcaccaagctggaaatcaagagactcgaggacctgaagaacgtgttcccacctgaggtggccgtgttcgagcctagcgaggccgagatcagccacacccagaaagccaccctcgtgtgcctggctaccggcttctaccccgaccatgtggaactgtcttggtgggtcaacggcaaagaggtgcacagcggcgtgtgtaccgacccccagccactgaaagaacagcccgccctgaacgacagccggtactgcctgagcagcagactgagagtgtccgccaccttctggcagaacccccggaaccacttcagatgccaggtgcagttctacggcctgagcgagaacgacgagtggacccaggacagagccaagcccgtgacccagatcgtgtctgccgaagcctggggcagagccgattgcggctttaccagcgagagctaccagcagggcgtgctgagcgccaccatcctgtacgagatcctgctgggcaaggccaccctgtacgccgtgctggtgtctgccctggtgctgatggctatggtcaagcggaaggacagccggggaagggccaagcgatctggatctggagcaacaaacttctcactactcaaacaagcaggtgacgtggaggagaatcccgggcctactagtatggactggatttggcgcatccttttccttgtcggcgctgctaccggcgcgcattccttcgaacaagttcagcttcaacagcctggcgctgagctggtcaaacctggcgcttctgtgaagatgagctgcaaagccagcggctacgccttcagcagctactggatcaactggatgaagcagaaacccggccagggactcgaatggatcggccaaatctatcccggcgacggcgacaccaactacaacggcaagttcaagggcagagccacactgaccgccgatacctctagcagcacagcctacatgcagctgagcagcctgaccagcgaagatagcgccgtgtacttctgtgcccggtccatcacaacagtcgtgggctgcgctatggactattggggccagggaacaagcgtgaccgtgtctagtacgcgtatccagaaccctgatcctgccgtgtaccagctgcgggatagcaagagcagcgacaagagcgtgtgtctgttcaccgacttcgacagccagaccaacgtgtcccagagcaaggactccgacgtgtacatcaccgataagtgcgtgctggacatgcggagcatggacttcaagagcaactccgccgtggcctggtccaacaagtccgatttcgcctgcgccaacgccttcaacaacagcattatccccgaggacacattcttcccaagccccgagagcagctgcgacgtgaagctggtggaaaagagcttcgagacagacaccaacctgaacttccagaacctgagcgtgatcggcttcagaatcctgctgctgaaagtggccggctttaacctgctgatgaccctgcggctgtggtccagccgcgccaagagaagcggatctggcgtgaagcagaccctgaatttcgacctgctgaagctggctggcgacgtggaatccaacccaggcccttctagaggcgggatccacaccatggctacctacgaggtgctgtgcgaggtggcaagaaagctgggcaccgacgacagagaagtggtgctgttcctgctgaacgtgttcatccctcagcctacactggcccagctgatcggtgcactgagagccctgaaagaggaaggccggctgacctttcctctgctggccgaatgcctgttcagagccggaagaagggatctgctgcgggacctgctgcatctggaccccagatttctggaaagacacctggccggcaccatgagctacttcagcccttaccagctgaccgtgctgcacgttgacggcgaactgtgcgccagagatattcggagcctgatcttcctgagcaaggacaccatcggcagccggtctacccctcagacatttctgcactgggtgtactgcatggaaaacctggacctgctcggccccacagatgtggatgccctgatgtccatgctgagaagcctgagcagagtggacctccagagacaggtgcagacactgatgggactgcacctgagcggacctagccacagccagcactacagacacacccct

SEQ ID NO: 5479 - DNA, 2313 bp, Artificial Sequence
  Synthetic Polynucloetide
atggccttaccagtgaccgccttgctcctgccgctggccttgctgctccacgccgccaggccggaagtgcaactggtggaatctggagggggaagcgtgcaggcaggcggatctctgagactgtcctgcaccacatctggcagagccctgaatatgtacgtgatgggatggtttcggcaggctcccggcaacgagcgggaatttgtggccgctacaagcagcagcggcggcagcacaagctaccccgattctgtgaagggcagattcacaatctcccgcgataatgccaagaatactgtgtacctgcagatgaatagtctgaagcctgaagatacagccgcctacagatgtgccgccagcccctacgtgtccacccccaccatgaacatcctggaagagtacagatactggggcctgggaacacaagtgacagtgtccagcggtaccggcggaggcggatctggcggcggaggtagcggtggcggaggatctgaattcgacatccagatgacacagagccctagcagcctgtctgccagcgtgggagacagagtgaccatcacatgcaaggccagcgaccacatcaacaactggctggcctggtatcagcagaagcctggacaggcccctaagctgctgatctacggcgctaccacactggaaacaggcgtgcccagcagattttctggcagcggctctggcaccgactacaccctgacaatatccagcctccagcctgaggacttcgccacctactactgtcagcagagctggaacaccccttggacattcggccagggcaccaagctggaaatcaagagactcgagatccagaaccctgatcctgccgtgtaccagctgcgggatagcaagagcagcgacaagagcgtgtgtctgttcaccgacttcgacagccagaccaacgtgtcccagagcaaggactccgacgtgtacatcaccgataagtgcgtgctggacatgcggagcatggacttcaagagcaactccgccgtggcctggtccaacaagtccgatttcgcctgcgccaacgccttcaacaacagcattatccccgaggacacattcttcccaagccccgagagcagctgcgacgtgaagctggtggaaaagagcttcgagacagacaccaacctgaacttccagaacctgagcgtgatcggcttcagaatcctgctgctgaaagtggccggctttaacctgctgatgaccctgcggctgtggtccagccgcgccaagagaagcggatctggcgtgaagcagaccctgaatttcgacctgctgaagctggctggcgacgtggaatccaacccaggccctactagtatggactggatttggcgcatccttttccttgtcggcgctgctaccggcgcgcattccttcgaacaagttcagcttcaacagcctggcgctgagctggtcaaacctggcgcttctgtgaagatgagctgcaaagccagcggctacgccttcagcagctactggatcaactggatgaagcagaaacccggccagggactcgaatggatcggccaaatctatcccggcgacggcgacaccaactacaacggcaagttcaagggcagagccacactgaccgccgatacctctagcagcacagcctacatgcagctgagcagcctgaccagcgaagatagcgccgtgtacttctgtgcccggtccatcacaacagtcgtgggctgcgctatggactattggggccagggaacaagcgtgaccgtgtctagtacgcgtgaggacctgaagaacgtgttcccacctgaggtggccgtgttcgagcctagcgaggccgagatcagccacacccagaaagccaccctcgtgtgcctggctaccggcttctaccccgaccatgtggaactgtcttggtgggtcaacggcaaagaggtgcacagcggcgtgtgtaccgacccccagccactgaaagaacagcccgccctgaacgacagccggtactgcctgagcagcagactgagagtgtccgccaccttctggcagaacccccggaaccacttcagatgccaggtgcagttctacggcctgagcgagaacgacgagtggacccaggacagagccaagcccgtgacccagatcgtgtctgccgaagcctggggcagagccgattgcggctttaccagcgagagctaccagcagggcgtgctgagcgccaccatcctgtacgagatcctgctgggcaaggccaccctgtacgccgtgctggtgtctgccctggtgctgatggctatggtcaagcggaaggacagccgggga

SEQ ID NO: 5480 - DNA, 2979 bp, Artificial Sequence
  Synthetic Polynucloetide
atggccttaccagtgaccgccttgctcctgccgctggccttgctgctccacgccgccaggccggaagtgcaactggtggaatctggagggggaagcgtgcaggcaggcggatctctgagactgtcctgcaccacatctggcagagccctgaatatgtacgtgatgggatggtttcggcaggctcccggcaacgagcgggaatttgtggccgctacaagcagcagcggcggcagcacaagctaccccgattctgtgaagggcagattcacaatctcccgcgataatgccaagaatactgtgtacctgcagatgaatagtctgaagcctgaagatacagccgcctacagatgtgccgccagcccctacgtgtccacccccaccatgaacatcctggaagagtacagatactggggcctgggaacacaagtgacagtgtccagcggtaccggcggaggcggatctggcggcggaggtagcggtggcggaggatctgaattcgacatccagatgacacagagccctagcagcctgtctgccagcgtgggagacagagtgaccatcacatgcaaggccagcgaccacatcaacaactggctggcctggtatcagcagaagcctggacaggcccctaagctgctgatctacggcgctaccacactggaaacaggcgtgcccagcagattttctggcagcggctctggcaccgactacaccctgacaatatccagcctccagcctgaggacttcgccacctactactgtcagcagagctggaacaccccttggacattcggccagggcaccaagctggaaatcaagagactcgagatccagaaccctgatcctgccgtgtaccagctgcgggatagcaagagcagcgacaagagcgtgtgtctgttcaccgacttcgacagccagaccaacgtgtcccagagcaaggactccgacgtgtacatcaccgataagtgcgtgctggacatgcggagcatggacttcaagagcaactccgccgtggcctggtccaacaagtccgatttcgcctgcgccaacgccttcaacaacagcattatccccgaggacacattcttcccaagccccgagagcagctgcgacgtgaagctggtggaaaagagcttcgagacagacaccaacctgaacttccagaacctgagcgtgatcggcttcagaatcctgctgctgaaagtggccggctttaacctgctgatgaccctgcggctgtggtccagccgcgccaagagaagcggatctggcgtgaagcagaccctgaatttcgacctgctgaagctggctggcgacgtggaatccaacccaggccctactagtatggactggatttggcgcatccttttccttgtcggcgctgctaccggcgcgcattccttcgaacaagttcagcttcaacagcctggcgctgagctggtcaaacctggcgcttctgtgaagatgagctgcaaagccagcggctacgccttcagcagctactggatcaactggatgaagcagaaacccggccagggactcgaatggatcggccaaatctatcccggcgacggcgacaccaactacaacggcaagttcaagggcagagccacactgaccgccgatacctctagcagcacagcctacatgcagctgagcagcctgaccagcgaagatagcgccgtgtacttctgtgcccggtccatcacaacagtcgtgggctgcgctatggactattggggccagggaacaagcgtgaccgtgtctagtacgcgtgaggacctgaagaacgtgttcccacctgaggtggccgtgttcgagcctagcgaggccgagatcagccacacccagaaagccaccctcgtgtgcctggctaccggcttctaccccgaccatgtggaactgtcttggtgggtcaacggcaaagaggtgcacagcggcgtgtgtaccgacccccagccactgaaagaacagcccgccctgaacgacagccggtactgcctgagcagcagactgagagtgtccgccaccttctggcagaacccccggaaccacttcagatgccaggtgcagttctacggcctgagcgagaacgacgagtggacccaggacagagccaagcccgtgacccagatcgtgtctgccgaagcctggggcagagccgattgcggctttaccagcgagagctaccagcagggcgtgctgagcgccaccatcctgtacgagatcctgctgggcaaggccaccctgtacgccgtgctggtgtctgccctggtgctgatggctatggtcaagcggaaggacagccggggaagggccaagcgatctggatctggagcaacaaacttctcactactcaaacaagcaggtgacgtggaggagaatcccgggccttctagaggcgggatccacaccatggctacctacgaggtgctgtgcgaggtggcaagaaagctgggcaccgacgacagagaagtggtgctgttcctgctgaacgtgttcatccctcagcctacactggcccagctgatcggtgcactgagagccctgaaagaggaaggccggctgacctttcctctgctggccgaatgcctgttcagagccggaagaagggatctgctgcgggacctgctgcatctggaccccagatttctggaaagacacctggccggcaccatgagctacttcagcccttaccagctgaccgtgctgcacgttgacggcgaactgtgcgccagagatattcggagcctgatcttcctgagcaaggacaccatcggcagccggtctacccctcagacatttctgcactgggtgtactgcatggaaaacctggacctgctcggccccacagatgtggatgccctgatgtccatgctgagaagcctgagcagagtggacctccagagacaggtgcagacactgatgggactgcacctgagcggacctagccacagccagcactacagacacacccct

SEQ ID NO: 5481 - DNA, 3138 bp, Artificial Sequence
  Synthetic Polynucloetide
atggccttaccagtgaccgccttgctcctgccgctggccttgctgctccacgccgccaggccgctcgaggggaaaccaattcccaaccctcttctgggactggattcaaccggcagcggcgaggacctgaagaacgtgttcccacctgaggtggccgtgttcgagcctagcaaggccgagatcgcccacacccagaaagccaccctcgtgtgcctggctaccggcttctaccccgaccatgtggaactgtcttggtgggtcaacggcaaagaggtgcacagcggcgtgtgtaccgacccccagccactgaaagaacagcccgccctgaacgacagccggtactgcctgagcagcagactgagagtgtccgccaccttctggcagaacccccggaaccacttcagatgccaggtgcagttctacggcctgagcgagaacgacgagtggacccaggacagagccaagcccgtgacccagatcgtgtctgccgaagcctggggcagagccgattgcggcatcaccagcgccagctaccaccagggcgtgctgagcgccaccatcctgtacgagatcctgctgggcaaggccaccctgtacgccgtgctggtgtctgccctggtgctgatggctatggtcaagcggaaggacagccggggaagggccaagcgatctggatctggagcaacaaacttctcactactcaaacaagcaggtgacgtggaggagaatcccgggcctactagcatggccttaccagtgaccgccttgctcctgccgctggccttgctgctccacgccgccaggccggaagtgcaactggtggaatctggagggggaagcgtgcaggcaggcggatctctgagactgtcctgcaccacatctggcagagccctgaatatgtacgtgatgggatggtttcggcaggctcccggcaacgagcgggaatttgtggccgctacaagcagcagcggcggcagcacaagctaccccgattctgtgaagggcagattcacaatctcccgcgataatgccaagaatactgtgtacctgcagatgaatagtctgaagcctgaagatacagccgcctacagatgtgccgccagcccctacgtgtccacccccaccatgaacatcctggaagagtacagatactggggcctgggaacacaagtgacagtgtccagcggtaccggcggaggcggatctggcggcggaggtagcggtggcggaggatctgaattcgacatccagatgacacagagccctagcagcctgtctgccagcgtgggagacagagtgaccatcacatgcaaggccagcgaccacatcaacaactggctggcctggtatcagcagaagcctggacaggcccctaagctgctgatctacggcgctaccacactggaaacaggcgtgcccagcagattttctggcagcggctctggcaccgactacaccctgacaatatccagcctccagcctgaggacttcgccacctactactgtcagcagagctggaacaccccttggacattcggccagggcaccaagctggaaatcaagagaggcggaggcggaagtggaggcggaggatctggcggcggaggctctcaagttcagcttcaacagcctggcgctgagctggtcaaacctggcgcttctgtgaagatgagctgcaaagccagcggctacgccttcagcagctactggatcaactggatgaagcagaaacccggccagggactcgaatggatcggccaaatctatcccggcgacggcgacaccaactacaacggcaagttcaagggcagagccacactgaccgccgatacctctagcagcacagcctacatgcagctgagcagcctgaccagcgaagatagcgccgtgtacttctgtgcccggtccatcacaacagtcgtgggctgcgctatggactattggggccagggaacaagcgtgaccgtgtctagtacgcgtgagcagaaactgatctcggaagaggatgggagcggcatccagaaccctgatcctgccgtgtaccagctgcgggatagcaagagcagcgacaagagcgtgtgtctgttcaccgacttcgacagccagaccaacgtgtcccagagcaaggactccgacgtgtacatcaccgataagtgcgtgctggacatgcggagcatggacttcaagagcaactccgccgtggcctggtccaacaagtccgatttcgcctgcgccaacgccttcaacaacagcattatccccgaggacacattcttcccaagcagcgacgtgccctgcgacgtgaagctggtggaaaagagcttcgagacagacaccaacctgaacttccagaacctgagcgtgatcggcttcagaatcctgctgctgaaagtggccggctttaacctgctgatgaccctgcggctgtggtccagccgcgccaagagaagcggatctggcgtgaagcagaccctgaatttcgacctgctgaagctggctggcgacgtggaatccaacccaggcccttctagaggccatatgaccgagtacaagcccacggtgcgcctcgccacccgcgacgacgtccccagggccgtacgcaccctcgccgccgcgttcgccgactaccccgccacgcgccacaccgtcgatccggaccgccacatcgagcgggtcaccgagctgcaagaactcttcctcacgcgcgtcgggctcgacatcggcaaggtgtgggtcgcggacgacggcgccgcggtggcggtctggaccacgccggagagcgtcgaagcgggggcggtgttcgccgagatcggcccgcgcatggccgagttgagcggttcccggctggccgcgcagcaacagatggaaggcctcctggcgccgcaccggcccaaggagcccgcgtggttcctggccaccgtcggcgtctcgcccgaccaccagggcaagggtctgggcagcgccgtcgtgctccccggagtggaggcggccgagcgcgccggggtgcccgccttcctggagacctccgcgccccgcaacctccccttctacgagcggctcggcttcaccgtcaccgccgacgtcgaggtgcccgaaggaccgcgcacctggtgcatgacccgcaagcccggtgcctga

SEQ ID NO: 5482 - DNA, 3141 bp, Artificial Sequence
  Synthetic Polynucloetide
atggccttaccagtgaccgccttgctcctgccgctggccttgctgctccacgccgccaggccgctcgagcagaaactgatctcggaagaggatctgggctccggcgatcgccctgatcctgccgtgtaccagctgcgggatagcaagagcagcgacaagagcgtgtgtctgttcaccgacttcgacagccagaccaacgtgtcccagagcaaggactccgacgtgtacatcaccgataagtgcgtgctggacatgcggagcatggacttcaagagcaactccgccgtggcctggtccaacaagtccgatttcgcctgcgccaacgccttcaacaacagcattatccccgaggacacattcttcccaagccccgagagcagctgcgacgtgaagctggtggaaaagagcttcgagacagacaccaacctgaacttccagaacctgagcgtgatcggcttcagaatcctgctgctgaaagtggccggctttaacctgctgatgaccctgcggctgtggtccagctctagtcgcgccaagagaagcggatctggcgtgaagcagaccctgaatttcgacctgctgaagctggctggcgacgtggaatccaacccaggccccactagcatggccttaccagtgaccgccttgctcctgccgctggccttgctgctccacgccgccaggccggaagtgcaactggtggaatctggagggggaagcgtgcaggcaggcggatctctgagactgtcctgcaccacatctggcagagccctgaatatgtacgtgatgggatggtttcggcaggctcccggcaacgagcgggaatttgtggccgctacaagcagcagcggcggcagcacaagctaccccgattctgtgaagggcagattcacaatctcccgcgataatgccaagaatactgtgtacctgcagatgaatagtctgaagcctgaagatacagccgcctacagatgtgccgccagcccctacgtgtccacccccaccatgaacatcctggaagagtacagatactggggcctgggaacacaagtgacagtgtccagcggtaccggcggaggcggatctggcggcggaggtagcggtggcggaggatctgaattcgacatccagatgacacagagccctagcagcctgtctgccagcgtgggagacagagtgaccatcacatgcaaggccagcgaccacatcaacaactggctggcctggtatcagcagaagcctggacaggcccctaagctgctgatctacggcgctaccacactggaaacaggcgtgcccagcagattttctggcagcggctctggcaccgactacaccctgacaatatccagcctccagcctgaggacttcgccacctactactgtcagcagagctggaacaccccttggacattcggccagggcaccaagctggaaatcaagagaggcggaggcggaagtggaggcggaggatctggcggcggaggctctcaagttcagcttcaacagcctggcgctgagctggtcaaacctggcgcttctgtgaagatgagctgcaaagccagcggctacgccttcagcagctactggatcaactggatgaagcagaaacccggccagggactcgaatggatcggccaaatctatcccggcgacggcgacaccaactacaacggcaagttcaagggcagagccacactgaccgccgatacctctagcagcacagcctacatgcagctgagcagcctgaccagcgaagatagcgccgtgtacttctgtgcccggtccatcacaacagtcgtgggctgcgctatggactattggggccagggaacaagcgtgaccgtgtctagtacgcgtgggaaaccaattcccaaccctcttctgggactggattcaaccggcagcggcgaggacctgaagaacgtgttcccacctgaggtggccgtgttcgagcctagcgaggccgagatcagccacacccagaaagccaccctcgtgtgcctggctaccggcttctaccccgaccatgtggaactgtcttggtgggtcaacggcaaagaggtgcacagcggcgtgtgtaccgacccccagccactgaaagaacagcccgccctgaacgacagccggtactgcctgagcagcagactgagagtgtccgccaccttctggcagaacccccggaaccacttcagatgccaggtgcagttctacggcctgagcgagaacgacgagtggacccaggacagagccaagcccgtgacccagatcgtgtctgccgaagcctggggcagagccgattgcggctttaccagcgagagctaccagcagggcgtgctgagcgccaccatcctgtacgagatcctgctgggcaaggccaccctgtacgccgtgctggtgtctgccctggtgctgatggctatggtcaagcggaaggacagccggggaagggccaagcgatctggatctggagcaacaaacttctcactactcaaacaagcaggtgacgtggaggagaatcccgggccttctagaggccatatgaccgagtacaagcccacggtgcgcctcgccacccgcgacgacgtccccagggccgtacgcaccctcgccgccgcgttcgccgactaccccgccacgcgccacaccgtcgatccggaccgccacatcgagcgggtcaccgagctgcaagaactcttcctcacgcgcgtcgggctcgacatcggcaaggtgtgggtcgcggacgacggcgccgcggtggcggtctggaccacgccggagagcgtcgaagcgggggcggtgttcgccgagatcggcccgcgcatggccgagttgagcggttcccggctggccgcgcagcaacagatggaaggcctcctggcgccgcaccggcccaaggagcccgcgtggttcctggccaccgtcggcgtctcgcccgaccaccagggcaagggtctgggcagcgccgtcgtgctccccggagtggaggcggccgagcgcgccggggtgcccgccttcctggagacctccgcgccccgcaacctccccttctacgagcggctcggcttcaccgtcaccgccgacgtcgaggtgcccgaaggaccgcgcacctggtgcatgacccgcaagcccggtgcctga

SEQ ID NO: 5483 - DNA, 3003 bp, Artificial Sequence
  Synthetic Polynucloetide
atggccttaccagtgaccgccttgctcctgccgctggccttgctgctccacgccgccaggccggaagtgcaactggtggaatctggagggggaagcgtgcaggcaggcggatctctgagactgtcctgcaccacatctggcagagccctgaatatgtacgtgatgggatggtttcggcaggctcccggcaacgagcgggaatttgtggccgctacaagcagcagcggcggcagcacaagctaccccgattctgtgaagggcagattcacaatctcccgcgataatgccaagaatactgtgtacctgcagatgaatagtctgaagcctgaagatacagccgcctacagatgtgccgccagcccctacgtgtccacccccaccatgaacatcctggaagagtacagatactggggcctgggaacacaagtgacagtgtccagcggtaccggcggaggcggatctggcggcggaggtagcggtggcggaggatctgaattcgacatccagatgacacagagccctagcagcctgtctgccagcgtgggagacagagtgaccatcacatgcaaggccagcgaccacatcaacaactggctggcctggtatcagcagaagcctggacaggcccctaagctgctgatctacggcgctaccacactggaaacaggcgtgcccagcagattttctggcagcggctctggcaccgactacaccctgacaatatccagcctccagcctgaggacttcgccacctactactgtcagcagagctggaacaccccttggacattcggccagggcaccaagctggaaatcaagagactcgaggacctgaagaacgtgttcccacctgaggtggccgtgttcgagcctagcgaggccgagatcagccacacccagaaagccaccctcgtgtgcctggctaccggcttctaccccgaccatgtggaactgtcttggtgggtcaacggcaaagaggtgcacagcggcgtgtctaccgacccccagccactgaaagaacagcccgccctgaacgacagccggtactgcctgagcagcagactgagagtgtccgccaccttctggcagaacccccggaaccacttcagatgccaggtgcagttctacggcctgagcgagaacgacgagtggacccaggacagagccaagcccgtgacccagatcgtgtctgccgaagcctggggcagagccgattgcggctttaccagcgagagctaccagcagggcgtgctgagcgccaccatcctgtacgagatcctgctgggcaaggccaccctgtacgccgtgctggtgtctgccctggtgctgatggctatggtcaagcggaaggacagccggggaagggccaagcgatctggatctggagcaacaaacttctcactactcaaacaagcaggtgacgtggaggagaatcccgggcctactagtatggactggatttggcgcatccttttccttgtcggcgctgctaccggcgcgcattccttcgaacaagttcagcttcaacagcctggcgctgagctggtcaaacctggcgcttctgtgaagatgagctgcaaagccagcggctacgccttcagcagctactggatcaactggatgaagcagaaacccggccagggactcgaatggatcggccaaatctatcccggcgacggcgacaccaactacaacggcaagttcaagggcagagccacactgaccgccgatacctctagcagcacagcctacatgcagctgagcagcctgaccagcgaagatagcgccgtgtacttctgtgcccggtccatcacaacagtcgtgggctgcgctatggactattggggccagggaacaagcgtgaccgtgtctagtacgcgtatccagaaccctgatcctgccgtgtaccagctgcgggatagcaagagcagcgacaagagcgtgtgtctgttcaccgacttcgacagccagaccaacgtgtcccagagcaaggactccgacgtgtacatcaccgataagaccgtgctggacatgcggagcatggacttcaagagcaactccgccgtggcctggtccaacaagtccgatttcgcctgcgccaacgccttcaacaacagcattatccccgaggacacattcttcccaagccccgagagcagctgcgacgtgaagctggtggaaaagagcttcgagacagacaccaacctgaacttccagaacctgagcgtgatcggcttcagaatcctgctgctgaaagtggccggctttaacctgctgatgaccctgcggctgtggtccagccgcgccaagagaagcggatctggcgtgaagcagaccctgaatttcgacctgctgaagctggctggcgacgtggaatccaacccaggcccttctagaggccatatgaccgagtacaagcccacggtgcgcctcgccacccgcgacgacgtccccagggccgtacgcaccctcgccgccgcgttcgccgactaccccgccacgcgccacaccgtcgatccggaccgccacatcgagcgggtcaccgagctgcaagaactcttcctcacgcgcgtcgggctcgacatcggcaaggtgtgggtcgcggacgacggcgccgcggtggcggtctggaccacgccggagagcgtcgaagcgggggcggtgttcgccgagatcggcccgcgcatggccgagttgagcggttcccggctggccgcgcagcaacagatggaaggcctcctggcgccgcaccggcccaaggagcccgcgtggttcctggccaccgtcggcgtctcgcccgaccaccagggcaagggtctgggcagcgccgtcgtgctccccggagtggaggcggccgagcgcgccggggtgcccgccttcctggagacctccgcgccccgcaacctccccttctacgagcggctcggcttcaccgtcaccgccgacgtcgaggtgcccgaaggaccgcgcacctggtgcatgacccgcaagcccggtgcctga

SEQ ID NO: 5484 - DNA, 3249 bp, Artificial Sequence
  Synthetic Polynucloetide
atggccttaccagtgaccgccttgctcctgccgctggccttgctgctccacgccgccaggccggaagtgcaactggtggaatctggagggggaagcgtgcaggcaggcggatctctgagactgtcctgcaccacatctggcagagccctgaatatgtacgtgatgggatggtttcggcaggctcccggcaacgagcgggaatttgtggccgctacaagcagcagcggcggcagcacaagctaccccgattctgtgaagggcagattcacaatctcccgcgataatgccaagaatactgtgtacctgcagatgaatagtctgaagcctgaagatacagccgcctacagatgtgccgccagcccctacgtgtccacccccaccatgaacatcctggaagagtacagatactggggcctgggaacacaagtgacagtgtccagcggtaccggcggaggcggatctggcggcggaggtagcggtggcggaggatctgaattcgacatccagatgacacagagccctagcagcctgtctgccagcgtgggagacagagtgaccatcacatgcaaggccagcgaccacatcaacaactggctggcctggtatcagcagaagcctggacaggcccctaagctgctgatctacggcgctaccacactggaaacaggcgtgcccagcagattttctggcagcggctctggcaccgactacaccctgacaatatccagcctccagcctgaggacttcgccacctactactgtcagcagagctggaacaccccttggacattcggccagggcaccaagctggaaatcaagagactcgaggacctgaagaacgtgttcccacctgaggtggccgtgttcgagcctagcgaggccgagatcagccacacccagaaagccaccctcgtgtgcctggctaccggcttctaccccgaccatgtggaactgtcttggtgggtcaacggcaaagaggtgcacagcggcgtgtctaccgacccccagccactgaaagaacagcccgccctgaacgacagccggtactgcctgagcagcagactgagagtgtccgccaccttctggcagaacccccggaaccacttcagatgccaggtgcagttctacggcctgagcgagaacgacgagtggacccaggacagagccaagcccgtgacccagatcgtgtctgccgaagcctggggcagagccgattgcggctttaccagcgagagctaccagcagggcgtgctgagcgccaccatcctgtacgagatcctgctgggcaaggccaccctgtacgccgtgctggtgtctgccctggtgctgatggctatggtcaagcggaaggacagccggggaagggccaagcgatctggatctggagcaacaaacttctcactactcaaacaagcaggtgacgtggaggagaatcccgggcctactagtatggactggatttggcgcatccttttccttgtcggcgctgctaccggcgcgcattccttcgaacaagttcagcttcaacagcctggcgctgagctggtcaaacctggcgcttctgtgaagatgagctgcaaagccagcggctacgccttcagcagctactggatcaactggatgaagcagaaacccggccagggactcgaatggatcggccaaatctatcccggcgacggcgacaccaactacaacggcaagttcaagggcagagccacactgaccgccgatacctctagcagcacagcctacatgcagctgagcagcctgaccagcgaagatagcgccgtgtacttctgtgcccggtccatcacaacagtcgtgggctgcgctatggactattggggccagggaacaagcgtgaccgtgtctagtacgcgtgagcagaaactgatctcggaagaggatgggagcggcaccccattcccttctctggcccctcccatcatgctgctggtggacggcaagcagcagatggtggtcgtgtgcctggtgctggatgtggccccacctggactggacagccccatctggtttagcgccggcaatggctctgccctggacgcctttacctacggcccaagccctgccaccgatggcacctggacaaatctggcccacctgagcctgcccagcgaggaactggcttcttgggagcctctcgtgtgccacacaggacctggcgctgagggacacagcagatccacccagcctatgcacctgtctggcgaggccagcaccgccagaacctgtcctcaggaacctctgagaggcacccctggcggagcactgtggctgggagtgctgagactgctgctgttcaagctgctgctgtttgacctgctgctgacctgctcctgtctgtgcgatcctgccggccctctgccttctcctgccaccaccacaagactgagagccctgggcagccacagactgcaccctgccacagagacaggcggcagagaggccacaagcagccctagaccccagcccagagacagaagatggggcgataccccccctggcagaaagcctggatctccagtccgcgccaagagaagcggatctggcgtgaagcagaccctgaatttcgacctgctgaagctggctggcgacgtggaatccaacccaggcccttctagaggccatatgaccgagtacaagcccacggtgcgcctcgccacccgcgacgacgtccccagggccgtacgcaccctcgccgccgcgttcgccgactaccccgccacgcgccacaccgtcgatccggaccgccacatcgagcgggtcaccgagctgcaagaactcttcctcacgcgcgtcgggctcgacatcggcaaggtgtgggtcgcggacgacggcgccgcggtggcggtctggaccacgccggagagcgtcgaagcgggggcggtgttcgccgagatcggcccgcgcatggccgagttgagcggttcccggctggccgcgcagcaacagatggaaggcctcctggcgccgcaccggcccaaggagcccgcgtggttcctggccaccgtcggcgtctcgcccgaccaccagggcaagggtctgggcagcgccgtcgtgctccccggagtggaggcggccgagcgcgccggggtgcccgccttcctggagacctccgcgccccgcaacctccccttctacgagcggctcggcttcaccgtcaccgccgacgtcgaggtgcccgaaggaccgcgcacctggtgcatgacccgcaagcccggtgcctga

SEQ ID NO: 5485 - DNA, 3303 bp, Artificial Sequence
  Synthetic Polynucloetide
atggccttaccagtgaccgccttgctcctgccgctggccttgctgctccacgccgccaggccgctcgaggacctgaagaacgtgttcccacctgaggtggccgtgttcgagcctagcgaggccgagatcagccacacccagaaagccaccctcgtgtgcctggctaccggcttctaccccgaccatgtggaactgtcttggtgggtcaacggcaaagaggtgcacagcggcgtgtctaccgacccccagccactgaaagaacagcccgccctgaacgacagccggtactgcctgagcagcagactgagagtgtccgccaccttctggcagaacccccggaaccacttcagatgccaggtgcagttctacggcctgagcgagaacgacgagtggacccaggacagagccaagcccgtgacccagatcgtgtctgccgaagcctggggcagagccgattgcggctttaccagcgagagctaccagcagggcgtgctgagcgccaccatcctgtacgagatcctgctgggcaaggccaccctgtacgccgtgctggtgtctgccctggtgctgatggctatggtcaagcggaaggacagccggggaagggccaagcgatctggatctggagcaacaaacttctcactactcaaacaagcaggtgacgtggaggagaatcccgggcctactagcatggccttaccagtgaccgccttgctcctgccgctggccttgctgctccacgccgccaggccggaagtgcaactggtggaatctggagggggaagcgtgcaggcaggcggatctctgagactgtcctgcaccacatctggcagagccctgaatatgtacgtgatgggatggtttcggcaggctcccggcaacgagcgggaatttgtggccgctacaagcagcagcggcggcagcacaagctaccccgattctgtgaagggcagattcacaatctcccgcgataatgccaagaatactgtgtacctgcagatgaatagtctgaagcctgaagatacagccgcctacagatgtgccgccagcccctacgtgtccacccccaccatgaacatcctggaagagtacagatactggggcctgggaacacaagtgacagtgtccagcggtaccggcggaggcggatctggcggcggaggtagcggtggcggaggatctgaattcgacatccagatgacacagagccctagcagcctgtctgccagcgtgggagacagagtgaccatcacatgcaaggccagcgaccacatcaacaactggctggcctggtatcagcagaagcctggacaggcccctaagctgctgatctacggcgctaccacactggaaacaggcgtgcccagcagattttctggcagcggctctggcaccgactacaccctgacaatatccagcctccagcctgaggacttcgccacctactactgtcagcagagctggaacaccccttggacattcggccagggcaccaagctggaaatcaagagaggcggaggcggaagtggaggcggaggatctggcggcggaggctctcaagttcagcttcaacagcctggcgctgagctggtcaaacctggcgcttctgtgaagatgagctgcaaagccagcggctacgccttcagcagctactggatcaactggatgaagcagaaacccggccagggactcgaatggatcggccaaatctatcccggcgacggcgacaccaactacaacggcaagttcaagggcagagccacactgaccgccgatacctctagcagcacagcctacatgcagctgagcagcctgaccagcgaagatagcgccgtgtacttctgtgcccggtccatcacaacagtcgtgggctgcgctatggactattggggccagggaacaagcgtgaccgtgtctagtacgcgtgagcagaaactgatctcggaagaggatctggggagcggcaccccattcccttctctggcccctcccatcatgctgctggtggacggcaagcagcagatggtggtcgtgtgcctggtgctggatgtggccccacctggactggacagccccatctggtttagcgccggcaatggctctgccctggacgcctttacctacggcccaagccctgccaccgatggcacctggacaaatctggcccacctgagcctgcccagcgaggaactggcttcttgggagcctctcgtgtgccacacaggacctggcgctgagggacacagcagatccacccagcctatgcacctgtctggcgaggccagcaccgccagaacctgtcctcaggaacctctgagaggcacccctggcggagcactgtggctgggagtgctgagactgctgctgttcaagctgctgctgtttgacctgctgctgacctgctcctgtctgtgcgatcctgccggccctctgccttctcctgccaccaccacaagactgagagccctgggcagccacagactgcaccctgccacagagacaggcggcagagaggccacaagcagccctagaccccagcccagagacagaagatggggcgataccccccctggcagaaagcctggatctccagtccgcgccaagagaagcggatctggcgtgaagcagaccctgaatttcgacctgctgaagctggctggcgacgtggaatccaacccaggcccttctagatctagaggccatatgaccgagtacaagcccacggtgcgcctcgccacccgcgacgacgtccccagggccgtacgcaccctcgccgccgcgttcgccgactaccccgccacgcgccacaccgtcgatccggaccgccacatcgagcgggtcaccgagctgcaagaactcttcctcacgcgcgtcgggctcgacatcggcaaggtgtgggtcgcggacgacggcgccgcggtggcggtctggaccacgccggagagcgtcgaagcgggggcggtgttcgccgagatcggcccgcgcatggccgagttgagcggttcccggctggccgcgcagcaacagatggaaggcctcctggcgccgcaccggcccaaggagcccgcgtggttcctggccaccgtcggcgtctcgcccgaccaccagggcaagggtctgggcagcgccgtcgtgctccccggagtggaggcggccgagcgcgccggggtgcccgccttcctggagacctccgcgccccgcaacctccccttctacgagcggctcggcttcaccgtcaccgccgacgtcgaggtgcccgaaggaccgcgcacctggtgcatgacccgcaagcccggtgcctga

SEQ ID NO: 5486 - DNA, 3114 bp, Artificial Sequence
  Synthetic Polynucloetide
atggccttaccagtgaccgccttgctcctgccgctggccttgctgctccacgccgccaggccggaagtgcaactggtggaatctggagggggaagcgtgcaggcaggcggatctctgagactgtcctgcaccacatctggcagagccctgaatatgtacgtgatgggatggtttcggcaggctcccggcaacgagcgggaatttgtggccgctacaagcagcagcggcggcagcacaagctaccccgattctgtgaagggcagattcacaatctcccgcgataatgccaagaatactgtgtacctgcagatgaatagtctgaagcctgaagatacagccgcctacagatgtgccgccagcccctacgtgtccacccccaccatgaacatcctggaagagtacagatactggggcctgggaacacaagtgacagtgtccagcggtaccggcggaggcggatctggcggcggaggtagcggtggcggaggatctgaattcgacatccagatgacacagagccctagcagcctgtctgccagcgtgggagacagagtgaccatcacatgcaaggccagcgaccacatcaacaactggctggcctggtatcagcagaagcctggacaggcccctaagctgctgatctacggcgctaccacactggaaacaggcgtgcccagcagattttctggcagcggctctggcaccgactacaccctgacaatatccagcctccagcctgaggacttcgccacctactactgtcagcagagctggaacaccccttggacattcggccagggcaccaagctggaaatcaagagactcgaggggaaaccaattcccaaccctcttctgggactggattcaaccggcagcggcgacaagcagctggacgccgacgtgtcccccaagcctaccatcttcctgccctctatcgccgagacaaagctccagaaggccggcacctacctgtgcctgctggaaaagttcttcccagatgtgattaagatccactggcaggaaaagaagtccaacaccatcctgggcagccaggaaggcaacaccatgaagaccaacgacacctacatgaagttcagctggctgaccgtgcccgagaagtccctggacaaagaacacagatgcatcgtgcggcacgaaaacaacaagaacggcgtggaccaggaaatcatcttcccacccatcaagaccgatgtgattacaatggaccccaaggacaactgctccaaggacgccaacgataccctgctgctccagctgaccaacaccagcgcctactacatgtacttgttgctgctgctgaagtccgtggtgtacttcgccatcatcacatgctgcctgctgcggagaaccgccttctgctgcaacggcgagaagtctagggccaagcgatctggatctggagcaacaaacttctcactactcaaacaagcaggtgacgtggaggagaatcccgggcctactagtatggactggatttggcgcatccttttccttgtcggcgctgctaccggcgcgcattccttcgaacaagttcagcttcaacagcctggcgctgagctggtcaaacctggcgcttctgtgaagatgagctgcaaagccagcggctacgccttcagcagctactggatcaactggatgaagcagaaacccggccagggactcgaatggatcggccaaatctatcccggcgacggcgacaccaactacaacggcaagttcaagggcagagccacactgaccgccgatacctctagcagcacagcctacatgcagctgagcagcctgaccagcgaagatagcgccgtgtacttctgtgcccggtccatcacaacagtcgtgggctgcgctatggactattggggccagggaacaagcgtgaccgtgtctagtacgcgtgagcagaaactgatctcggaagaggatgggagcggcagccagcctcacaccaagcccagcgtgttcgtgatgaagaacggcaccaacgtggcctgcctcgtgaaagagttctaccccaaggacatcaggatcaacctggtgtccagcaagaagatcaccgagttcgaccccgccatcgtgatctcccccagcggcaagtacaacgccgtgaagctggggaagtacgaggacagcaacagcgtgacctgctccgtgcagcacgacaacaagaccgtgcacagcaccgactttgaagtgaaaaccgactccaccgaccacgtgaagcccaaagagacagagaacaccaagcagcccagcaagagctgccacaagcccaaggccatcgtgcacaccgagaaagtgaacatgatgagcctgaccgtgctgggcctgcggatgctgttcgccaaaaccgtggccgtgaacttcctgctgaccgccaagctgttcttcctccgcgccaagagaagcggatctggcgtgaagcagaccctgaatttcgacctgctgaagctggctggcgacgtggaatccaacccaggcccttctagaggccatatgaccgagtacaagcccacggtgcgcctcgccacccgcgacgacgtccccagggccgtacgcaccctcgccgccgcgttcgccgactaccccgccacgcgccacaccgtcgatccggaccgccacatcgagcgggtcaccgagctgcaagaactcttcctcacgcgcgtcgggctcgacatcggcaaggtgtgggtcgcggacgacggcgccgcggtggcggtctggaccacgccggagagcgtcgaagcgggggcggtgttcgccgagatcggcccgcgcatggccgagttgagcggttcccggctggccgcgcagcaacagatggaaggcctcctggcgccgcaccggcccaaggagcccgcgtggttcctggccaccgtcggcgtctcgcccgaccaccagggcaagggtctgggcagcgccgtcgtgctccccggagtggaggcggccgagcgcgccggggtgcccgccttcctggagacctccgcgccccgcaacctccccttctacgagcggctcggcttcaccgtcaccgccgacgtcgaggtgcccgaaggaccgcgcacctggtgcatgacccgcaagcccggtgcctga

SEQ ID NO: 5487 - DNA, 2325 bp, Artificial Sequence
  Synthetic Polynucloetide
atggccttaccagtgaccgccttgctcctgccgctggccttgctgctccacgccgccaggccggaagtgcaactggtggaatctggagggggaagcgtgcaggcaggcggatctctgagactgtcctgcaccacatctggcagagccctgaatatgtacgtgatgggatggtttcggcaggctcccggcaacgagcgggaatttgtggccgctacaagcagcagcggcggcagcacaagctaccccgattctgtgaagggcagattcacaatctcccgcgataatgccaagaatactgtgtacctgcagatgaatagtctgaagcctgaagatacagccgcctacagatgtgccgccagcccctacgtgtccacccccaccatgaacatcctggaagagtacagatactggggcctgggaacacaagtgacagtgtccagcggtaccggcggaggcggatctggcggcggaggtagcggtggcggaggatctgaattcgacatccagatgacacagagccctagcagcctgtctgccagcgtgggagacagagtgaccatcacatgcaaggccagcgaccacatcaacaactggctggcctggtatcagcagaagcctggacaggcccctaagctgctgatctacggcgctaccacactggaaacaggcgtgcccagcagattttctggcagcggctctggcaccgactacaccctgacaatatccagcctccagcctgaggacttcgccacctactactgtcagcagagctggaacaccccttggacattcggccagggcaccaagctggaaatcaagagactcgagagccagcctcacaccaagcccagcgtgttcgtgatgaagaacggcaccaacgtggcctgcctcgtgaaagagttctaccccaaggacatcaggatcaacctggtgtccagcaagaagatcaccgagttcgaccccgccatcgtgatctcccccagcggcaagtacaacgccgtgaagctggggaagtacgaggacagcaacagcgtgacctgctccgtgcagcacgacaacaagaccgtgcacagcaccgactttgaagtgaaaaccgactccaccgaccacgtgaagcccaaagagacagagaacaccaagcagcccagcaagagctgccacaagcccaaggccatcgtgcacaccgagaaagtgaacatgatgagcctgaccgtgctgggcctgcggatgctgttcgccaaaaccgtggccgtgaacttcctgctgaccgccaagctgttcttcctcagggccaagcgatctggatctggagcaacaaacttctcactactcaaacaagcaggtgacgtggaggagaatcccgggcctactagtatggactggatttggcgcatccttttccttgtcggcgctgctaccggcgcgcattccttcgaacaagttcagcttcaacagcctggcgctgagctggtcaaacctggcgcttctgtgaagatgagctgcaaagccagcggctacgccttcagcagctactggatcaactggatgaagcagaaacccggccagggactcgaatggatcggccaaatctatcccggcgacggcgacaccaactacaacggcaagttcaagggcagagccacactgaccgccgatacctctagcagcacagcctacatgcagctgagcagcctgaccagcgaagatagcgccgtgtacttctgtgcccggtccatcacaacagtcgtgggctgcgctatggactattggggccagggaacaagcgtgaccgtgtctagtacgcgtgacaagcagctggacgccgacgtgtcccccaagcctaccatcttcctgccctctatcgccgagacaaagctccagaaggccggcacctacctgtgcctgctggaaaagttcttcccagatgtgattaagatccactggcaggaaaagaagtccaacaccatcctgggcagccaggaaggcaacaccatgaagaccaacgacacctacatgaagttcagctggctgaccgtgcccgagaagtccctggacaaagaacacagatgcatcgtgcggcacgaaaacaacaagaacggcgtggaccaggaaatcatcttcccacccatcaagaccgatgtgattacaatggaccccaaggacaactgctccaaggacgccaacgataccctgctgctccagctgaccaacaccagcgcctactacatgtacttgttgctgctgctgaagtccgtggtgtacttcgccatcatcacatgctgcctgctgcggagaaccgccttctgctgcaacggcgagaagtct

SEQ ID NO: 5488 - DNA, 3159 bp, Artificial Sequence
  Synthetic Polynucloetide
atggccttaccagtgaccgccttgctcctgccgctggccttgctgctccacgccgccaggccgctcgaggggaaaccaattcccaaccctcttctgggactggattcaaccggcagcggcgacaagcagctggacgccgacgtgtcccccaagcctaccatcttcctgccctctatcgccgagacaaagctccagaaggccggcacctacctgtgcctgctggaaaagttcttcccagatgtgattaagatccactggcaggaaaagaagtccaacaccatcctgggcagccaggaaggcaacaccatgaagaccaacgacacctacatgaagttcagctggctgaccgtgcccgagaagtccctggacaaagaacacagatgcatcgtgcggcacgaaaacaacaagaacggcgtggaccaggaaatcatcttcccacccatcaagaccgatgtgattacaatggaccccaaggacaactgctccaaggacgccaacgataccctgctgctccagctgaccaacaccagcgcctactacatgtacttgttgctgctgctgaagtccgtggtgtacttcgccatcatcacatgctgcctgctgcggagaaccgccttctgctgcaacggcgagaagtctagggccaagcgatctggatctggagcaacaaacttctcactactcaaacaagcaggtgacgtggaggagaatcccgggcctactagcatggccttaccagtgaccgccttgctcctgccgctggccttgctgctccacgccgccaggccggaagtgcaactggtggaatctggagggggaagcgtgcaggcaggcggatctctgagactgtcctgcaccacatctggcagagccctgaatatgtacgtgatgggatggtttcggcaggctcccggcaacgagcgggaatttgtggccgctacaagcagcagcggcggcagcacaagctaccccgattctgtgaagggcagattcacaatctcccgcgataatgccaagaatactgtgtacctgcagatgaatagtctgaagcctgaagatacagccgcctacagatgtgccgccagcccctacgtgtccacccccaccatgaacatcctggaagagtacagatactggggcctgggaacacaagtgacagtgtccagcggtaccggcggaggcggatctggcggcggaggtagcggtggcggaggatctgaattcgacatccagatgacacagagccctagcagcctgtctgccagcgtgggagacagagtgaccatcacatgcaaggccagcgaccacatcaacaactggctggcctggtatcagcagaagcctggacaggcccctaagctgctgatctacggcgctaccacactggaaacaggcgtgcccagcagattttctggcagcggctctggcaccgactacaccctgacaatatccagcctccagcctgaggacttcgccacctactactgtcagcagagctggaacaccccttggacattcggccagggcaccaagctggaaatcaagagaggcggaggcggaagtggaggcggaggatctggcggcggaggctctcaagttcagcttcaacagcctggcgctgagctggtcaaacctggcgcttctgtgaagatgagctgcaaagccagcggctacgccttcagcagctactggatcaactggatgaagcagaaacccggccagggactcgaatggatcggccaaatctatcccggcgacggcgacaccaactacaacggcaagttcaagggcagagccacactgaccgccgatacctctagcagcacagcctacatgcagctgagcagcctgaccagcgaagatagcgccgtgtacttctgtgcccggtccatcacaacagtcgtgggctgcgctatggactattggggccagggaacaagcgtgaccgtgtctagtacgcgtgagcagaaactgatctcggaagaggatgggagcggcagccagcctcacaccaagcccagcgtgttcgtgatgaagaacggcaccaacgtggcctgcctcgtgaaagagttctaccccaaggacatcaggatcaacctggtgtccagcaagaagatcaccgagttcgaccccgccatcgtgatctcccccagcggcaagtacaacgccgtgaagctggggaagtacgaggacagcaacagcgtgacctgctccgtgcagcacgacaacaagaccgtgcacagcaccgactttgaagtgaaaaccgactccaccgaccacgtgaagcccaaagagacagagaacaccaagcagcccagcaagagctgccacaagcccaaggccatcgtgcacaccgagaaagtgaacatgatgagcctgaccgtgctgggcctgcggatgctgttcgccaaaaccgtggccgtgaacttcctgctgaccgccaagctgttcttcctccgcgccaagagaagcggatctggcgtgaagcagaccctgaatttcgacctgctgaagctggctggcgacgtggaatccaacccaggcccttctagaggccatatgaccgagtacaagcccacggtgcgcctcgccacccgcgacgacgtccccagggccgtacgcaccctcgccgccgcgttcgccgactaccccgccacgcgccacaccgtcgatccggaccgccacatcgagcgggtcaccgagctgcaagaactcttcctcacgcgcgtcgggctcgacatcggcaaggtgtgggtcgcggacgacggcgccgcggtggcggtctggaccacgccggagagcgtcgaagcgggggcggtgttcgccgagatcggcccgcgcatggccgagttgagcggttcccggctggccgcgcagcaacagatggaaggcctcctggcgccgcaccggcccaaggagcccgcgtggttcctggccaccgtcggcgtctcgcccgaccaccagggcaagggtctgggcagcgccgtcgtgctccccggagtggaggcggccgagcgcgccggggtgcccgccttcctggagacctccgcgccccgcaacctccccttctacgagcggctcggcttcaccgtcaccgccgacgtcgaggtgcccgaaggaccgcgcacctggtgcatgacccgcaagcccggtgcctga

SEQ ID NO: 5489 - DNA, 3534 bp, Artificial Sequence
  Synthetic Polynucloetide
atggccttaccagtgaccgccttgctcctgccgctggccttgctgctccacgccgccaggccggaagtgcaactggtggaatctggagggggaagcgtgcaggcaggcggatctctgagactgtcctgcaccacatctggcagagccctgaatatgtacgtgatgggatggtttcggcaggctcccggcaacgagcgggaatttgtggccgctacaagcagcagcggcggcagcacaagctaccccgattctgtgaagggcagattcacaatctcccgcgataatgccaagaatactgtgtacctgcagatgaatagtctgaagcctgaagatacagccgcctacagatgtgccgccagcccctacgtgtccacccccaccatgaacatcctggaagagtacagatactggggcctgggaacacaagtgacagtgtccagcggtaccggcggaggcggatctggcggcggaggtagcggtggcggaggatctgaattcgacatccagatgacacagagccctagcagcctgtctgccagcgtgggagacagagtgaccatcacatgcaaggccagcgaccacatcaacaactggctggcctggtatcagcagaagcctggacaggcccctaagctgctgatctacggcgctaccacactggaaacaggcgtgcccagcagattttctggcagcggctctggcaccgactacaccctgacaatatccagcctccagcctgaggacttcgccacctactactgtcagcagagctggaacaccccttggacattcggccagggcaccaagctggaaatcaagagaggacagcctaaggccaatcctaccgtgacactgttccctccaagcagcgaagaactccaggccaacaaggccacacttgtgtgcctgatctccgacttctaccctggggctgtgacagtggcttggaaggccgatggatctcctgtgaaagccggcgtggaaaccaccaagccatccaagcagagcaacaacaaatacgccgccagctcctacctgagcctgacacctgagcagtggaagtcccacagatcctacagctgccaagtgacccacgaaggcagcaccgtggaaaagacagtggcccctacagagtgcagcggatcccagagcttcggcctgctggaccccaagctgtgctacctgctggatggcatcctgttcatctacggcgtgatcctgaccgccctgttcctgagagtgaagttcagcagaagcgccgacgcccctgcctaccagcagggacagaaccaactgtacaacgagctgaacctgggcagacgggaagagtacgacgtgctggacaagcggagaggcagggaccctgagatgggcggaaagccccagcggagaaagaacccccaggaaggactgtataacgaactccagaaagacaagatggccgaagcctacagcgagatcggcatgaagggcgagcggagaagaggcaagggccacgatggcctgtaccagggcctgagcaccgccaccaaggacacctatgacgccctgcacatgcaggccctgcctccaagaagggccaagcgatctggatctggagcaacaaacttctcactactcaaacaagcaggtgacgtggaggagaatcccgggcctactagtatggactggatttggcgcatccttttccttgtcggcgctgctaccggcgcgcattccttcgaacaagttcagcttcaacagcctggcgctgagctggtcaaacctggcgcttctgtgaagatgagctgcaaagccagcggctacgccttcagcagctactggatcaactggatgaagcagaaacccggccagggactcgaatggatcggccaaatctatcccggcgacggcgacaccaactacaacggcaagttcaagggcagagccacactgaccgccgatacctctagcagcacagcctacatgcagctgagcagcctgaccagcgaagatagcgccgtgtacttctgtgcccggtccatcacaacagtcgtgggctgcgctatggactattggggccagggaacaagcgtgaccgtgtctagtgcctctacaaagggaccctccgtgtttcctctggctcccagcagcaagtctacaagcggaggaacagccgctctgggctgcctggtcaaggattactttcccgagcctgtgaccgtgtcctggaatagcggagcactgacaagcggcgtgcacacctttccagccgtgctgcaaagcagcggcctgtactctctgagcagcgtggtcacagtgcctagctctagcctgggcacccagacctacatctgcaatgtgaaccacaagcctagcaacaccaaggtggacaagagagtggaacccaagagctgtggtacccagagttttgggttgttggaccctaaattgtgctatctgttggacggaatcctgttcatttacggagtgatcctgaccgcattgttcctgcgggttaagttttccagatccgcagacgcacccgcttaccaacaagggcagaaccaactctacaatgaacttaatttggggcggagggaagagtacgacgttctggacaaaaggaggggacgagatcccgagatgggcggaaagcctcagcgaaggaagaatccgcaagaggggctttataacgaactccagaaagataaaatggcagaagcctatagtgagattgggatgaagggagaaaggaggaggggtaaaggtcacgatgggttgtaccaaggattgagcacagccactaaagatacctatgatgcgctccacatgcaggccctgccgccaagacgcgccaagagaagcggatctggcgtgaagcagaccctgaatttcgacctgctgaagctggctggcgacgtggaatccaacccaggcccttctagaggccatatgaccgagtacaagcccacggtgcgcctcgccacccgcgacgacgtccccagggccgtacgcaccctcgccgccgcgttcgccgactaccccgccacgcgccacaccgtcgatccggaccgccacatcgagcgggtcaccgagctgcaagaactcttcctcacgcgcgtcgggctcgacatcggcaaggtgtgggtcgcggacgacggcgccgcggtggcggtctggaccacgccggagagcgtcgaagcgggggcggtgttcgccgagatcggcccgcgcatggccgagttgagcggttcccggctggccgcgcagcaacagatggaaggcctcctggcgccgcaccggcccaaggagcccgcgtggttcctggccaccgtcggcgtctcgcccgaccaccagggcaagggtctgggcagcgccgtcgtgctccccggagtggaggcggccgagcgcgccggggtgcccgccttcctggagacctccgcgccccgcaacctccccttctacgagcggctcggcttcaccgtcaccgccgacgtcgaggtgcccgaaggaccgcgcacctggtgcatgacccgcaagcccggtgcctga

SEQ ID NO: 5490 - DNA, 2889 bp, Artificial Sequence
  Synthetic Polynucloetide
atggccttaccagtgaccgccttgctcctgccgctggccttgctgctccacgccgccaggccggaagtgcaactggtggaatctggagggggaagcgtgcaggcaggcggatctctgagactgtcctgcaccacatctggcagagccctgaatatgtacgtgatgggatggtttcggcaggctcccggcaacgagcgggaatttgtggccgctacaagcagcagcggcggcagcacaagctaccccgattctgtgaagggcagattcacaatctcccgcgataatgccaagaatactgtgtacctgcagatgaatagtctgaagcctgaagatacagccgcctacagatgtgccgccagcccctacgtgtccacccccaccatgaacatcctggaagagtacagatactggggcctgggaacacaagtgacagtgtccagcggtaccggcggaggcggatctggcggcggaggtagcggtggcggaggatctgaattcgacatccagatgacacagagccctagcagcctgtctgccagcgtgggagacagagtgaccatcacatgcaaggccagcgaccacatcaacaactggctggcctggtatcagcagaagcctggacaggcccctaagctgctgatctacggcgctaccacactggaaacaggcgtgcccagcagattttctggcagcggctctggcaccgactacaccctgacaatatccagcctccagcctgaggacttcgccacctactactgtcagcagagctggaacaccccttggacattcggccagggcaccaagctggaaatcaagagactcgaggacctgaagaacgtgttcccacctgaggtggccgtgttcgagcctagcgaggccgagatcagccacacccagaaagccaccctcgtgtgcctggctaccggcttctaccccgaccatgtggaactgtcttggtgggtcaacggcaaagaggtgcacagcggcgtgtctaccgacccccagccactgaaagaacagcccgccctgaacgacagccggtactgcctgagcagcagactgagagtgtccgccaccttctggcagaacccccggaaccacttcagatgccaggtgcagttctacggcctgagcgagaacgacgagtggacccaggacagagccaagcccgtgacccagatcgtgtctgccgaagcctggggcagagccgattgcggatcccagagcttcggcctgctggaccccaagctgtgctacctgctggatggcatcctgttcatctacggcgtgatcctgaccgccctgttcctgagagtgaagttcagcagaagcgccgacgcccctgcctaccagcagggacagaaccaactgtacaacgagctgaacctgggcagacgggaagagtacgacgtgctggacaagcggagaggcagggaccctgagatgggcggaaagccccagcggagaaagaacccccaggaaggactgtataacgaactccagaaagacaagatggccgaagcctacagcgagatcggcatgaagggcgagcggagaagaggcaagggccacgatggcctgtaccagggcctgagcaccgccaccaaggacacctatgacgccctgcacatgcaggccctgcctccaagaagggccaagcgatctggatctggagcaacaaacttctcactactcaaacaagcaggtgacgtggaggagaatcccgggcctactagtatggactggatttggcgcatccttttccttgtcggcgctgctaccggcgcgcattccttcgaacaagttcagcttcaacagcctggcgctgagctggtcaaacctggcgcttctgtgaagatgagctgcaaagccagcggctacgccttcagcagctactggatcaactggatgaagcagaaacccggccagggactcgaatggatcggccaaatctatcccggcgacggcgacaccaactacaacggcaagttcaagggcagagccacactgaccgccgatacctctagcagcacagcctacatgcagctgagcagcctgaccagcgaagatagcgccgtgtacttctgtgcccggtccatcacaacagtcgtgggctgcgctatggactattggggccagggaacaagcgtgaccgtgtctagtacgcgtatccagaaccctgatcctgccgtgtaccagctgcgggatagcaagagcagcgacaagagcgtgtgtctgttcaccgacttcgacagccagaccaacgtgtcccagagcaaggactccgacgtgtacatcaccgataagaccgtgctggacatgcggagcatggacttcaagagcaactccgccgtggcctggtccaacaagtccgatttcgcctgcgccaacgccttcaacaacagcattatccccgaggacacattcttcccaagccccgagagcagctgcggtacccagagttttgggttgttggaccctaaattgtgctatctgttggacggaatcctgttcatttacggagtgatcctgaccgcattgttcctgcgggttaagttttccagatccgcagacgcacccgcttaccaacaagggcagaaccaactctacaatgaacttaatttggggcggagggaagagtacgacgttctggacaaaaggaggggacgagatcccgagatgggcggaaagcctcagcgaaggaagaatccgcaagaggggctttataacgaactccagaaagataaaatggcagaagcctatagtgagattgggatgaagggagaaaggaggaggggtaaaggtcacgatgggttgtaccaaggattgagcacagccactaaagatacctatgatgcgctccacatgcaggccctgccgccaaga

SEQ ID NO: 5491 - DNA, 2889 bp, Artificial Sequence
  Synthetic Polynucloetide
atggccttaccagtgaccgccttgctcctgccgctggccttgctgctccacgccgccaggccggaagtgcaactggtggaatctggagggggaagcgtgcaggcaggcggatctctgagactgtcctgcaccacatctggcagagccctgaatatgtacgtgatgggatggtttcggcaggctcccggcaacgagcgggaatttgtggccgctacaagcagcagcggcggcagcacaagctaccccgattctgtgaagggcagattcacaatctcccgcgataatgccaagaatactgtgtacctgcagatgaatagtctgaagcctgaagatacagccgcctacagatgtgccgccagcccctacgtgtccacccccaccatgaacatcctggaagagtacagatactggggcctgggaacacaagtgacagtgtccagcggtaccggcggaggcggatctggcggcggaggtagcggtggcggaggatctgaattcgacatccagatgacacagagccctagcagcctgtctgccagcgtgggagacagagtgaccatcacatgcaaggccagcgaccacatcaacaactggctggcctggtatcagcagaagcctggacaggcccctaagctgctgatctacggcgctaccacactggaaacaggcgtgcccagcagattttctggcagcggctctggcaccgactacaccctgacaatatccagcctccagcctgaggacttcgccacctactactgtcagcagagctggaacaccccttggacattcggccagggcaccaagctggaaatcaagagactcgaggacctgaagaacgtgttcccacctgaggtggccgtgttcgagcctagcaaggccgagatcgcccacacccagaaagccaccctcgtgtgcctggctaccggcttctaccccgaccatgtggaactgtcttggtgggtcaacggcaaagaggtgcacagcggcgtgtgtaccgacccccagccactgaaagaacagcccgccctgaacgacagccggtactgcctgagcagcagactgagagtgtccgccaccttctggcagaacccccggaaccacttcagatgccaggtgcagttctacggcctgagcgagaacgacgagtggacccaggacagagccaagcccgtgacccagatcgtgtctgccgaagcctggggcagagccgattgcggatcccagagcttcggcctgctggaccccaagctgtgctacctgctggatggcatcctgttcatctacggcgtgatcctgaccgccctgttcctgagagtgaagttcagcagaagcgccgacgcccctgcctaccagcagggacagaaccaactgtacaacgagctgaacctgggcagacgggaagagtacgacgtgctggacaagcggagaggcagggaccctgagatgggcggaaagccccagcggagaaagaacccccaggaaggactgtataacgaactccagaaagacaagatggccgaagcctacagcgagatcggcatgaagggcgagcggagaagaggcaagggccacgatggcctgtaccagggcctgagcaccgccaccaaggacacctatgacgccctgcacatgcaggccctgcctccaagaagggccaagcgatctggatctggagcaacaaacttctcactactcaaacaagcaggtgacgtggaggagaatcccgggcctactagtatggactggatttggcgcatccttttccttgtcggcgctgctaccggcgcgcattccttcgaacaagttcagcttcaacagcctggcgctgagctggtcaaacctggcgcttctgtgaagatgagctgcaaagccagcggctacgccttcagcagctactggatcaactggatgaagcagaaacccggccagggactcgaatggatcggccaaatctatcccggcgacggcgacaccaactacaacggcaagttcaagggcagagccacactgaccgccgatacctctagcagcacagcctacatgcagctgagcagcctgaccagcgaagatagcgccgtgtacttctgtgcccggtccatcacaacagtcgtgggctgcgctatggactattggggccagggaacaagcgtgaccgtgtctagtacgcgtatccagaaccctgatcctgccgtgtaccagctgcgggatagcaagagcagcgacaagagcgtgtgtctgttcaccgacttcgacagccagaccaacgtgtcccagagcaaggactccgacgtgtacatcaccgataagtgcgtgctggacatgcggagcatggacttcaagagcaactccgccgtggcctggtccaacaagtccgatttcgcctgcgccaacgccttcaacaacagcattatccccgaggacacattcttcccaagcagcgacgtgccctgcggtacccagagttttgggttgttggaccctaaattgtgctatctgttggacggaatcctgttcatttacggagtgatcctgaccgcattgttcctgcgggttaagttttccagatccgcagacgcacccgcttaccaacaagggcagaaccaactctacaatgaacttaatttggggcggagggaagagtacgacgttctggacaaaaggaggggacgagatcccgagatgggcggaaagcctcagcgaaggaagaatccgcaagaggggctttataacgaactccagaaagataaaatggcagaagcctatagtgagattgggatgaagggagaaaggaggaggggtaaaggtcacgatgggttgtaccaaggattgagcacagccactaaagatacctatgatgcgctccacatgcaggccctgccgccaaga

SEQ ID NO: 5492 - DNA, 3102 bp, Artificial Sequence
  Synthetic Polynucloetide
atggccttaccagtgaccgccttgctcctgccgctggccttgctgctccacgccgccaggccggaagtgcaactggtggaatctggagggggaagcgtgcaggcaggcggatctctgagactgtcctgcaccacatctggcagagccctgaatatgtacgtgatgggatggtttcggcaggctcccggcaacgagcgggaatttgtggccgctacaagcagcagcggcggcagcacaagctaccccgattctgtgaagggcagattcacaatctcccgcgataatgccaagaatactgtgtacctgcagatgaatagtctgaagcctgaagatacagccgcctacagatgtgccgccagcccctacgtgtccacccccaccatgaacatcctggaagagtacagatactggggcctgggaacacaagtgacagtgtccagcggtaccggcggaggcggatctggcggcggaggtagcggtggcggaggatctgaattcgacatccagatgacacagagccctagcagcctgtctgccagcgtgggagacagagtgaccatcacatgcaaggccagcgaccacatcaacaactggctggcctggtatcagcagaagcctggacaggcccctaagctgctgatctacggcgctaccacactggaaacaggcgtgcccagcagattttctggcagcggctctggcaccgactacaccctgacaatatccagcctccagcctgaggacttcgccacctactactgtcagcagagctggaacaccccttggacattcggccagggcaccaagctggaaatcaagagactcgaggggaaaccaattcccaaccctcttctgggactggattcaaccggcagcggcgaggacctgaagaacgtgttcccacctgaggtggccgtgttcgagcctagcgaggccgagatcagccacacccagaaagccaccctcgtgtgcctggctaccggcttctaccccgaccatgtggaactgtcttggtgggtcaacggcaaagaggtgcacagcggcgtgtctaccgacccccagccactgaaagaacagcccgccctgaacgacagccggtactgcctgagcagcagactgagagtgtccgccaccttctggcagaacccccggaaccacttcagatgccaggtgcagttctacggcctgagcgagaacgacgagtggacccaggacagagccaagcccgtgacccagatcgtgtctgccgaagcctggggcagagccgattgcggatcccagagcttcggcctgctggaccccaagctgtgctacctgctggatggcatcctgttcatctacggcgtgatcctgaccgccctgttcctgagagtgaagttcagcagaagcgccgacgcccctgcctaccagcagggacagaaccaactgtacaacgagctgaacctgggcagacgggaagagtacgacgtgctggacaagcggagaggcagggaccctgagatgggcggaaagccccagcggagaaagaacccccaggaaggactgtataacgaactccagaaagacaagatggccgaagcctacagcgagatcggcatgaagggcgagcggagaagaggcaagggccacgatggcctgtaccagggcctgagcaccgccaccaaggacacctatgacgccctgcacatgcaggccctgcctccaagaagggccaagcgatctggatctggagcaacaaacttctcactactcaaacaagcaggtgacgtggaggagaatcccgggcctactagtatggactggatttggcgcatccttttccttgtcggcgctgctaccggcgcgcattccttcgaacaagttcagcttcaacagcctggcgctgagctggtcaaacctggcgcttctgtgaagatgagctgcaaagccagcggctacgccttcagcagctactggatcaactggatgaagcagaaacccggccagggactcgaatggatcggccaaatctatcccggcgacggcgacaccaactacaacggcaagttcaagggcagagccacactgaccgccgatacctctagcagcacagcctacatgcagctgagcagcctgaccagcgaagatagcgccgtgtacttctgtgcccggtccatcacaacagtcgtgggctgcgctatggactattggggccagggaacaagcgtgaccgtgtctagtacgcgtgagcagaaactgatctcggaagaggatgggagcggcatccagaaccctgatcctgccgtgtaccagctgcgggatagcaagagcagcgacaagagcgtgtgtctgttcaccgacttcgacagccagaccaacgtgtcccagagcaaggactccgacgtgtacatcaccgataagaccgtgctggacatgcggagcatggacttcaagagcaactccgccgtggcctggtccaacaagtccgatttcgcctgcgccaacgccttcaacaacagcattatccccgaggacacattcttcccaagccccgagagcagctgcggtacccagagttttgggttgttggaccctaaattgtgctatctgttggacggaatcctgttcatttacggagtgatcctgaccgcattgttcctgaggagcaagcggtcacggctgctccacagcgattacatgaatatgacaccacgaagaccgggtcctactcgcaaacactaccaaccctacgcacctccccgcgactttgcagcgtaccgatctcgggttaagttttccagatccgcagacgcacccgcttaccaacaagggcagaaccaactctacaatgaacttaatttggggcggagggaagagtacgacgttctggacaaaaggaggggacgagatcccgagatgggcggaaagcctcagcgaaggaagaatccgcaagaggggctttataacgaactccagaaagataaaatggcagaagcctatagtgagattgggatgaagggagaaaggaggaggggtaaaggtcacgatgggttgtaccaaggattgagcacagccactaaagatacctatgatgcgctccacatgcaggccctgccgccaaga

SEQ ID NO: 5493 - DNA, 3225 bp, Artificial Sequence
  Synthetic Polynucloetide
atggccttaccagtgaccgccttgctcctgccgctggccttgctgctccacgccgccaggccggaagtgcaactggtggaatctggagggggaagcgtgcaggcaggcggatctctgagactgtcctgcaccacatctggcagagccctgaatatgtacgtgatgggatggtttcggcaggctcccggcaacgagcgggaatttgtggccgctacaagcagcagcggcggcagcacaagctaccccgattctgtgaagggcagattcacaatctcccgcgataatgccaagaatactgtgtacctgcagatgaatagtctgaagcctgaagatacagccgcctacagatgtgccgccagcccctacgtgtccacccccaccatgaacatcctggaagagtacagatactggggcctgggaacacaagtgacagtgtccagcggtaccggcggaggcggatctggcggcggaggtagcggtggcggaggatctgaattcgacatccagatgacacagagccctagcagcctgtctgccagcgtgggagacagagtgaccatcacatgcaaggccagcgaccacatcaacaactggctggcctggtatcagcagaagcctggacaggcccctaagctgctgatctacggcgctaccacactggaaacaggcgtgcccagcagattttctggcagcggctctggcaccgactacaccctgacaatatccagcctccagcctgaggacttcgccacctactactgtcagcagagctggaacaccccttggacattcggccagggcaccaagctggaaatcaagagactcgaggggaaaccaattcccaaccctcttctgggactggattcaaccggcagcggcgaggacctgaagaacgtgttcccacctgaggtggccgtgttcgagcctagcgaggccgagatcagccacacccagaaagccaccctcgtgtgcctggctaccggcttctaccccgaccatgtggaactgtcttggtgggtcaacggcaaagaggtgcacagcggcgtgtctaccgacccccagccactgaaagaacagcccgccctgaacgacagccggtactgcctgagcagcagactgagagtgtccgccaccttctggcagaacccccggaaccacttcagatgccaggtgcagttctacggcctgagcgagaacgacgagtggacccaggacagagccaagcccgtgacccagatcgtgtctgccgaagcctggggcagagccgattgcggatcccagagcttcggcctgctggaccccaagctgtgctacctgctggatggcatcctgttcatctacggcgtgatcctgaccgccctgttcctgaggagtaagaggagcaggctcctgcacagtgactacatgaacatgactccacgccgccccggacccacccgcaagcattaccagccctatgccccaccacgcgacttcgcagcctatcgctccagagtgaagttcagcagaagcgccgacgcccctgcctaccagcagggacagaaccaactgtacaacgagctgaacctgggcagacgggaagagtacgacgtgctggacaagcggagaggcagggaccctgagatgggcggaaagccccagcggagaaagaacccccaggaaggactgtataacgaactccagaaagacaagatggccgaagcctacagcgagatcggcatgaagggcgagcggagaagaggcaagggccacgatggcctgtaccagggcctgagcaccgccaccaaggacacctatgacgccctgcacatgcaggccctgcctccaagaagggccaagcgatctggatctggagcaacaaacttctcactactcaaacaagcaggtgacgtggaggagaatcccgggcctactagtatggactggatttggcgcatccttttccttgtcggcgctgctaccggcgcgcattccttcgaacaagttcagcttcaacagcctggcgctgagctggtcaaacctggcgcttctgtgaagatgagctgcaaagccagcggctacgccttcagcagctactggatcaactggatgaagcagaaacccggccagggactcgaatggatcggccaaatctatcccggcgacggcgacaccaactacaacggcaagttcaagggcagagccacactgaccgccgatacctctagcagcacagcctacatgcagctgagcagcctgaccagcgaagatagcgccgtgtacttctgtgcccggtccatcacaacagtcgtgggctgcgctatggactattggggccagggaacaagcgtgaccgtgtctagtacgcgtgagcagaaactgatctcggaagaggatgggagcggcatccagaaccctgatcctgccgtgtaccagctgcgggatagcaagagcagcgacaagagcgtgtgtctgttcaccgacttcgacagccagaccaacgtgtcccagagcaaggactccgacgtgtacatcaccgataagaccgtgctggacatgcggagcatggacttcaagagcaactccgccgtggcctggtccaacaagtccgatttcgcctgcgccaacgccttcaacaacagcattatccccgaggacacattcttcccaagccccgagagcagctgcggtacccagagttttgggttgttggaccctaaattgtgctatctgttggacggaatcctgttcatttacggagtgatcctgaccgcattgttcctgaggagcaagcggtcacggctgctccacagcgattacatgaatatgacaccacgaagaccgggtcctactcgcaaacactaccaaccctacgcacctccccgcgactttgcagcgtaccgatctcgggttaagttttccagatccgcagacgcacccgcttaccaacaagggcagaaccaactctacaatgaacttaatttggggcggagggaagagtacgacgttctggacaaaaggaggggacgagatcccgagatgggcggaaagcctcagcgaaggaagaatccgcaagaggggctttataacgaactccagaaagataaaatggcagaagcctatagtgagattgggatgaagggagaaaggaggaggggtaaaggtcacgatgggttgtaccaaggattgagcacagccactaaagatacctatgatgcgctccacatgcaggccctgccgccaaga

SEQ ID NO: 5494 - DNA, 3108 bp, Artificial Sequence
  Synthetic Polynucloetide
atggccttaccagtgaccgccttgctcctgccgctggccttgctgctccacgccgccaggccggaagtgcaactggtggaatctggagggggaagcgtgcaggcaggcggatctctgagactgtcctgcaccacatctggcagagccctgaatatgtacgtgatgggatggtttcggcaggctcccggcaacgagcgggaatttgtggccgctacaagcagcagcggcggcagcacaagctaccccgattctgtgaagggcagattcacaatctcccgcgataatgccaagaatactgtgtacctgcagatgaatagtctgaagcctgaagatacagccgcctacagatgtgccgccagcccctacgtgtccacccccaccatgaacatcctggaagagtacagatactggggcctgggaacacaagtgacagtgtccagcggtaccggcggaggcggatctggcggcggaggtagcggtggcggaggatctgaattcgacatccagatgacacagagccctagcagcctgtctgccagcgtgggagacagagtgaccatcacatgcaaggccagcgaccacatcaacaactggctggcctggtatcagcagaagcctggacaggcccctaagctgctgatctacggcgctaccacactggaaacaggcgtgcccagcagattttctggcagcggctctggcaccgactacaccctgacaatatccagcctccagcctgaggacttcgccacctactactgtcagcagagctggaacaccccttggacattcggccagggcaccaagctggaaatcaagagactcgaggggaaaccaattcccaaccctcttctgggactggattcaaccggcagcggcgaggacctgaagaacgtgttcccacctgaggtggccgtgttcgagcctagcgaggccgagatcagccacacccagaaagccaccctcgtgtgcctggctaccggcttctaccccgaccatgtggaactgtcttggtgggtcaacggcaaagaggtgcacagcggcgtgtctaccgacccccagccactgaaagaacagcccgccctgaacgacagccggtactgcctgagcagcagactgagagtgtccgccaccttctggcagaacccccggaaccacttcagatgccaggtgcagttctacggcctgagcgagaacgacgagtggacccaggacagagccaagcccgtgacccagatcgtgtctgccgaagcctggggcagagccgattgcggatcccagagcttcggcctgctggaccccaagctgtgctacctgctggatggcatcctgttcatctacggcgtgatcctgaccgccctgttcctgagagtgaagttcagcagaagcgccgacgcccctgcctaccagcagggacagaaccaactgtacaacgagctgaacctgggcagacgggaagagtacgacgtgctggacaagcggagaggcagggaccctgagatgggcggaaagccccagcggagaaagaacccccaggaaggactgtataacgaactccagaaagacaagatggccgaagcctacagcgagatcggcatgaagggcgagcggagaagaggcaagggccacgatggcctgtaccagggcctgagcaccgccaccaaggacacctatgacgccctgcacatgcaggccctgcctccaagaagggccaagcgatctggatctggagcaacaaacttctcactactcaaacaagcaggtgacgtggaggagaatcccgggcctactagtatggactggatttggcgcatccttttccttgtcggcgctgctaccggcgcgcattccttcgaacaagttcagcttcaacagcctggcgctgagctggtcaaacctggcgcttctgtgaagatgagctgcaaagccagcggctacgccttcagcagctactggatcaactggatgaagcagaaacccggccagggactcgaatggatcggccaaatctatcccggcgacggcgacaccaactacaacggcaagttcaagggcagagccacactgaccgccgatacctctagcagcacagcctacatgcagctgagcagcctgaccagcgaagatagcgccgtgtacttctgtgcccggtccatcacaacagtcgtgggctgcgctatggactattggggccagggaacaagcgtgaccgtgtctagtacgcgtgagcagaaactgatctcggaagaggatctggggagcggcatccagaaccctgatcctgccgtgtaccagctgcgggatagcaagagcagcgacaagagcgtgtgtctgttcaccgacttcgacagccagaccaacgtgtcccagagcaaggactccgacgtgtacatcaccgataagaccgtgctggacatgcggagcatggacttcaagagcaactccgccgtggcctggtccaacaagtccgatttcgcctgcgccaacgccttcaacaacagcattatccccgaggacacattcttcccaagccccgagagcagctgcggtacccagagttttgggttgttggaccctaaattgtgctatctgttggacggaatcctgttcatttacggagtgatcctgaccgcattgttcctgaagagaggccggaagaagctgctgtacatcttcaagcagcctttcatgcggcccgtgcagaccacccaggaagaggacggctgctcctgccggttccccgaggaagaagaaggcggctgcgagctgcgggttaagttttccagatccgcagacgcacccgcttaccaacaagggcagaaccaactctacaatgaacttaatttggggcggagggaagagtacgacgttctggacaaaaggaggggacgagatcccgagatgggcggaaagcctcagcgaaggaagaatccgcaagaggggctttataacgaactccagaaagataaaatggcagaagcctatagtgagattgggatgaagggagaaaggaggaggggtaaaggtcacgatgggttgtaccaaggattgagcacagccactaaagatacctatgatgcgctccacatgcaggccctgccgccaaga

SEQ ID NO: 5495 - DNA, 3234 bp, Artificial Sequence
  Synthetic Polynucloetide
atggccttaccagtgaccgccttgctcctgccgctggccttgctgctccacgccgccaggccggaagtgcaactggtggaatctggagggggaagcgtgcaggcaggcggatctctgagactgtcctgcaccacatctggcagagccctgaatatgtacgtgatgggatggtttcggcaggctcccggcaacgagcgggaatttgtggccgctacaagcagcagcggcggcagcacaagctaccccgattctgtgaagggcagattcacaatctcccgcgataatgccaagaatactgtgtacctgcagatgaatagtctgaagcctgaagatacagccgcctacagatgtgccgccagcccctacgtgtccacccccaccatgaacatcctggaagagtacagatactggggcctgggaacacaagtgacagtgtccagcggtaccggcggaggcggatctggcggcggaggtagcggtggcggaggatctgaattcgacatccagatgacacagagccctagcagcctgtctgccagcgtgggagacagagtgaccatcacatgcaaggccagcgaccacatcaacaactggctggcctggtatcagcagaagcctggacaggcccctaagctgctgatctacggcgctaccacactggaaacaggcgtgcccagcagattttctggcagcggctctggcaccgactacaccctgacaatatccagcctccagcctgaggacttcgccacctactactgtcagcagagctggaacaccccttggacattcggccagggcaccaagctggaaatcaagagactcgaggggaaaccaattcccaaccctcttctgggactggattcaaccggcagcggcgaggacctgaagaacgtgttcccacctgaggtggccgtgttcgagcctagcgaggccgagatcagccacacccagaaagccaccctcgtgtgcctggctaccggcttctaccccgaccatgtggaactgtcttggtgggtcaacggcaaagaggtgcacagcggcgtgtctaccgacccccagccactgaaagaacagcccgccctgaacgacagccggtactgcctgagcagcagactgagagtgtccgccaccttctggcagaacccccggaaccacttcagatgccaggtgcagttctacggcctgagcgagaacgacgagtggacccaggacagagccaagcccgtgacccagatcgtgtctgccgaagcctggggcagagccgattgcggatcccagagcttcggcctgctggaccccaagctgtgctacctgctggatggcatcctgttcatctacggcgtgatcctgaccgccctgttcctgaaacggggcagaaagaaactcctgtatatattcaaacaaccatttatgagaccagtacaaactactcaagaggaagatggctgtagctgccgatttccagaagaagaagaaggaggatgtgaactgagagtgaagttcagcagaagcgccgacgcccctgcctaccagcagggacagaaccaactgtacaacgagctgaacctgggcagacgggaagagtacgacgtgctggacaagcggagaggcagggaccctgagatgggcggaaagccccagcggagaaagaacccccaggaaggactgtataacgaactccagaaagacaagatggccgaagcctacagcgagatcggcatgaagggcgagcggagaagaggcaagggccacgatggcctgtaccagggcctgagcaccgccaccaaggacacctatgacgccctgcacatgcaggccctgcctccaagaagggccaagcgatctggatctggagcaacaaacttctcactactcaaacaagcaggtgacgtggaggagaatcccgggcctactagtatggactggatttggcgcatccttttccttgtcggcgctgctaccggcgcgcattccttcgaacaagttcagcttcaacagcctggcgctgagctggtcaaacctggcgcttctgtgaagatgagctgcaaagccagcggctacgccttcagcagctactggatcaactggatgaagcagaaacccggccagggactcgaatggatcggccaaatctatcccggcgacggcgacaccaactacaacggcaagttcaagggcagagccacactgaccgccgatacctctagcagcacagcctacatgcagctgagcagcctgaccagcgaagatagcgccgtgtacttctgtgcccggtccatcacaacagtcgtgggctgcgctatggactattggggccagggaacaagcgtgaccgtgtctagtacgcgtgagcagaaactgatctcggaagaggatctggggagcggcatccagaaccctgatcctgccgtgtaccagctgcgggatagcaagagcagcgacaagagcgtgtgtctgttcaccgacttcgacagccagaccaacgtgtcccagagcaaggactccgacgtgtacatcaccgataagaccgtgctggacatgcggagcatggacttcaagagcaactccgccgtggcctggtccaacaagtccgatttcgcctgcgccaacgccttcaacaacagcattatccccgaggacacattcttcccaagccccgagagcagctgcggtacccagagttttgggttgttggaccctaaattgtgctatctgttggacggaatcctgttcatttacggagtgatcctgaccgcattgttcctgaagagaggccggaagaagctgctgtacatcttcaagcagcctttcatgcggcccgtgcagaccacccaggaagaggacggctgctcctgccggttccccgaggaagaagaaggcggctgcgagctgcgggttaagttttccagatccgcagacgcacccgcttaccaacaagggcagaaccaactctacaatgaacttaatttggggcggagggaagagtacgacgttctggacaaaaggaggggacgagatcccgagatgggcggaaagcctcagcgaaggaagaatccgcaagaggggctttataacgaactccagaaagataaaatggcagaagcctatagtgagattgggatgaagggagaaaggaggaggggtaaaggtcacgatgggttgtaccaaggattgagcacagccactaaagatacctatgatgcgctccacatgcaggccctgccgccaaga

SEQ ID NO: 5496 - DNA, 2907 bp, Artificial Sequence
  Synthetic Polynucloetide
atggccttaccagtgaccgccttgctcctgccgctggccttgctgctccacgccgccaggccggaagtgcaactggtggaatctggagggggaagcgtgcaggcaggcggatctctgagactgtcctgcaccacatctggcagagccctgaatatgtacgtgatgggatggtttcggcaggctcccggcaacgagcgggaatttgtggccgctacaagcagcagcggcggcagcacaagctaccccgattctgtgaagggcagattcacaatctcccgcgataatgccaagaatactgtgtacctgcagatgaatagtctgaagcctgaagatacagccgcctacagatgtgccgccagcccctacgtgtccacccccaccatgaacatcctggaagagtacagatactggggcctgggaacacaagtgacagtgtccagcggtaccggcggaggcggatctggcggcggaggtagcggtggcggaggatctgaattcgacatccagatgacacagagccctagcagcctgtctgccagcgtgggagacagagtgaccatcacatgcaaggccagcgaccacatcaacaactggctggcctggtatcagcagaagcctggacaggcccctaagctgctgatctacggcgctaccacactggaaacaggcgtgcccagcagattttctggcagcggctctggcaccgactacaccctgacaatatccagcctccagcctgaggacttcgccacctactactgtcagcagagctggaacaccccttggacattcggccagggcaccaagctggaaatcaagagactcgagcagagcttcggcctgctggaccccaagctgtgctacctgctggatggcatcctgttcatctacggcgtgatcctgaccgccctgttcctgagagtgaagttcagcagaagcgccgacgcccctgcctaccagcagggacagaaccaactgtacaacgagctgaacctgggcagacgggaagagtacgacgtgctggacaagcggagaggcagggaccctgagatgggcggaaagccccagcggagaaagaacccccaggaaggactgtataacgaactccagaaagacaagatggccgaagcctacagcgagatcggcatgaagggcgagcggagaagaggcaagggccacgatggcctgtaccagggcctgagcaccgccaccaaggacacctatgacgccctgcacatgcaggccctgcctccaagaagggccaagcgatctggatctggagcaacaaacttctcactactcaaacaagcaggtgacgtggaggagaatcccgggcctactagtatggactggatttggcgcatccttttccttgtcggcgctgctaccggcgcgcattccttcgaacaagttcagcttcaacagcctggcgctgagctggtcaaacctggcgcttctgtgaagatgagctgcaaagccagcggctacgccttcagcagctactggatcaactggatgaagcagaaacccggccagggactcgaatggatcggccaaatctatcccggcgacggcgacaccaactacaacggcaagttcaagggcagagccacactgaccgccgatacctctagcagcacagcctacatgcagctgagcagcctgaccagcgaagatagcgccgtgtacttctgtgcccggtccatcacaacagtcgtgggctgcgctatggactattggggccagggaacaagcgtgaccgtgtctagtacgcgtcagagttttgggttgttggaccctaaattgtgctatctgttggacggaatcctgttcatttacggagtgatcctgaccgcattgttcctgcgggttaagttttccagatccgcagacgcacccgcttaccaacaagggcagaaccaactctacaatgaacttaatttggggcggagggaagagtacgacgttctggacaaaaggaggggacgagatcccgagatgggcggaaagcctcagcgaaggaagaatccgcaagaggggctttataacgaactccagaaagataaaatggcagaagcctatagtgagattgggatgaagggagaaaggaggaggggtaaaggtcacgatgggttgtaccaaggattgagcacagccactaaagatacctatgatgcgctccacatgcaggccctgccgccaagacgcgccaagagaagcggatctggcgtgaagcagaccctgaatttcgacctgctgaagctggctggcgacgtggaatccaacccaggcccttctagaggccatatgaccgagtacaagcccacggtgcgcctcgccacccgcgacgacgtccccagggccgtacgcaccctcgccgccgcgttcgccgactaccccgccacgcgccacaccgtcgatccggaccgccacatcgagcgggtcaccgagctgcaagaactcttcctcacgcgcgtcgggctcgacatcggcaaggtgtgggtcgcggacgacggcgccgcggtggcggtctggaccacgccggagagcgtcgaagcgggggcggtgttcgccgagatcggcccgcgcatggccgagttgagcggttcccggctggccgcgcagcaacagatggaaggcctcctggcgccgcaccggcccaaggagcccgcgtggttcctggccaccgtcggcgtctcgcccgaccaccagggcaagggtctgggcagcgccgtcgtgctccccggagtggaggcggccgagcgcgccggggtgcccgccttcctggagacctccgcgccccgcaacctccccttctacgagcggctcggcttcaccgtcaccgccgacgtcgaggtgcccgaaggaccgcgcacctggtgcatgacccgcaagcccggtgcctga

SEQ ID NO: 5497 - DNA, 2379 bp, Artificial Sequence
  Synthetic Polynucloetide
atggccttaccagtgaccgccttgctcctgccgctggccttgctgctccacgccgccaggccggaagtgcaactggtggaatctggagggggaagcgtgcaggcaggcggatctctgagactgtcctgcaccacatctggcagagccctgaatatgtacgtgatgggatggtttcggcaggctcccggcaacgagcgggaatttgtggccgctacaagcagcagcggcggcagcacaagctaccccgattctgtgaagggcagattcacaatctcccgcgataatgccaagaatactgtgtacctgcagatgaatagtctgaagcctgaagatacagccgcctacagatgtgccgccagcccctacgtgtccacccccaccatgaacatcctggaagagtacagatactggggcctgggaacacaagtgacagtgtccagcggtaccggcggaggcggatctggcggcggaggtagcggtggcggaggatctgaattcgacatccagatgacacagagccctagcagcctgtctgccagcgtgggagacagagtgaccatcacatgcaaggccagcgaccacatcaacaactggctggcctggtatcagcagaagcctggacaggcccctaagctgctgatctacggcgctaccacactggaaacaggcgtgcccagcagattttctggcagcggctctggcaccgactacaccctgacaatatccagcctccagcctgaggacttcgccacctactactgtcagcagagctggaacaccccttggacattcggccagggcaccaagctggaaatcaagagactcgagggacagcctaaggccaatcctaccgtgacactgttccctccaagcagcgaagaactccaggccaacaaggccacacttgtgtgcctgatctccgacttctaccctggggctgtgacagtggcttggaaggccgatggatctcctgtgaaagccggcgtggaaaccaccaagccatccaagcagagcaacaacaaatacgccgccagctcctacctgagcctgacacctgagcagtggaagtcccacagatcctacagctgccaagtgacccacgaaggcagcaccgtggaaaagacagtggcccctacagagtgcagccccatcaagaccgatgtgattacaatggaccccaaggacaactgctccaaggacgccaacgataccctgctgctccagctgaccaacaccagcgcctactacatgtacttgttgctgctgctgaagtccgtggtgtacttcgccatcatcacatgctgcctgctgcggagaaccgccttctgctgcaacggcgagaagtctagggccaagcgatctggatctggagcaacaaacttctcactactcaaacaagcaggtgacgtggaggagaatcccgggcctactagtatggactggatttggcgcatccttttccttgtcggcgctgctaccggcgcgcattccttcgaacaagttcagcttcaacagcctggcgctgagctggtcaaacctggcgcttctgtgaagatgagctgcaaagccagcggctacgccttcagcagctactggatcaactggatgaagcagaaacccggccagggactcgaatggatcggccaaatctatcccggcgacggcgacaccaactacaacggcaagttcaagggcagagccacactgaccgccgatacctctagcagcacagcctacatgcagctgagcagcctgaccagcgaagatagcgccgtgtacttctgtgcccggtccatcacaacagtcgtgggctgcgctatggactattggggccagggaacaagcgtgaccgtgtctagtacgcgtgcctctacaaagggaccctccgtgtttcctctggctcccagcagcaagtctacaagcggaggaacagccgctctgggctgcctggtcaaggattactttcccgagcctgtgaccgtgtcctggaatagcggagcactgacaagcggcgtgcacacctttccagccgtgctgcaaagcagcggcctgtactctctgagcagcgtggtcacagtgcctagctctagcctgggcacccagacctacatctgcaatgtgaaccacaagcctagcaacaccaaggtggacaagagagtggaacccaagagctgtgaagtgaaaaccgactccaccgaccacgtgaagcccaaagagacagagaacaccaagcagcccagcaagagctgccacaagcccaaggccatcgtgcacaccgagaaagtgaacatgatgagcctgaccgtgctgggcctgcggatgctgttcgccaaaaccgtggccgtgaacttcctgctgaccgccaagctgttcttcctc

SEQ ID NO: 5498 - DNA, 2313 bp, Artificial Sequence
  Synthetic Polynucloetide
atggccttaccagtgaccgccttgctcctgccgctggccttgctgctccacgccgccaggccggaagtgcaactggtggaatctggagggggaagcgtgcaggcaggcggatctctgagactgtcctgcaccacatctggcagagccctgaatatgtacgtgatgggatggtttcggcaggctcccggcaacgagcgggaatttgtggccgctacaagcagcagcggcggcagcacaagctaccccgattctgtgaagggcagattcacaatctcccgcgataatgccaagaatactgtgtacctgcagatgaatagtctgaagcctgaagatacagccgcctacagatgtgccgccagcccctacgtgtccacccccaccatgaacatcctggaagagtacagatactggggcctgggaacacaagtgacagtgtccagcggtaccggcggaggcggatctggcggcggaggtagcggtggcggaggatctgaattcgacatccagatgacacagagccctagcagcctgtctgccagcgtgggagacagagtgaccatcacatgcaaggccagcgaccacatcaacaactggctggcctggtatcagcagaagcctggacaggcccctaagctgctgatctacggcgctaccacactggaaacaggcgtgcccagcagattttctggcagcggctctggcaccgactacaccctgacaatatccagcctccagcctgaggacttcgccacctactactgtcagcagagctggaacaccccttggacattcggccagggcaccaagctggaaatcaagagactcgagggacagcctaaggccaatcctaccgtgacactgttccctccaagcagcgaagaactccaggccaacaaggccacacttgtgtgcctgatctccgacttctaccctggggctgtgacagtggcttggaaggccgatggatctcctgtgaaagccggcgtggaaaccaccaagccatccaagcagagcaacaacaaatacgccgccagctcctacctgagcctgacacctgagcagtggaagtcccacagatcctacagctgccaagtgacccacgaaggcagcaccgtggaaaagacagtggcccctacagagtgcagcggcagagccgattgcggcatcaccagcgccagctaccaccagggcgtgctgagcgccaccatcctgtacgagatcctgctgggcaaggccaccctgtacgccgtgctggtgtctgccctggtgctgatggctatggtcaagcggaaggacagccggggaagggccaagcgatctggatctggagcaacaaacttctcactactcaaacaagcaggtgacgtggaggagaatcccgggcctactagtatggactggatttggcgcatccttttccttgtcggcgctgctaccggcgcgcattccttcgaacaagttcagcttcaacagcctggcgctgagctggtcaaacctggcgcttctgtgaagatgagctgcaaagccagcggctacgccttcagcagctactggatcaactggatgaagcagaaacccggccagggactcgaatggatcggccaaatctatcccggcgacggcgacaccaactacaacggcaagttcaagggcagagccacactgaccgccgatacctctagcagcacagcctacatgcagctgagcagcctgaccagcgaagatagcgccgtgtacttctgtgcccggtccatcacaacagtcgtgggctgcgctatggactattggggccagggaacaagcgtgaccgtgtctagtacgcgtgcctctacaaagggaccctccgtgtttcctctggctcccagcagcaagtctacaagcggaggaacagccgctctgggctgcctggtcaaggattactttcccgagcctgtgaccgtgtcctggaatagcggagcactgacaagcggcgtgcacacctttccagccgtgctgcaaagcagcggcctgtactctctgagcagcgtggtcacagtgcctagctctagcctgggcacccagacctacatctgcaatgtgaaccacaagcctagcaacaccaaggtggacaagagagtggaacccaagagctgtatccccgaggacacattcttcccaagcagcgacgtgccctgcgacgtgaagctggtggaaaagagcttcgagacagacaccaacctgaacttccagaacctgagcgtgatcggcttcagaatcctgctgctgaaagtggccggctttaacctgctgatgaccctgcggctgtggtccagc

SEQ ID NO: 5499 - DNA, 2313 bp, Artificial Sequence
  Synthetic Polynucloetide
atggccttaccagtgaccgccttgctcctgccgctggccttgctgctccacgccgccaggccggaagtgcaactggtggaatctggagggggaagcgtgcaggcaggcggatctctgagactgtcctgcaccacatctggcagagccctgaatatgtacgtgatgggatggtttcggcaggctcccggcaacgagcgggaatttgtggccgctacaagcagcagcggcggcagcacaagctaccccgattctgtgaagggcagattcacaatctcccgcgataatgccaagaatactgtgtacctgcagatgaatagtctgaagcctgaagatacagccgcctacagatgtgccgccagcccctacgtgtccacccccaccatgaacatcctggaagagtacagatactggggcctgggaacacaagtgacagtgtccagcggtaccggcggaggcggatctggcggcggaggtagcggtggcggaggatctgaattcgacatccagatgacacagagccctagcagcctgtctgccagcgtgggagacagagtgaccatcacatgcaaggccagcgaccacatcaacaactggctggcctggtatcagcagaagcctggacaggcccctaagctgctgatctacggcgctaccacactggaaacaggcgtgcccagcagattttctggcagcggctctggcaccgactacaccctgacaatatccagcctccagcctgaggacttcgccacctactactgtcagcagagctggaacaccccttggacattcggccagggcaccaagctggaaatcaagagactcgagggacagcctaaggccaatcctaccgtgacactgttccctccaagcagcgaagaactccaggccaacaaggccacacttgtgtgcctgatctccgacttctaccctggggctgtgacagtggcttggaaggccgatggatctcctgtgaaagccggcgtggaaaccaccaagccatccaagcagagcaacaacaaatacgccgccagctcctacctgagcctgacacctgagcagtggaagtcccacagatcctacagctgccaagtgacccacgaaggcagcaccgtggaaaagacagtggcccctacagagtgcagcggcagagccgattgcggctttaccagcgagagctaccagcagggcgtgctgagcgccaccatcctgtacgagatcctgctgggcaaggccaccctgtacgccgtgctggtgtctgccctggtgctgatggctatggtcaagcggaaggacagccggggaagggccaagcgatctggatctggagcaacaaacttctcactactcaaacaagcaggtgacgtggaggagaatcccgggcctactagtatggactggatttggcgcatccttttccttgtcggcgctgctaccggcgcgcattccttcgaacaagttcagcttcaacagcctggcgctgagctggtcaaacctggcgcttctgtgaagatgagctgcaaagccagcggctacgccttcagcagctactggatcaactggatgaagcagaaacccggccagggactcgaatggatcggccaaatctatcccggcgacggcgacaccaactacaacggcaagttcaagggcagagccacactgaccgccgatacctctagcagcacagcctacatgcagctgagcagcctgaccagcgaagatagcgccgtgtacttctgtgcccggtccatcacaacagtcgtgggctgcgctatggactattggggccagggaacaagcgtgaccgtgtctagtacgcgtgcctctacaaagggaccctccgtgtttcctctggctcccagcagcaagtctacaagcggaggaacagccgctctgggctgcctggtcaaggattactttcccgagcctgtgaccgtgtcctggaatagcggagcactgacaagcggcgtgcacacctttccagccgtgctgcaaagcagcggcctgtactctctgagcagcgtggtcacagtgcctagctctagcctgggcacccagacctacatctgcaatgtgaaccacaagcctagcaacaccaaggtggacaagagagtggaacccaagagctgtatccccgaggacacattcttcccaagccccgagagcagctgcgacgtgaagctggtggaaaagagcttcgagacagacaccaacctgaacttccagaacctgagcgtgatcggcttcagaatcctgctgctgaaagtggccggctttaacctgctgatgaccctgcggctgtggtccagc

SEQ ID NO: 5500 - DNA, 1791 bp, Artificial Sequence
  Synthetic Polynucloetide
atggccttaccagtgaccgccttgctcctgccgctggccttgctgctccacgccgccaggccggaagtgcaactggtggaatctggagggggaagcgtgcaggcaggcggatctctgagactgtcctgcaccacatctggcagagccctgaatatgtacgtgatgggatggtttcggcaggctcccggcaacgagcgggaatttgtggccgctacaagcagcagcggcggcagcacaagctaccccgattctgtgaagggcagattcacaatctcccgcgataatgccaagaatactgtgtacctgcagatgaatagtctgaagcctgaagatacagccgcctacagatgtgccgccagcccctacgtgtccacccccaccatgaacatcctggaagagtacagatactggggcctgggaacacaagtgacagtgtccagcggtaccggcggaggcggatctggcggcggaggtagcggtggcggaggatctgaattcgacatccagatgacacagagccctagcagcctgtctgccagcgtgggagacagagtgaccatcacatgcaaggccagcgaccacatcaacaactggctggcctggtatcagcagaagcctggacaggcccctaagctgctgatctacggcgctaccacactggaaacaggcgtgcccagcagattttctggcagcggctctggcaccgactacaccctgacaatatccagcctccagcctgaggacttcgccacctactactgtcagcagagctggaacaccccttggacattcggccagggcaccaagctggaaatcaagagaggcggaggcggaagtggaggcggaggatctggcggcggaggctctcaagttcagcttcaacagcctggcgctgagctggtcaaacctggcgcttctgtgaagatgagctgcaaagccagcggctacgccttcagcagctactggatcaactggatgaagcagaaacccggccagggactcgaatggatcggccaaatctatcccggcgacggcgacaccaactacaacggcaagttcaagggcagagccacactgaccgccgatacctctagcagcacagcctacatgcagctgagcagcctgaccagcgaagatagcgccgtgtacttctgtgcccggtccatcacaacagtcgtgggctgcgctatggactattggggccagggaacaagcgtgaccgtgtctagtacgcgtgacggtaacgaggagatgggaggaatcactcaaaccccttacaaagtctcaatttcaggaacaactgttatccttacatgtccccagtatcctggcagcgagatcctttggcagcataacgacaagaatatagggggagatgaagacgataagaatatcggatctgacgaggatcacttgagcctgaaagagttctccgagcttgaacaaagcggatattatgtgtgctatccgcgcgggtcaaagccggaagacgctaacttttacctttatctccgagccagagtgtgcgaaaattgcatggaaatggacgttatgtccgttgctacaatagttatcgtagatatatgcatcacgggtggactgcttctgctggtttattattggtccaagaatagaaaggccaaagctaaacccgtgaccagaggcgctggcgcaggcggaaggcaaaggggacaaaacaaagaacggccaccaccagtgccaaatccagattatgagcctattcggaaaggacagagggacctgtactctggcctgaatcagagaagaatc

SEQ ID NO: 5501 - DNA, 1686 bp, Artificial Sequence
  Synthetic Polynucloetide
atggccttaccagtgaccgccttgctcctgccgctggccttgctgctccacgccgccaggccggaagtgcaactggtggaatctggagggggaagcgtgcaggcaggcggatctctgagactgtcctgcaccacatctggcagagccctgaatatgtacgtgatgggatggtttcggcaggctcccggcaacgagcgggaatttgtggccgctacaagcagcagcggcggcagcacaagctaccccgattctgtgaagggcagattcacaatctcccgcgataatgccaagaatactgtgtacctgcagatgaatagtctgaagcctgaagatacagccgcctacagatgtgccgccagcccctacgtgtccacccccaccatgaacatcctggaagagtacagatactggggcctgggaacacaagtgacagtgtccagcggtaccggcggaggcggatctggcggcggaggtagcggtggcggaggatctgaattcgacatccagatgacacagagccctagcagcctgtctgccagcgtgggagacagagtgaccatcacatgcaaggccagcgaccacatcaacaactggctggcctggtatcagcagaagcctggacaggcccctaagctgctgatctacggcgctaccacactggaaacaggcgtgcccagcagattttctggcagcggctctggcaccgactacaccctgacaatatccagcctccagcctgaggacttcgccacctactactgtcagcagagctggaacaccccttggacattcggccagggcaccaagctggaaatcaagagaggcggaggcggaagtggaggcggaggatctggcggcggaggctctcaagttcagcttcaacagcctggcgctgagctggtcaaacctggcgcttctgtgaagatgagctgcaaagccagcggctacgccttcagcagctactggatcaactggatgaagcagaaacccggccagggactcgaatggatcggccaaatctatcccggcgacggcgacaccaactacaacggcaagttcaagggcagagccacactgaccgccgatacctctagcagcacagcctacatgcagctgagcagcctgaccagcgaagatagcgccgtgtacttctgtgcccggtccatcacaacagtcgtgggctgcgctatggactattggggccagggaacaagcgtgaccgtgtctagtacgcgtttcaagatccccatcgaggaactggaagatcgggtgttcgtgaactgcaacacctctatcacctgggtggaaggcaccgtgggaacactgctgagcgacatcaccagactggacctcggcaagcggattctggaccctcggggcatctacagatgcaacggcaccgacatctacaaggacaaagaaagcaccgtgcaggtccactacagaatgtgccagtcctgcgtggaactggaccctgctacagtggccggcatcatcgtgaccgatgtgatcgctactctgctgctggctctgggagtgttctgcttcgccggacacgaaacaggcagactgtctggcgctgccgatacacaggccctgctgagaaacgaccaagtgtatcagcccctgcgcgacagagatgatgcccagtattctcacctcggcggcaactgggctagaaacaag

SEQ ID NO: 5502 - DNA, 1716 bp, Artificial Sequence
  Synthetic Polynucloetide
atggccttaccagtgaccgccttgctcctgccgctggccttgctgctccacgccgccaggccggaagtgcaactggtggaatctggagggggaagcgtgcaggcaggcggatctctgagactgtcctgcaccacatctggcagagccctgaatatgtacgtgatgggatggtttcggcaggctcccggcaacgagcgggaatttgtggccgctacaagcagcagcggcggcagcacaagctaccccgattctgtgaagggcagattcacaatctcccgcgataatgccaagaatactgtgtacctgcagatgaatagtctgaagcctgaagatacagccgcctacagatgtgccgccagcccctacgtgtccacccccaccatgaacatcctggaagagtacagatactggggcctgggaacacaagtgacagtgtccagcggtaccggcggaggcggatctggcggcggaggtagcggtggcggaggatctgaattcgacatccagatgacacagagccctagcagcctgtctgccagcgtgggagacagagtgaccatcacatgcaaggccagcgaccacatcaacaactggctggcctggtatcagcagaagcctggacaggcccctaagctgctgatctacggcgctaccacactggaaacaggcgtgcccagcagattttctggcagcggctctggcaccgactacaccctgacaatatccagcctccagcctgaggacttcgccacctactactgtcagcagagctggaacaccccttggacattcggccagggcaccaagctggaaatcaagagaggcggaggcggaagtggaggcggaggatctggcggcggaggctctcaagttcagcttcaacagcctggcgctgagctggtcaaacctggcgcttctgtgaagatgagctgcaaagccagcggctacgccttcagcagctactggatcaactggatgaagcagaaacccggccagggactcgaatggatcggccaaatctatcccggcgacggcgacaccaactacaacggcaagttcaagggcagagccacactgaccgccgatacctctagcagcacagcctacatgcagctgagcagcctgaccagcgaagatagcgccgtgtacttctgtgcccggtccatcacaacagtcgtgggctgcgctatggactattggggccagggaacaagcgtgaccgtgtctagtacgcgtcagagcatcaagggcaaccacctggtcaaggtgtacgactaccaagaggacggcagcgtgctgctgacatgtgatgccgaggccaagaacatcacctggtttaaggacggcaagatgatcggcttcctgaccgaggacaagaagaagtggaacctgggcagcaacgctaaggaccccagaggcatgtatcagtgcaagggcagccagaacaagagcaagcccctccaggtgtactaccggatgtgccagaactgcatcgagctgaacgccgctaccatcagcggctttctgttcgccgagatcgtgtccatcttcgtgctggccgtgggcgtgtactttatcgctggacaggatggcgtgcggcagagcagagcttccgataagcaaaccctgctgcctaacgaccagctgtaccagcctctgaaggacagagaggacgaccagtacagccacctccagggcaatcagctgagaagaaac

SEQ ID NO: 5503 - DNA, 1665 bp, Artificial Sequence
  Synthetic Polynucloetide
atggccttaccagtgaccgccttgctcctgccgctggccttgctgctccacgccgccaggccggaagtgcaactggtggaatctggagggggaagcgtgcaggcaggcggatctctgagactgtcctgcaccacatctggcagagccctgaatatgtacgtgatgggatggtttcggcaggctcccggcaacgagcgggaatttgtggccgctacaagcagcagcggcggcagcacaagctaccccgattctgtgaagggcagattcacaatctcccgcgataatgccaagaatactgtgtacctgcagatgaatagtctgaagcctgaagatacagccgcctacagatgtgccgccagcccctacgtgtccacccccaccatgaacatcctggaagagtacagatactggggcctgggaacacaagtgacagtgtccagcggtaccggcggaggcggatctggcggcggaggtagcggtggcggaggatctgaattcgacatccagatgacacagagccctagcagcctgtctgccagcgtgggagacagagtgaccatcacatgcaaggccagcgaccacatcaacaactggctggcctggtatcagcagaagcctggacaggcccctaagctgctgatctacggcgctaccacactggaaacaggcgtgcccagcagattttctggcagcggctctggcaccgactacaccctgacaatatccagcctccagcctgaggacttcgccacctactactgtcagcagagctggaacaccccttggacattcggccagggcaccaagctggaaatcaagagaggcggaggcggaagtggaggcggaggatctggcggcggaggctctcaagttcagcttcaacagcctggcgctgagctggtcaaacctggcgcttctgtgaagatgagctgcaaagccagcggctacgccttcagcagctactggatcaactggatgaagcagaaacccggccagggactcgaatggatcggccaaatctatcccggcgacggcgacaccaactacaacggcaagttcaagggcagagccacactgaccgccgatacctctagcagcacagcctacatgcagctgagcagcctgaccagcgaagatagcgccgtgtacttctgtgcccggtccatcacaacagtcgtgggctgcgctatggactattggggccagggaacaagcgtgaccgtgtctagtacgcgtcagagttttgggttgttggaccctaaattgtgctatctgttggacggaatcctgttcatttacggagtgatcctgaccgcattgttcctgcgggttaagttttccagatccgcagacgcacccgcttaccaacaagggcagaaccaactctacaatgaacttaatttggggcggagggaagagtacgacgttctggacaaaaggaggggacgagatcccgagatgggcggaaagcctcagcgaaggaagaatccgcaagaggggctttataacgaactccagaaagataaaatggcagaagcctatagtgagattgggatgaagggagaaaggaggaggggtaaaggtcacgatgggttgtaccaaggattgagcacagccactaaagatacctatgatgcgctccacatgcaggccctgccgccaaga

SEQ ID NO: 5504 - DNA, 2367 bp, Artificial Sequence
  Synthetic Polynucloetide
atggccttaccagtgaccgccttgctcctgccgctggccttgctgctccacgccgccaggccggaagtgcaactggtggaatctggagggggaagcgtgcaggcaggcggatctctgagactgtcctgcaccacatctggcagagccctgaatatgtacgtgatgggatggtttcggcaggctcccggcaacgagcgggaatttgtggccgctacaagcagcagcggcggcagcacaagctaccccgattctgtgaagggcagattcacaatctcccgcgataatgccaagaatactgtgtacctgcagatgaatagtctgaagcctgaagatacagccgcctacagatgtgccgccagcccctacgtgtccacccccaccatgaacatcctggaagagtacagatactggggcctgggaacacaagtgacagtgtccagcggtaccggcggaggcggatctggcggcggaggtagcggtggcggaggatctgaattcgacatccagatgacacagagccctagcagcctgtctgccagcgtgggagacagagtgaccatcacatgcaaggccagcgaccacatcaacaactggctggcctggtatcagcagaagcctggacaggcccctaagctgctgatctacggcgctaccacactggaaacaggcgtgcccagcagattttctggcagcggctctggcaccgactacaccctgacaatatccagcctccagcctgaggacttcgccacctactactgtcagcagagctggaacaccccttggacattcggccagggcaccaagctggaaatcaagagaggcggaggcggaagtggaggcggaggatctggcggcggaggctctcaagttcagcttcaacagcctggcgctgagctggtcaaacctggcgcttctgtgaagatgagctgcaaagccagcggctacgccttcagcagctactggatcaactggatgaagcagaaacccggccagggactcgaatggatcggccaaatctatcccggcgacggcgacaccaactacaacggcaagttcaagggcagagccacactgaccgccgatacctctagcagcacagcctacatgcagctgagcagcctgaccagcgaagatagcgccgtgtacttctgtgcccggtccatcacaacagtcgtgggctgcgctatggactattggggccagggaacaagcgtgaccgtgtctagtacgcgtgggagcggcatccagaaccctgatcctgccgtgtaccagctgcgggatagcaagagcagcgacaagagcgtgtgtctgttcaccgacttcgacagccagaccaacgtgtcccagagcaaggactccgacgtgtacatcaccgataagaccgtgctggacatgcggagcatggacttcaagagcaactccgccgtggcctggtccaacaagtccgatttcgcctgcgccaacgccttcaacaacagcattatccccgaggacacattcttcccaagccccgagagcagctgcgacgtgaagctggtggaaaagagcttcgagacagacaccaacctgaacttccagaacctgagcgtgatcggcttcagaatcctgctgctgaaagtggccggctttaacctgctgatgaccctgcggctgtggtccagccgcgccaagagaagcggatctggcgtgaagcagaccctgaatttcgacctgctgaagctggctggcgacgtggaatccaacccaggcccttctagaggccatatgaccgagtacaagcccacggtgcgcctcgccacccgcgacgacgtccccagggccgtacgcaccctcgccgccgcgttcgccgactaccccgccacgcgccacaccgtcgatccggaccgccacatcgagcgggtcaccgagctgcaagaactcttcctcacgcgcgtcgggctcgacatcggcaaggtgtgggtcgcggacgacggcgccgcggtggcggtctggaccacgccggagagcgtcgaagcgggggcggtgttcgccgagatcggcccgcgcatggccgagttgagcggttcccggctggccgcgcagcaacagatggaaggcctcctggcgccgcaccggcccaaggagcccgcgtggttcctggccaccgtcggcgtctcgcccgaccaccagggcaagggtctgggcagcgccgtcgtgctccccggagtggaggcggccgagcgcgccggggtgcccgccttcctggagacctccgcgccccgcaacctccccttctacgagcggctcggcttcaccgtcaccgccgacgtcgaggtgcccgaaggaccgcgcacctggtgcatgacccgcaagcccggtgcctga

SEQ ID NO: 5505 - DNA, 2463 bp, Artificial Sequence
  Synthetic Polynucloetide
atggccttaccagtgaccgccttgctcctgccgctggccttgctgctccacgccgccaggccggaagtgcaactggtggaatctggagggggaagcgtgcaggcaggcggatctctgagactgtcctgcaccacatctggcagagccctgaatatgtacgtgatgggatggtttcggcaggctcccggcaacgagcgggaatttgtggccgctacaagcagcagcggcggcagcacaagctaccccgattctgtgaagggcagattcacaatctcccgcgataatgccaagaatactgtgtacctgcagatgaatagtctgaagcctgaagatacagccgcctacagatgtgccgccagcccctacgtgtccacccccaccatgaacatcctggaagagtacagatactggggcctgggaacacaagtgacagtgtccagcggtaccggcggaggcggatctggcggcggaggtagcggtggcggaggatctgaattcgacatccagatgacacagagccctagcagcctgtctgccagcgtgggagacagagtgaccatcacatgcaaggccagcgaccacatcaacaactggctggcctggtatcagcagaagcctggacaggcccctaagctgctgatctacggcgctaccacactggaaacaggcgtgcccagcagattttctggcagcggctctggcaccgactacaccctgacaatatccagcctccagcctgaggacttcgccacctactactgtcagcagagctggaacaccccttggacattcggccagggcaccaagctggaaatcaagagaggcggaggcggaagtggaggcggaggatctggcggcggaggctctcaagttcagcttcaacagcctggcgctgagctggtcaaacctggcgcttctgtgaagatgagctgcaaagccagcggctacgccttcagcagctactggatcaactggatgaagcagaaacccggccagggactcgaatggatcggccaaatctatcccggcgacggcgacaccaactacaacggcaagttcaagggcagagccacactgaccgccgatacctctagcagcacagcctacatgcagctgagcagcctgaccagcgaagatagcgccgtgtacttctgtgcccggtccatcacaacagtcgtgggctgcgctatggactattggggccagggaacaagcgtgaccgtgtctagtctcgaggacctgaagaacgtgttcccacctgaggtggccgtgttcgagcctagcgaggccgagatcagccacacccagaaagccaccctcgtgtgcctggctaccggcttctaccccgaccatgtggaactgtcttggtgggtcaacggcaaagaggtgcacagcggcgtgtctaccgacccccagccactgaaagaacagcccgccctgaacgacagccggtactgcctgagcagcagactgagagtgtccgccaccttctggcagaacccccggaaccacttcagatgccaggtgcagttctacggcctgagcgagaacgacgagtggacccaggacagagccaagcccgtgacccagatcgtgtctgccgaagcctggggcagagccgattgcggctttaccagcgagagctaccagcagggcgtgctgagcgccaccatcctgtacgagatcctgctgggcaaggccaccctgtacgccgtgctggtgtctgccctggtgctgatggctatggtcaagcggaaggacagccggggaagggccaagcgatctggatctggagcaacaaacttctcactactcaaacaagcaggtgacgtggaggagaatcccgggcctactagaggccatatgaccgagtacaagcccacggtgcgcctcgccacccgcgacgacgtccccagggccgtacgcaccctcgccgccgcgttcgccgactaccccgccacgcgccacaccgtcgatccggaccgccacatcgagcgggtcaccgagctgcaagaactcttcctcacgcgcgtcgggctcgacatcggcaaggtgtgggtcgcggacgacggcgccgcggtggcggtctggaccacgccggagagcgtcgaagcgggggcggtgttcgccgagatcggcccgcgcatggccgagttgagcggttcccggctggccgcgcagcaacagatggaaggcctcctggcgccgcaccggcccaaggagcccgcgtggttcctggccaccgtcggcgtctcgcccgaccaccagggcaagggtctgggcagcgccgtcgtgctccccggagtggaggcggccgagcgcgccggggtgcccgccttcctggagacctccgcgccccgcaacctccccttctacgagcggctcggcttcaccgtcaccgccgacgtcgaggtgcccgaaggaccgcgcacctggtgcatgacccgcaagcccggtgcctga

SEQ ID NO: 5506 - DNA, 2613 bp, Artificial Sequence
  Synthetic Polynucloetide
atggccttaccagtgaccgccttgctcctgccgctggccttgctgctccacgccgccaggccggaagtgcaactggtggaatctggagggggaagcgtgcaggcaggcggatctctgagactgtcctgcaccacatctggcagagccctgaatatgtacgtgatgggatggtttcggcaggctcccggcaacgagcgggaatttgtggccgctacaagcagcagcggcggcagcacaagctaccccgattctgtgaagggcagattcacaatctcccgcgataatgccaagaatactgtgtacctgcagatgaatagtctgaagcctgaagatacagccgcctacagatgtgccgccagcccctacgtgtccacccccaccatgaacatcctggaagagtacagatactggggcctgggaacacaagtgacagtgtccagcggtaccggcggaggcggatctggcggcggaggtagcggtggcggaggatctgaattcgacatccagatgacacagagccctagcagcctgtctgccagcgtgggagacagagtgaccatcacatgcaaggccagcgaccacatcaacaactggctggcctggtatcagcagaagcctggacaggcccctaagctgctgatctacggcgctaccacactggaaacaggcgtgcccagcagattttctggcagcggctctggcaccgactacaccctgacaatatccagcctccagcctgaggacttcgccacctactactgtcagcagagctggaacaccccttggacattcggccagggcaccaagctggaaatcaagagaggcggaggcggaagtggaggcggaggatctggcggcggaggctctcaagttcagcttcaacagcctggcgctgagctggtcaaacctggcgcttctgtgaagatgagctgcaaagccagcggctacgccttcagcagctactggatcaactggatgaagcagaaacccggccagggactcgaatggatcggccaaatctatcccggcgacggcgacaccaactacaacggcaagttcaagggcagagccacactgaccgccgatacctctagcagcacagcctacatgcagctgagcagcctgaccagcgaagatagcgccgtgtacttctgtgcccggtccatcacaacagtcgtgggctgcgctatggactattggggccagggaacaagcgtgaccgtgtctagtacgcgtgagcagaaactgatctcggaagaggatctggggagcggcaccccattcccttctctggcccctcccatcatgctgctggtggacggcaagcagcagatggtggtcgtgtgcctggtgctggatgtggccccacctggactggacagccccatctggtttagcgccggcaatggctctgccctggacgcctttacctacggcccaagccctgccaccgatggcacctggacaaatctggcccacctgagcctgcccagcgaggaactggcttcttgggagcctctcgtgtgccacacaggacctggcgctgagggacacagcagatccacccagcctatgcacctgtctggcgaggccagcaccgccagaacctgtcctcaggaacctctgagaggcacccctggcggagcactgtggctgggagtgctgagactgctgctgttcaagctgctgctgtttgacctgctgctgacctgctcctgtctgtgcgatcctgccggccctctgccttctcctgccaccaccacaagactgagagccctgggcagccacagactgcaccctgccacagagacaggcggcagagaggccacaagcagccctagaccccagcccagagacagaagatggggcgataccccccctggcagaaagcctggatctccagtccgcgccaagagaagcggatctggcgtgaagcagaccctgaatttcgacctgctgaagctggctggcgacgtggaatccaacccaggcccttctagatctagaggccatatgaccgagtacaagcccacggtgcgcctcgccacccgcgacgacgtccccagggccgtacgcaccctcgccgccgcgttcgccgactaccccgccacgcgccacaccgtcgatccggaccgccacatcgagcgggtcaccgagctgcaagaactcttcctcacgcgcgtcgggctcgacatcggcaaggtgtgggtcgcggacgacggcgccgcggtggcggtctggaccacgccggagagcgtcgaagcgggggcggtgttcgccgagatcggcccgcgcatggccgagttgagcggttcccggctggccgcgcagcaacagatggaaggcctcctggcgccgcaccggcccaaggagcccgcgtggttcctggccaccgtcggcgtctcgcccgaccaccagggcaagggtctgggcagcgccgtcgtgctccccggagtggaggcggccgagcgcgccggggtgcccgccttcctggagacctccgcgccccgcaacctccccttctacgagcggctcggcttcaccgtcaccgccgacgtcgaggtgcccgaaggaccgcgcacctggtgcatgacccgcaagcccggtgcctga

SEQ ID NO: 5507 - DNA, 2055 bp, Artificial Sequence
  Synthetic Polynucloetide
atggccttaccagtgaccgccttgctcctgccgctggccttgctgctccacgccgccaggccggaagtgcaactggtggaatctggagggggaagcgtgcaggcaggcggatctctgagactgtcctgcaccacatctggcagagccctgaatatgtacgtgatgggatggtttcggcaggctcccggcaacgagcgggaatttgtggccgctacaagcagcagcggcggcagcacaagctaccccgattctgtgaagggcagattcacaatctcccgcgataatgccaagaatactgtgtacctgcagatgaatagtctgaagcctgaagatacagccgcctacagatgtgccgccagcccctacgtgtccacccccaccatgaacatcctggaagagtacagatactggggcctgggaacacaagtgacagtgtccagcggtaccggcggaggcggatctggcggcggaggtagcggtggcggaggatctgaattcgacatccagatgacacagagccctagcagcctgtctgccagcgtgggagacagagtgaccatcacatgcaaggccagcgaccacatcaacaactggctggcctggtatcagcagaagcctggacaggcccctaagctgctgatctacggcgctaccacactggaaacaggcgtgcccagcagattttctggcagcggctctggcaccgactacaccctgacaatatccagcctccagcctgaggacttcgccacctactactgtcagcagagctggaacaccccttggacattcggccagggcaccaagctggaaatcaagagactcgaggacctgaagaacgtgttcccacctgaggtggccgtgttcgagcctagcgaggccgagatcagccacacccagaaagccaccctcgtgtgcctggctaccggcttctaccccgaccatgtggaactgtcttggtgggtcaacggcaaagaggtgcacagcggcgtgtctaccgacccccagccactgaaagaacagcccgccctgaacgacagccggtactgcctgagcagcagactgagagtgtccgccaccttctggcagaacccccggaaccacttcagatgccaggtgcagttctacggcctgagcgagaacgacgagtggacccaggacagagccaagcccgtgacccagatcgtgtctgccgaagcctggggcagagccgattgcggctttaccagcgagagctaccagcagggcgtgctgagcgccaccatcctgtacgagatcctgctgggcaaggccaccctgtacgccgtgctggtgtctgccctggtgctgatggctatggtcaagcggaaggacagccggggaagggccaagcgatctggatctggagcaacaaacttctcactactcaaacaagcaggtgacgtggaggagaatcccgggcctactagaggccatatgaccgagtacaagcccacggtgcgcctcgccacccgcgacgacgtccccagggccgtacgcaccctcgccgccgcgttcgccgactaccccgccacgcgccacaccgtcgatccggaccgccacatcgagcgggtcaccgagctgcaagaactcttcctcacgcgcgtcgggctcgacatcggcaaggtgtgggtcgcggacgacggcgccgcggtggcggtctggaccacgccggagagcgtcgaagcgggggcggtgttcgccgagatcggcccgcgcatggccgagttgagcggttcccggctggccgcgcagcaacagatggaaggcctcctggcgccgcaccggcccaaggagcccgcgtggttcctggccaccgtcggcgtctcgcccgaccaccagggcaagggtctgggcagcgccgtcgtgctccccggagtggaggcggccgagcgcgccggggtgcccgccttcctggagacctccgcgccccgcaacctccccttctacgagcggctcggcttcaccgtcaccgccgacgtcgaggtgcccgaaggaccgcgcacctggtgcatgacccgcaagcccggtgcctga

SEQ ID NO: 5508 - DNA, 1362 bp, Artificial Sequence
  Synthetic Polynucloetide
atggccttaccagtgaccgccttgctcctgccgctggccttgctgctccacgccgccaggccggaagtgcaactggtggaatctggagggggaagcgtgcaggcaggcggatctctgagactgtcctgcaccacatctggcagagccctgaatatgtacgtgatgggatggtttcggcaggctcccggcaacgagcgggaatttgtggccgctacaagcagcagcggcggcagcacaagctaccccgattctgtgaagggcagattcacaatctcccgcgataatgccaagaatactgtgtacctgcagatgaatagtctgaagcctgaagatacagccgcctacagatgtgccgccagcccctacgtgtccacccccaccatgaacatcctggaagagtacagatactggggcctgggaacacaagtgacagtgtccagcggtaccggcggaggcggatctggcggcggaggtagcggtggcggaggatctgaattcgacatccagatgacacagagccctagcagcctgtctgccagcgtgggagacagagtgaccatcacatgcaaggccagcgaccacatcaacaactggctggcctggtatcagcagaagcctggacaggcccctaagctgctgatctacggcgctaccacactggaaacaggcgtgcccagcagattttctggcagcggctctggcaccgactacaccctgacaatatccagcctccagcctgaggacttcgccacctactactgtcagcagagctggaacaccccttggacattcggccagggcaccaagctggaaatcaagagactcgaggacctgaagaacgtgttcccacctgaggtggccgtgttcgagcctagcgaggccgagatcagccacacccagaaagccaccctcgtgtgcctggctaccggcttctaccccgaccatgtggaactgtcttggtgggtcaacggcaaagaggtgcacagcggcgtgtctaccgacccccagccactgaaagaacagcccgccctgaacgacagccggtactgcctgagcagcagactgagagtgtccgccaccttctggcagaacccccggaaccacttcagatgccaggtgcagttctacggcctgagcgagaacgacgagtggacccaggacagagccaagcccgtgacccagatcgtgtctgccgaagcctggggcagagccgattgcggctttaccagcgagagctaccagcagggcgtgctgagcgccaccatcctgtacgagatcctgctgggcaaggccaccctgtacgccgtgctggtgtctgccctggtgctgatggctatggtcaagcggaaggacagccgggga

SEQ ID NO: 5509 - DNA, 2109 bp, Artificial Sequence
  Synthetic Polynucloetide
atggccttaccagtgaccgccttgctcctgccgctggccttgctgctccacgccgccaggccggaagtgcaactggtggaatctggagggggaagcgtgcaggcaggcggatctctgagactgtcctgcaccacatctggcagagccctgaatatgtacgtgatgggatggtttcggcaggctcccggcaacgagcgggaatttgtggccgctacaagcagcagcggcggcagcacaagctaccccgattctgtgaagggcagattcacaatctcccgcgataatgccaagaatactgtgtacctgcagatgaatagtctgaagcctgaagatacagccgcctacagatgtgccgccagcccctacgtgtccacccccaccatgaacatcctggaagagtacagatactggggcctgggaacacaagtgacagtgtccagcggtaccggcggaggcggatctggcggcggaggtagcggtggcggaggatctgaattcgacatccagatgacacagagccctagcagcctgtctgccagcgtgggagacagagtgaccatcacatgcaaggccagcgaccacatcaacaactggctggcctggtatcagcagaagcctggacaggcccctaagctgctgatctacggcgctaccacactggaaacaggcgtgcccagcagattttctggcagcggctctggcaccgactacaccctgacaatatccagcctccagcctgaggacttcgccacctactactgtcagcagagctggaacaccccttggacattcggccagggcaccaagctggaaatcaagagactcgaggggaaaccaattcccaaccctcttctgggactggattcaaccggcagcggcgaggacctgaagaacgtgttcccacctgaggtggccgtgttcgagcctagcgaggccgagatcagccacacccagaaagccaccctcgtgtgcctggctaccggcttctaccccgaccatgtggaactgtcttggtgggtcaacggcaaagaggtgcacagcggcgtgtgtaccgacccccagccactgaaagaacagcccgccctgaacgacagccggtactgcctgagcagcagactgagagtgtccgccaccttctggcagaacccccggaaccacttcagatgccaggtgcagttctacggcctgagcgagaacgacgagtggacccaggacagagccaagcccgtgacccagatcgtgtctgccgaagcctggggcagagccgattgcggctttaccagcgagagctaccagcagggcgtgctgagcgccaccatcctgtacgagatcctgctgggcaaggccaccctgtacgccgtgctggtgtctgccctggtgctgatggctatggtcaagcggaaggacagccggggaagggccaagcgatctggatctggagcaacaaacttctcactactcaaacaagcaggtgacgtggaggagaatcccgggcctactagaggccatatgaccgagtacaagcccacggtgcgcctcgccacccgcgacgacgtccccagggccgtacgcaccctcgccgccgcgttcgccgactaccccgccacgcgccacaccgtcgatccggaccgccacatcgagcgggtcaccgagctgcaagaactcttcctcacgcgcgtcgggctcgacatcggcaaggtgtgggtcgcggacgacggcgccgcggtggcggtctggaccacgccggagagcgtcgaagcgggggcggtgttcgccgagatcggcccgcgcatggccgagttgagcggttcccggctggccgcgcagcaacagatggaaggcctcctggcgccgcaccggcccaaggagcccgcgtggttcctggccaccgtcggcgtctcgcccgaccaccagggcaagggtctgggcagcgccgtcgtgctccccggagtggaggcggccgagcgcgccggggtgcccgccttcctggagacctccgcgccccgcaacctccccttctacgagcggctcggcttcaccgtcaccgccgacgtcgaggtgcccgaaggaccgcgcacctggtgcatgacccgcaagcccggtgcctga

SEQ ID NO: 5510 - DNA, 1419 bp, Artificial Sequence
  Synthetic Polynucloetide
atggccttaccagtgaccgccttgctcctgccgctggccttgctgctccacgccgccaggccggaagtgcaactggtggaatctggagggggaagcgtgcaggcaggcggatctctgagactgtcctgcaccacatctggcagagccctgaatatgtacgtgatgggatggtttcggcaggctcccggcaacgagcgggaatttgtggccgctacaagcagcagcggcggcagcacaagctaccccgattctgtgaagggcagattcacaatctcccgcgataatgccaagaatactgtgtacctgcagatgaatagtctgaagcctgaagatacagccgcctacagatgtgccgccagcccctacgtgtccacccccaccatgaacatcctggaagagtacagatactggggcctgggaacacaagtgacagtgtccagcggtaccggcggaggcggatctggcggcggaggtagcggtggcggaggatctgaattcgacatccagatgacacagagccctagcagcctgtctgccagcgtgggagacagagtgaccatcacatgcaaggccagcgaccacatcaacaactggctggcctggtatcagcagaagcctggacaggcccctaagctgctgatctacggcgctaccacactggaaacaggcgtgcccagcagattttctggcagcggctctggcaccgactacaccctgacaatatccagcctccagcctgaggacttcgccacctactactgtcagcagagctggaacaccccttggacattcggccagggcaccaagctggaaatcaagagactcgaggggaaaccaattcccaaccctcttctgggactggattcaaccggcagcggcgaggacctgaagaacgtgttcccacctgaggtggccgtgttcgagcctagcgaggccgagatcagccacacccagaaagccaccctcgtgtgcctggctaccggcttctaccccgaccatgtggaactgtcttggtgggtcaacggcaaagaggtgcacagcggcgtgtgtaccgacccccagccactgaaagaacagcccgccctgaacgacagccggtactgcctgagcagcagactgagagtgtccgccaccttctggcagaacccccggaaccacttcagatgccaggtgcagttctacggcctgagcgagaacgacgagtggacccaggacagagccaagcccgtgacccagatcgtgtctgccgaagcctggggcagagccgattgcggctttaccagcgagagctaccagcagggcgtgctgagcgccaccatcctgtacgagatcctgctgggcaaggccaccctgtacgccgtgctggtgtctgccctggtgctgatggctatggtcaagcggaaggacagccggggatga

SEQ ID NO: 5511 - DNA, 2367 bp, Artificial Sequence
  Synthetic Polynucloetide
atggccttaccagtgaccgccttgctcctgccgctggccttgctgctccacgccgccaggccggaagtgcaactggtggaatctggagggggaagcgtgcaggcaggcggatctctgagactgtcctgcaccacatctggcagagccctgaatatgtacgtgatgggatggtttcggcaggctcccggcaacgagcgggaatttgtggccgctacaagcagcagcggcggcagcacaagctaccccgattctgtgaagggcagattcacaatctcccgcgataatgccaagaatactgtgtacctgcagatgaatagtctgaagcctgaagatacagccgcctacagatgtgccgccagcccctacgtgtccacccccaccatgaacatcctggaagagtacagatactggggcctgggaacacaagtgacagtgtccagcggtaccggcggaggcggatctggcggcggaggtagcggtggcggaggatctgaattcgacatccagatgacacagagccctagcagcctgtctgccagcgtgggagacagagtgaccatcacatgcaaggccagcgaccacatcaacaactggctggcctggtatcagcagaagcctggacaggcccctaagctgctgatctacggcgctaccacactggaaacaggcgtgcccagcagattttctggcagcggctctggcaccgactacaccctgacaatatccagcctccagcctgaggacttcgccacctactactgtcagcagagctggaacaccccttggacattcggccagggcaccaagctggaaatcaagagaggcggaggcggaagtggaggcggaggatctggcggcggaggctctcaagttcagcttcaacagcctggcgctgagctggtcaaacctggcgcttctgtgaagatgagctgcaaagccagcggctacgccttcagcagctactggatcaactggatgaagcagaaacccggccagggactcgaatggatcggccaaatctatcccggcgacggcgacaccaactacaacggcaagttcaagggcagagccacactgaccgccgatacctctagcagcacagcctacatgcagctgagcagcctgaccagcgaagatagcgccgtgtacttctgtgcccggtccatcacaacagtcgtgggctgcgctatggactattggggccagggaacaagcgtgaccgtgtctagtacgcgtgggagcggcatccagaaccctgatcctgccgtgtaccagctgcgggatagcaagagcagcgacaagagcgtgtgtctgttcaccgacttcgacagccagaccaacgtgtcccagagcaaggactccgacgtgtacatcaccgataagaccgtgctggacatgcggagcatggacttcaagagcaactccgccgtggcctggtccaacaagtccgatttcgcctgcgccaacgccttcaacaacagcattatccccgaggacacattcttcccaagcagcgacgtgccctgcgacgtgaagctggtggaaaagagcttcgagacagacaccaacctgaacttccagaacctgagcgtgatcggcttcagaatcctgctgctgaaagtggccggctttaacctgctgatgaccctgcggctgtggtccagccgcgccaagagaagcggatctggcgtgaagcagaccctgaatttcgacctgctgaagctggctggcgacgtggaatccaacccaggcccttctagaggccatatgaccgagtacaagcccacggtgcgcctcgccacccgcgacgacgtccccagggccgtacgcaccctcgccgccgcgttcgccgactaccccgccacgcgccacaccgtcgatccggaccgccacatcgagcgggtcaccgagctgcaagaactcttcctcacgcgcgtcgggctcgacatcggcaaggtgtgggtcgcggacgacggcgccgcggtggcggtctggaccacgccggagagcgtcgaagcgggggcggtgttcgccgagatcggcccgcgcatggccgagttgagcggttcccggctggccgcgcagcaacagatggaaggcctcctggcgccgcaccggcccaaggagcccgcgtggttcctggccaccgtcggcgtctcgcccgaccaccagggcaagggtctgggcagcgccgtcgtgctccccggagtggaggcggccgagcgcgccggggtgcccgccttcctggagacctccgcgccccgcaacctccccttctacgagcggctcggcttcaccgtcaccgccgacgtcgaggtgcccgaaggaccgcgcacctggtgcatgacccgcaagcccggtgcctga

SEQ ID NO: 5512 - DNA, 2463 bp, Artificial Sequence
  Synthetic Polynucloetide
atggccttaccagtgaccgccttgctcctgccgctggccttgctgctccacgccgccaggccggaagtgcaactggtggaatctggagggggaagcgtgcaggcaggcggatctctgagactgtcctgcaccacatctggcagagccctgaatatgtacgtgatgggatggtttcggcaggctcccggcaacgagcgggaatttgtggccgctacaagcagcagcggcggcagcacaagctaccccgattctgtgaagggcagattcacaatctcccgcgataatgccaagaatactgtgtacctgcagatgaatagtctgaagcctgaagatacagccgcctacagatgtgccgccagcccctacgtgtccacccccaccatgaacatcctggaagagtacagatactggggcctgggaacacaagtgacagtgtccagcggtaccggcggaggcggatctggcggcggaggtagcggtggcggaggatctgaattcgacatccagatgacacagagccctagcagcctgtctgccagcgtgggagacagagtgaccatcacatgcaaggccagcgaccacatcaacaactggctggcctggtatcagcagaagcctggacaggcccctaagctgctgatctacggcgctaccacactggaaacaggcgtgcccagcagattttctggcagcggctctggcaccgactacaccctgacaatatccagcctccagcctgaggacttcgccacctactactgtcagcagagctggaacaccccttggacattcggccagggcaccaagctggaaatcaagagaggcggaggcggaagtggaggcggaggatctggcggcggaggctctcaagttcagcttcaacagcctggcgctgagctggtcaaacctggcgcttctgtgaagatgagctgcaaagccagcggctacgccttcagcagctactggatcaactggatgaagcagaaacccggccagggactcgaatggatcggccaaatctatcccggcgacggcgacaccaactacaacggcaagttcaagggcagagccacactgaccgccgatacctctagcagcacagcctacatgcagctgagcagcctgaccagcgaagatagcgccgtgtacttctgtgcccggtccatcacaacagtcgtgggctgcgctatggactattggggccagggaacaagcgtgaccgtgtctagtctcgaggacctgaagaacgtgttcccacctgaggtggccgtgttcgagcctagcaaggccgagatcgcccacacccagaaagccaccctcgtgtgcctggctaccggcttctaccccgaccatgtggaactgtcttggtgggtcaacggcaaagaggtgcacagcggcgtgtctaccgacccccagccactgaaagaacagcccgccctgaacgacagccggtactgcctgagcagcagactgagagtgtccgccaccttctggcagaacccccggaaccacttcagatgccaggtgcagttctacggcctgagcgagaacgacgagtggacccaggacagagccaagcccgtgacccagatcgtgtctgccgaagcctggggcagagccgattgcggcatcaccagcgccagctaccaccagggcgtgctgagcgccaccatcctgtacgagatcctgctgggcaaggccaccctgtacgccgtgctggtgtctgccctggtgctgatggctatggtcaagcggaaggacagccggggaagggccaagcgatctggatctggagcaacaaacttctcactactcaaacaagcaggtgacgtggaggagaatcccgggcctactagaggccatatgaccgagtacaagcccacggtgcgcctcgccacccgcgacgacgtccccagggccgtacgcaccctcgccgccgcgttcgccgactaccccgccacgcgccacaccgtcgatccggaccgccacatcgagcgggtcaccgagctgcaagaactcttcctcacgcgcgtcgggctcgacatcggcaaggtgtgggtcgcggacgacggcgccgcggtggcggtctggaccacgccggagagcgtcgaagcgggggcggtgttcgccgagatcggcccgcgcatggccgagttgagcggttcccggctggccgcgcagcaacagatggaaggcctcctggcgccgcaccggcccaaggagcccgcgtggttcctggccaccgtcggcgtctcgcccgaccaccagggcaagggtctgggcagcgccgtcgtgctccccggagtggaggcggccgagcgcgccggggtgcccgccttcctggagacctccgcgccccgcaacctccccttctacgagcggctcggcttcaccgtcaccgccgacgtcgaggtgcccgaaggaccgcgcacctggtgcatgacccgcaagcccggtgcctga

SEQ ID NO: 5513 - DNA, 1923 bp, Artificial Sequence; identical to SEQ ID NO: 4087
  Synthetic Polynucloetide

SEQ ID NO: 5514 - DNA, 2982 bp, Artificial Sequence; identical to SEQ ID NO: 4088
  Synthetic Polynucloetide

SEQ ID NO: 5515 - DNA, 2979 bp, Artificial Sequence; identical to SEQ ID NO: 4089
  Synthetic Polynucloetide

SEQ ID NO: 5516 - DNA, 2979 bp, Artificial Sequence; identical to SEQ ID NO: 4090
  Synthetic Polynucloetide

SEQ ID NO: 5517 - DNA, 2277 bp, Artificial Sequence; identical to SEQ ID NO: 4091
  Synthetic Polynucloetide

SEQ ID NO: 5518 - DNA, 2952 bp, Artificial Sequence; identical to SEQ ID NO: 4092
  Synthetic Polynucloetide

SEQ ID NO: 5519 - DNA, 2289 bp, Artificial Sequence; identical to SEQ ID NO: 4093
  Synthetic Polynucloetide

SEQ ID NO: 5520 - DNA, 2955 bp, Artificial Sequence; identical to SEQ ID NO: 4094
  Synthetic Polynucloetide

SEQ ID NO: 5521 - DNA, 2979 bp, Artificial Sequence; identical to SEQ ID NO: 4095
  Synthetic Polynucloetide

SEQ ID NO: 5522 - DNA, 3225 bp, Artificial Sequence; identical to SEQ ID NO: 4096
  Synthetic Polynucloetide

SEQ ID NO: 5523 - DNA, 3090 bp, Artificial Sequence; identical to SEQ ID NO: 4097
  Synthetic Polynucloetide

SEQ ID NO: 5524 - DNA, 2301 bp, Artificial Sequence; identical to SEQ ID NO: 4098
  Synthetic Polynucloetide

SEQ ID NO: 5525 - DNA, 3510 bp, Artificial Sequence; identical to SEQ ID NO: 4099
  Synthetic Polynucloetide

SEQ ID NO: 5526 - DNA, 2865 bp, Artificial Sequence; identical to SEQ ID NO: 4100
  Synthetic Polynucloetide

SEQ ID NO: 5527 - DNA, 2865 bp, Artificial Sequence; identical to SEQ ID NO: 4101
  Synthetic Polynucloetide

SEQ ID NO: 5528 - DNA, 3078 bp, Artificial Sequence; identical to SEQ ID NO: 4102
  Synthetic Polynucloetide

SEQ ID NO: 5529 - DNA, 3201 bp, Artificial Sequence; identical to SEQ ID NO: 4103
  Synthetic Polynucloetide

SEQ ID NO: 5530 - DNA, 3084 bp, Artificial Sequence; identical to SEQ ID NO: 4104
  Synthetic Polynucloetide

SEQ ID NO: 5531 - DNA, 3210 bp, Artificial Sequence; identical to SEQ ID NO: 4105
  Synthetic Polynucloetide

SEQ ID NO: 5532 - DNA, 2883 bp, Artificial Sequence; identical to SEQ ID NO: 4106
  Synthetic Polynucloetide

SEQ ID NO: 5533 - DNA, 2355 bp, Artificial Sequence; identical to SEQ ID NO: 4107
  Synthetic Polynucloetide

SEQ ID NO: 5534 - DNA, 2289 bp, Artificial Sequence; identical to SEQ ID NO: 4108
  Synthetic Polynucloetide

SEQ ID NO: 5535 - DNA, 2289 bp, Artificial Sequence; identical to SEQ ID NO: 4109
  Synthetic Polynucloetide

SEQ ID NO: 5536 - DNA, 1779 bp, Artificial Sequence; identical to SEQ ID NO: 4110
  Synthetic Polynucloetide

SEQ ID NO: 5537 - DNA, 1674 bp, Artificial Sequence; identical to SEQ ID NO: 4111
  Synthetic Polynucloetide

SEQ ID NO: 5538 - DNA, 1704 bp, Artificial Sequence; identical to SEQ ID NO: 4112
  Synthetic Polynucloetide

SEQ ID NO: 5539 - DNA, 1653 bp, Artificial Sequence; identical to SEQ ID NO: 4113
  Synthetic Polynucloetide

SEQ ID NO: 5540 - DNA, 1764 bp, Artificial Sequence; identical to SEQ ID NO: 4114
  Synthetic Polynucloetide

SEQ ID NO: 5541 - DNA, 1263 bp, Artificial Sequence; identical to SEQ ID NO: 4115
  Synthetic Polynucloetide

SEQ ID NO: 5542 - DNA, 1800 bp, Artificial Sequence; identical to SEQ ID NO: 4116
  Synthetic Polynucloetide

SEQ ID NO: 5543 - DNA, 1302 bp, Artificial Sequence; identical to SEQ ID NO: 4117
  Synthetic Polynucloetide

SEQ ID NO: 5544 - DNA, 3417 bp, Artificial Sequence
  Synthetic Polynucloetide
atggccttaccagtgaccgccttgctcctgccgctggccttgctgctccacgccgccaggccggaagtgcaactggtggaatctggagggggaagcgtgcaggcaggcggatctctgagactgtcctgcaccacatctggcagagccctgaatatgtacgtgatgggatggtttcggcaggctcccggcaacgagcgggaatttgtggccgctacaagcagcagcggcggcagcacaagctaccccgattctgtgaagggcagattcacaatctcccgcgataatgccaagaatactgtgtacctgcagatgaatagtctgaagcctgaagatacagccgcctacagatgtgccgccagcccctacgtgtccacccccaccatgaacatcctggaagagtacagatactggggcctgggaacacaagtgacagtgtccagcggtaccggcggaggcggatctggcggcggaggtagcggtggcggaggatctgaattcgacatccagatgacacagagccctagcagcctgtctgccagcgtgggagacagagtgaccatcacatgcaaggccagcgaccacatcaacaactggctggcctggtatcagcagaagcctggacaggcccctaagctgctgatctacggcgctaccacactggaaacaggcgtgcccagcagattttctggcagcggctctggcaccgactacaccctgacaatatccagcctccagcctgaggacttcgccacctactactgtcagcagagctggaacaccccttggacattcggccagggcaccaagctggaaatcaagagactcgagatccagaaccctgatcctgccgtgtaccagctgcgggatagcaagagcagcgacaagagcgtgtgtctgttcaccgacttcgacagccagaccaacgtgtcccagagcaaggactccgacgtgtacatcaccgataagtgcgtgctggacatgcggagcatggacttcaagagcaactccgccgtggcctggtccaacaagtccgatttcgcctgcgccaacgccttcaacaacagcattatccccgaggacacattcttcccaagcagcgacgtgccctgcgacgtgaagctggtggaaaagagcttcgagacagacaccaacctgaacttccagaacctgagcgtgatcggcttcagaatcctgctgctgaaagtggccggctttaacctgctgatgaccctgcggctgtggtccagccgcgccaagagaagcggatctggcgtgaagcagaccctgaatttcgacctgctgaagctggctggcgacgtggaatccaacccaggccctactagtatggactggatttggcgcatccttttccttgtcggcgctgctaccggcgcccattccgggccccaggttcagctgcaagagtctggcggaggacttgctcaagctggcggaagcctgagactgtcttgtgccgcctctggcagaaccttcagcatgggctggtttagacaggcccctggcaaagagagagagttcgtcgccgccatcacatacagcggcggcagcccttactacgcctcttctgtcagaggccggttcaccatcagccgggacaacgccaagaacaccgtgtacctccagatgaacagcctgaagccagaggacaccgccgtgtactactgtgccgccaatccaacctacggcagcgactggaatgccgagaattggggccagggcacccaagtgacagtgtctagtggatccggcggcggaggatctggcggaggcggatctgggggcggaggctctttcgaacaagttcagcttcaacagcctggcgctgagctggtcaaacctggcgcttctgtgaagatgagctgcaaagccagcggctacgccttcagcagctactggatcaactggatgaagcagaaacccggccagggactcgaatggatcggccaaatctatcccggcgacggcgacaccaactacaacggcaagttcaagggcagagccacactgaccgccgatacctctagcagcacagcctacatgcagctgagcagcctgaccagcgaagatagcgccgtgtacttctgtgcccggtccatcacaacagtcgtgggctgcgctatggactattggggccagggaacaagcgtgaccgtgtctagtacgcgtgaggacctgaagaacgtgttcccacctgaggtggccgtgttcgagcctagcaaggccgagatcgcccacacccagaaagccaccctcgtgtgcctggctaccggcttctaccccgaccatgtggaactgtcttggtgggtcaacggcaaagaggtgcacagcggcgtgtgtaccgacccccagccactgaaagaacagcccgccctgaacgacagccggtactgcctgagcagcagactgagagtgtccgccaccttctggcagaacccccggaaccacttcagatgccaggtgcagttctacggcctgagcgagaacgacgagtggacccaggacagagccaagcccgtgacccagatcgtgtctgccgaagcctggggcagagccgattgcggcatcaccagcgccagctaccaccagggcgtgctgagcgccaccatcctgtacgagatcctgctgggcaaggccaccctgtacgccgtgctggtgtctgccctggtgctgatggctatggtcaagcggaaggacagccggggaagggccaagcgatctggatctggagcaacaaacttctcactactcaaacaagcaggtgacgtggaggagaatcccgggccttctagaggccatatgaccgagtacaagcccacggtgcgcctcgccacccgcgacgacgtccccagggccgtacgcaccctcgccgccgcgttcgccgactaccccgccacgcgccacaccgtcgatccggaccgccacatcgagcgggtcaccgagctgcaagaactcttcctcacgcgcgtcgggctcgacatcggcaaggtgtgggtcgcggacgacggcgccgcggtggcggtctggaccacgccggagagcgtcgaagcgggggcggtgttcgccgagatcggcccgcgcatggccgagttgagcggttcccggctggccgcgcagcaacagatggaaggcctcctggcgccgcaccggcccaaggagcccgcgtggttcctggccaccgtcggcgtctcgcccgaccaccagggcaagggtctgggcagcgccgtcgtgctccccggagtggaggcggccgagcgcgccggggtgcccgccttcctggagacctccgcgccccgcaacctccccttctacgagcggctcggcttcaccgtcaccgccgacgtcgaggtgcccgaaggaccgcgcacctggtgcatgacccgcaagcccggtgcctga

SEQ ID NO: 5545 - DNA, 3414 bp, Artificial Sequence
  Synthetic Polynucloetide
atggccttaccagtgaccgccttgctcctgccgctggccttgctgctccacgccgccaggccggaagtgcaactggtggaatctggagggggaagcgtgcaggcaggcggatctctgagactgtcctgcaccacatctggcagagccctgaatatgtacgtgatgggatggtttcggcaggctcccggcaacgagcgggaatttgtggccgctacaagcagcagcggcggcagcacaagctaccccgattctgtgaagggcagattcacaatctcccgcgataatgccaagaatactgtgtacctgcagatgaatagtctgaagcctgaagatacagccgcctacagatgtgccgccagcccctacgtgtccacccccaccatgaacatcctggaagagtacagatactggggcctgggaacacaagtgacagtgtccagcggtaccggcggaggcggatctggcggcggaggtagcggtggcggaggatctgaattcgacatccagatgacacagagccctagcagcctgtctgccagcgtgggagacagagtgaccatcacatgcaaggccagcgaccacatcaacaactggctggcctggtatcagcagaagcctggacaggcccctaagctgctgatctacggcgctaccacactggaaacaggcgtgcccagcagattttctggcagcggctctggcaccgactacaccctgacaatatccagcctccagcctgaggacttcgccacctactactgtcagcagagctggaacaccccttggacattcggccagggcaccaagctggaaatcaagagactcgaggacctgaagaacgtgttcccacctgaggtggccgtgttcgagcctagcaaggccgagatcgcccacacccagaaagccaccctcgtgtgcctggctaccggcttctaccccgaccatgtggaactgtcttggtgggtcaacggcaaagaggtgcacagcggcgtgtgtaccgacccccagccactgaaagaacagcccgccctgaacgacagccggtactgcctgagcagcagactgagagtgtccgccaccttctggcagaacccccggaaccacttcagatgccaggtgcagttctacggcctgagcgagaacgacgagtggacccaggacagagccaagcccgtgacccagatcgtgtctgccgaagcctggggcagagccgattgcggcatcaccagcgccagctaccaccagggcgtgctgagcgccaccatcctgtacgagatcctgctgggcaaggccaccctgtacgccgtgctggtgtctgccctggtgctgatggctatggtcaagcggaaggacagccggggaagggccaagcgatctggatctggagcaacaaacttctcactactcaaacaagcaggtgacgtggaggagaatcccgggcctactagtatggactggatttggcgcatccttttccttgtcggcgctgctaccggcgcccattccgggccccaggttcagctgcaagagtctggcggaggacttgctcaagctggcggaagcctgagactgtcttgtgccgcctctggcagaaccttcagcatgggctggtttagacaggcccctggcaaagagagagagttcgtcgccgccatcacatacagcggcggcagcccttactacgcctcttctgtcagaggccggttcaccatcagccgggacaacgccaagaacaccgtgtacctccagatgaacagcctgaagccagaggacaccgccgtgtactactgtgccgccaatccaacctacggcagcgactggaatgccgagaattggggccagggcacccaagtgacagtgtctagtggatccggcggcggaggatctggcggaggcggatctgggggcggaggctctttcgaacaagttcagcttcaacagcctggcgctgagctggtcaaacctggcgcttctgtgaagatgagctgcaaagccagcggctacgccttcagcagctactggatcaactggatgaagcagaaacccggccagggactcgaatggatcggccaaatctatcccggcgacggcgacaccaactacaacggcaagttcaagggcagagccacactgaccgccgatacctctagcagcacagcctacatgcagctgagcagcctgaccagcgaagatagcgccgtgtacttctgtgcccggtccatcacaacagtcgtgggctgcgctatggactattggggccagggaacaagcgtgaccgtgtctagtacgcgtatccagaaccctgatcctgccgtgtaccagctgcgggatagcaagagcagcgacaagagcgtgtgtctgttcaccgacttcgacagccagaccaacgtgtcccagagcaaggactccgacgtgtacatcaccgataagtgcgtgctggacatgcggagcatggacttcaagagcaactccgccgtggcctggtccaacaagtccgatttcgcctgcgccaacgccttcaacaacagcattatccccgaggacacattcttcccaagcagcgacgtgccctgcgacgtgaagctggtggaaaagagcttcgagacagacaccaacctgaacttccagaacctgagcgtgatcggcttcagaatcctgctgctgaaagtggccggctttaacctgctgatgaccctgcggctgtggtccagccgcgccaagagaagcggatctggcgtgaagcagaccctgaatttcgacctgctgaagctggctggcgacgtggaatccaacccaggcccttctagaggccatatgaccgagtacaagcccacggtgcgcctcgccacccgcgacgacgtccccagggccgtacgcaccctcgccgccgcgttcgccgactaccccgccacgcgccacaccgtcgatccggaccgccacatcgagcgggtcaccgagctgcaagaactcttcctcacgcgcgtcgggctcgacatcggcaaggtgtgggtcgcggacgacggcgccgcggtggcggtctggaccacgccggagagcgtcgaagcgggggcggtgttcgccgagatcggcccgcgcatggccgagttgagcggttcccggctggccgcgcagcaacagatggaaggcctcctggcgccgcaccggcccaaggagcccgcgtggttcctggccaccgtcggcgtctcgcccgaccaccagggcaagggtctgggcagcgccgtcgtgctccccggagtggaggcggccgagcgcgccggggtgcccgccttcctggagacctccgcgccccgcaacctccccttctacgagcggctcggcttcaccgtcaccgccgacgtcgaggtgcccgaaggaccgcgcacctggtgcatgacccgcaagcccggtgcctga

SEQ ID NO: 5546 - DNA, 3414 bp, Artificial Sequence
  Synthetic Polynucloetide
atggccttaccagtgaccgccttgctcctgccgctggccttgctgctccacgccgccaggccggaagtgcaactggtggaatctggagggggaagcgtgcaggcaggcggatctctgagactgtcctgcaccacatctggcagagccctgaatatgtacgtgatgggatggtttcggcaggctcccggcaacgagcgggaatttgtggccgctacaagcagcagcggcggcagcacaagctaccccgattctgtgaagggcagattcacaatctcccgcgataatgccaagaatactgtgtacctgcagatgaatagtctgaagcctgaagatacagccgcctacagatgtgccgccagcccctacgtgtccacccccaccatgaacatcctggaagagtacagatactggggcctgggaacacaagtgacagtgtccagcggtaccggcggaggcggatctggcggcggaggtagcggtggcggaggatctgaattcgacatccagatgacacagagccctagcagcctgtctgccagcgtgggagacagagtgaccatcacatgcaaggccagcgaccacatcaacaactggctggcctggtatcagcagaagcctggacaggcccctaagctgctgatctacggcgctaccacactggaaacaggcgtgcccagcagattttctggcagcggctctggcaccgactacaccctgacaatatccagcctccagcctgaggacttcgccacctactactgtcagcagagctggaacaccccttggacattcggccagggcaccaagctggaaatcaagagactcgaggacctgaagaacgtgttcccacctgaggtggccgtgttcgagcctagcgaggccgagatcagccacacccagaaagccaccctcgtgtgcctggctaccggcttctaccccgaccatgtggaactgtcttggtgggtcaacggcaaagaggtgcacagcggcgtgtgtaccgacccccagccactgaaagaacagcccgccctgaacgacagccggtactgcctgagcagcagactgagagtgtccgccaccttctggcagaacccccggaaccacttcagatgccaggtgcagttctacggcctgagcgagaacgacgagtggacccaggacagagccaagcccgtgacccagatcgtgtctgccgaagcctggggcagagccgattgcggctttaccagcgagagctaccagcagggcgtgctgagcgccaccatcctgtacgagatcctgctgggcaaggccaccctgtacgccgtgctggtgtctgccctggtgctgatggctatggtcaagcggaaggacagccggggaagggccaagcgatctggatctggagcaacaaacttctcactactcaaacaagcaggtgacgtggaggagaatcccgggcctactagtatggactggatttggcgcatccttttccttgtcggcgctgctaccggcgcccattccgggccccaggttcagctgcaagagtctggcggaggacttgctcaagctggcggaagcctgagactgtcttgtgccgcctctggcagaaccttcagcatgggctggtttagacaggcccctggcaaagagagagagttcgtcgccgccatcacatacagcggcggcagcccttactacgcctcttctgtcagaggccggttcaccatcagccgggacaacgccaagaacaccgtgtacctccagatgaacagcctgaagccagaggacaccgccgtgtactactgtgccgccaatccaacctacggcagcgactggaatgccgagaattggggccagggcacccaagtgacagtgtctagtggatccggcggcggaggatctggcggaggcggatctgggggcggaggctctttcgaacaagttcagcttcaacagcctggcgctgagctggtcaaacctggcgcttctgtgaagatgagctgcaaagccagcggctacgccttcagcagctactggatcaactggatgaagcagaaacccggccagggactcgaatggatcggccaaatctatcccggcgacggcgacaccaactacaacggcaagttcaagggcagagccacactgaccgccgatacctctagcagcacagcctacatgcagctgagcagcctgaccagcgaagatagcgccgtgtacttctgtgcccggtccatcacaacagtcgtgggctgcgctatggactattggggccagggaacaagcgtgaccgtgtctagtacgcgtatccagaaccctgatcctgccgtgtaccagctgcgggatagcaagagcagcgacaagagcgtgtgtctgttcaccgacttcgacagccagaccaacgtgtcccagagcaaggactccgacgtgtacatcaccgataagtgcgtgctggacatgcggagcatggacttcaagagcaactccgccgtggcctggtccaacaagtccgatttcgcctgcgccaacgccttcaacaacagcattatccccgaggacacattcttcccaagccccgagagcagctgcgacgtgaagctggtggaaaagagcttcgagacagacaccaacctgaacttccagaacctgagcgtgatcggcttcagaatcctgctgctgaaagtggccggctttaacctgctgatgaccctgcggctgtggtccagccgcgccaagagaagcggatctggcgtgaagcagaccctgaatttcgacctgctgaagctggctggcgacgtggaatccaacccaggcccttctagaggccatatgaccgagtacaagcccacggtgcgcctcgccacccgcgacgacgtccccagggccgtacgcaccctcgccgccgcgttcgccgactaccccgccacgcgccacaccgtcgatccggaccgccacatcgagcgggtcaccgagctgcaagaactcttcctcacgcgcgtcgggctcgacatcggcaaggtgtgggtcgcggacgacggcgccgcggtggcggtctggaccacgccggagagcgtcgaagcgggggcggtgttcgccgagatcggcccgcgcatggccgagttgagcggttcccggctggccgcgcagcaacagatggaaggcctcctggcgccgcaccggcccaaggagcccgcgtggttcctggccaccgtcggcgtctcgcccgaccaccagggcaagggtctgggcagcgccgtcgtgctccccggagtggaggcggccgagcgcgccggggtgcccgccttcctggagacctccgcgccccgcaacctccccttctacgagcggctcggcttcaccgtcaccgccgacgtcgaggtgcccgaaggaccgcgcacctggtgcatgacccgcaagcccggtgcctga

SEQ ID NO: 5547 - DNA, 2712 bp, Artificial Sequence
  Synthetic Polynucloetide
atggccttaccagtgaccgccttgctcctgccgctggccttgctgctccacgccgccaggccggaagtgcaactggtggaatctggagggggaagcgtgcaggcaggcggatctctgagactgtcctgcaccacatctggcagagccctgaatatgtacgtgatgggatggtttcggcaggctcccggcaacgagcgggaatttgtggccgctacaagcagcagcggcggcagcacaagctaccccgattctgtgaagggcagattcacaatctcccgcgataatgccaagaatactgtgtacctgcagatgaatagtctgaagcctgaagatacagccgcctacagatgtgccgccagcccctacgtgtccacccccaccatgaacatcctggaagagtacagatactggggcctgggaacacaagtgacagtgtccagcggtaccggcggaggcggatctggcggcggaggtagcggtggcggaggatctgaattcgacatccagatgacacagagccctagcagcctgtctgccagcgtgggagacagagtgaccatcacatgcaaggccagcgaccacatcaacaactggctggcctggtatcagcagaagcctggacaggcccctaagctgctgatctacggcgctaccacactggaaacaggcgtgcccagcagattttctggcagcggctctggcaccgactacaccctgacaatatccagcctccagcctgaggacttcgccacctactactgtcagcagagctggaacaccccttggacattcggccagggcaccaagctggaaatcaagagactcgaggacctgaagaacgtgttcccacctgaggtggccgtgttcgagcctagcgaggccgagatcagccacacccagaaagccaccctcgtgtgcctggctaccggcttctaccccgaccatgtggaactgtcttggtgggtcaacggcaaagaggtgcacagcggcgtgtgtaccgacccccagccactgaaagaacagcccgccctgaacgacagccggtactgcctgagcagcagactgagagtgtccgccaccttctggcagaacccccggaaccacttcagatgccaggtgcagttctacggcctgagcgagaacgacgagtggacccaggacagagccaagcccgtgacccagatcgtgtctgccgaagcctggggcagagccgattgcggctttaccagcgagagctaccagcagggcgtgctgagcgccaccatcctgtacgagatcctgctgggcaaggccaccctgtacgccgtgctggtgtctgccctggtgctgatggctatggtcaagcggaaggacagccggggaagggccaagcgatctggatctggagcaacaaacttctcactactcaaacaagcaggtgacgtggaggagaatcccgggcctactagtatggactggatttggcgcatccttttccttgtcggcgctgctaccggcgcccattccgggccccaggttcagctgcaagagtctggcggaggacttgctcaagctggcggaagcctgagactgtcttgtgccgcctctggcagaaccttcagcatgggctggtttagacaggcccctggcaaagagagagagttcgtcgccgccatcacatacagcggcggcagcccttactacgcctcttctgtcagaggccggttcaccatcagccgggacaacgccaagaacaccgtgtacctccagatgaacagcctgaagccagaggacaccgccgtgtactactgtgccgccaatccaacctacggcagcgactggaatgccgagaattggggccagggcacccaagtgacagtgtctagtggatccggcggcggaggatctggcggaggcggatctgggggcggaggctctttcgaacaagttcagcttcaacagcctggcgctgagctggtcaaacctggcgcttctgtgaagatgagctgcaaagccagcggctacgccttcagcagctactggatcaactggatgaagcagaaacccggccagggactcgaatggatcggccaaatctatcccggcgacggcgacaccaactacaacggcaagttcaagggcagagccacactgaccgccgatacctctagcagcacagcctacatgcagctgagcagcctgaccagcgaagatagcgccgtgtacttctgtgcccggtccatcacaacagtcgtgggctgcgctatggactattggggccagggaacaagcgtgaccgtgtctagtacgcgtatccagaaccctgatcctgccgtgtaccagctgcgggatagcaagagcagcgacaagagcgtgtgtctgttcaccgacttcgacagccagaccaacgtgtcccagagcaaggactccgacgtgtacatcaccgataagtgcgtgctggacatgcggagcatggacttcaagagcaactccgccgtggcctggtccaacaagtccgatttcgcctgcgccaacgccttcaacaacagcattatccccgaggacacattcttcccaagccccgagagcagctgcgacgtgaagctggtggaaaagagcttcgagacagacaccaacctgaacttccagaacctgagcgtgatcggcttcagaatcctgctgctgaaagtggccggctttaacctgctgatgaccctgcggctgtggtccagc

SEQ ID NO: 5548 - DNA, 3387 bp, Artificial Sequence
  Synthetic Polynucloetide
atggccttaccagtgaccgccttgctcctgccgctggccttgctgctccacgccgccaggccggaagtgcaactggtggaatctggagggggaagcgtgcaggcaggcggatctctgagactgtcctgcaccacatctggcagagccctgaatatgtacgtgatgggatggtttcggcaggctcccggcaacgagcgggaatttgtggccgctacaagcagcagcggcggcagcacaagctaccccgattctgtgaagggcagattcacaatctcccgcgataatgccaagaatactgtgtacctgcagatgaatagtctgaagcctgaagatacagccgcctacagatgtgccgccagcccctacgtgtccacccccaccatgaacatcctggaagagtacagatactggggcctgggaacacaagtgacagtgtccagcggtaccggcggaggcggatctggcggcggaggtagcggtggcggaggatctgaattcgacatccagatgacacagagccctagcagcctgtctgccagcgtgggagacagagtgaccatcacatgcaaggccagcgaccacatcaacaactggctggcctggtatcagcagaagcctggacaggcccctaagctgctgatctacggcgctaccacactggaaacaggcgtgcccagcagattttctggcagcggctctggcaccgactacaccctgacaatatccagcctccagcctgaggacttcgccacctactactgtcagcagagctggaacaccccttggacattcggccagggcaccaagctggaaatcaagagactcgaggacctgaagaacgtgttcccacctgaggtggccgtgttcgagcctagcgaggccgagatcagccacacccagaaagccaccctcgtgtgcctggctaccggcttctaccccgaccatgtggaactgtcttggtgggtcaacggcaaagaggtgcacagcggcgtgtgtaccgacccccagccactgaaagaacagcccgccctgaacgacagccggtactgcctgagcagcagactgagagtgtccgccaccttctggcagaacccccggaaccacttcagatgccaggtgcagttctacggcctgagcgagaacgacgagtggacccaggacagagccaagcccgtgacccagatcgtgtctgccgaagcctggggcagagccgattgcggctttaccagcgagagctaccagcagggcgtgctgagcgccaccatcctgtacgagatcctgctgggcaaggccaccctgtacgccgtgctggtgtctgccctggtgctgatggctatggtcaagcggaaggacagccggggaagggccaagcgatctggatctggagcaacaaacttctcactactcaaacaagcaggtgacgtggaggagaatcccgggcctactagtatggactggatttggcgcatccttttccttgtcggcgctgctaccggcgcccattccgggccccaggttcagctgcaagagtctggcggaggacttgctcaagctggcggaagcctgagactgtcttgtgccgcctctggcagaaccttcagcatgggctggtttagacaggcccctggcaaagagagagagttcgtcgccgccatcacatacagcggcggcagcccttactacgcctcttctgtcagaggccggttcaccatcagccgggacaacgccaagaacaccgtgtacctccagatgaacagcctgaagccagaggacaccgccgtgtactactgtgccgccaatccaacctacggcagcgactggaatgccgagaattggggccagggcacccaagtgacagtgtctagtggatccggcggcggaggatctggcggaggcggatctgggggcggaggctctttcgaacaagttcagcttcaacagcctggcgctgagctggtcaaacctggcgcttctgtgaagatgagctgcaaagccagcggctacgccttcagcagctactggatcaactggatgaagcagaaacccggccagggactcgaatggatcggccaaatctatcccggcgacggcgacaccaactacaacggcaagttcaagggcagagccacactgaccgccgatacctctagcagcacagcctacatgcagctgagcagcctgaccagcgaagatagcgccgtgtacttctgtgcccggtccatcacaacagtcgtgggctgcgctatggactattggggccagggaacaagcgtgaccgtgtctagtacgcgtatccagaaccctgatcctgccgtgtaccagctgcgggatagcaagagcagcgacaagagcgtgtgtctgttcaccgacttcgacagccagaccaacgtgtcccagagcaaggactccgacgtgtacatcaccgataagtgcgtgctggacatgcggagcatggacttcaagagcaactccgccgtggcctggtccaacaagtccgatttcgcctgcgccaacgccttcaacaacagcattatccccgaggacacattcttcccaagccccgagagcagctgcgacgtgaagctggtggaaaagagcttcgagacagacaccaacctgaacttccagaacctgagcgtgatcggcttcagaatcctgctgctgaaagtggccggctttaacctgctgatgaccctgcggctgtggtccagccgcgccaagagaagcggatctggcgtgaagcagaccctgaatttcgacctgctgaagctggctggcgacgtggaatccaacccaggcccttctagaggcgggatccacaccatggctacctacgaggtgctgtgcgaggtggcaagaaagctgggcaccgacgacagagaagtggtgctgttcctgctgaacgtgttcatccctcagcctacactggcccagctgatcggtgcactgagagccctgaaagaggaaggccggctgacctttcctctgctggccgaatgcctgttcagagccggaagaagggatctgctgcgggacctgctgcatctggaccccagatttctggaaagacacctggccggcaccatgagctacttcagcccttaccagctgaccgtgctgcacgttgacggcgaactgtgcgccagagatattcggagcctgatcttcctgagcaaggacaccatcggcagccggtctacccctcagacatttctgcactgggtgtactgcatggaaaacctggacctgctcggccccacagatgtggatgccctgatgtccatgctgagaagcctgagcagagtggacctccagagacaggtgcagacactgatgggactgcacctgagcggacctagccacagccagcactacagacacacccct

SEQ ID NO: 5549 - DNA, 2724 bp, Artificial Sequence
  Synthetic Polynucloetide
atggccttaccagtgaccgccttgctcctgccgctggccttgctgctccacgccgccaggccggaagtgcaactggtggaatctggagggggaagcgtgcaggcaggcggatctctgagactgtcctgcaccacatctggcagagccctgaatatgtacgtgatgggatggtttcggcaggctcccggcaacgagcgggaatttgtggccgctacaagcagcagcggcggcagcacaagctaccccgattctgtgaagggcagattcacaatctcccgcgataatgccaagaatactgtgtacctgcagatgaatagtctgaagcctgaagatacagccgcctacagatgtgccgccagcccctacgtgtccacccccaccatgaacatcctggaagagtacagatactggggcctgggaacacaagtgacagtgtccagcggtaccggcggaggcggatctggcggcggaggtagcggtggcggaggatctgaattcgacatccagatgacacagagccctagcagcctgtctgccagcgtgggagacagagtgaccatcacatgcaaggccagcgaccacatcaacaactggctggcctggtatcagcagaagcctggacaggcccctaagctgctgatctacggcgctaccacactggaaacaggcgtgcccagcagattttctggcagcggctctggcaccgactacaccctgacaatatccagcctccagcctgaggacttcgccacctactactgtcagcagagctggaacaccccttggacattcggccagggcaccaagctggaaatcaagagactcgagatccagaaccctgatcctgccgtgtaccagctgcgggatagcaagagcagcgacaagagcgtgtgtctgttcaccgacttcgacagccagaccaacgtgtcccagagcaaggactccgacgtgtacatcaccgataagtgcgtgctggacatgcggagcatggacttcaagagcaactccgccgtggcctggtccaacaagtccgatttcgcctgcgccaacgccttcaacaacagcattatccccgaggacacattcttcccaagccccgagagcagctgcgacgtgaagctggtggaaaagagcttcgagacagacaccaacctgaacttccagaacctgagcgtgatcggcttcagaatcctgctgctgaaagtggccggctttaacctgctgatgaccctgcggctgtggtccagccgcgccaagagaagcggatctggcgtgaagcagaccctgaatttcgacctgctgaagctggctggcgacgtggaatccaacccaggccctactagtatggactggatttggcgcatccttttccttgtcggcgctgctaccggcgcccattccgggccccaggttcagctgcaagagtctggcggaggacttgctcaagctggcggaagcctgagactgtcttgtgccgcctctggcagaaccttcagcatgggctggtttagacaggcccctggcaaagagagagagttcgtcgccgccatcacatacagcggcggcagcccttactacgcctcttctgtcagaggccggttcaccatcagccgggacaacgccaagaacaccgtgtacctccagatgaacagcctgaagccagaggacaccgccgtgtactactgtgccgccaatccaacctacggcagcgactggaatgccgagaattggggccagggcacccaagtgacagtgtctagtggatccggcggcggaggatctggcggaggcggatctgggggcggaggctctttcgaacaagttcagcttcaacagcctggcgctgagctggtcaaacctggcgcttctgtgaagatgagctgcaaagccagcggctacgccttcagcagctactggatcaactggatgaagcagaaacccggccagggactcgaatggatcggccaaatctatcccggcgacggcgacaccaactacaacggcaagttcaagggcagagccacactgaccgccgatacctctagcagcacagcctacatgcagctgagcagcctgaccagcgaagatagcgccgtgtacttctgtgcccggtccatcacaacagtcgtgggctgcgctatggactattggggccagggaacaagcgtgaccgtgtctagtacgcgtgaggacctgaagaacgtgttcccacctgaggtggccgtgttcgagcctagcgaggccgagatcagccacacccagaaagccaccctcgtgtgcctggctaccggcttctaccccgaccatgtggaactgtcttggtgggtcaacggcaaagaggtgcacagcggcgtgtgtaccgacccccagccactgaaagaacagcccgccctgaacgacagccggtactgcctgagcagcagactgagagtgtccgccaccttctggcagaacccccggaaccacttcagatgccaggtgcagttctacggcctgagcgagaacgacgagtggacccaggacagagccaagcccgtgacccagatcgtgtctgccgaagcctggggcagagccgattgcggctttaccagcgagagctaccagcagggcgtgctgagcgccaccatcctgtacgagatcctgctgggcaaggccaccctgtacgccgtgctggtgtctgccctggtgctgatggctatggtcaagcggaaggacagccgggga

SEQ ID NO: 5550 - DNA, 3390 bp, Artificial Sequence
  Synthetic Polynucloetide
atggccttaccagtgaccgccttgctcctgccgctggccttgctgctccacgccgccaggccggaagtgcaactggtggaatctggagggggaagcgtgcaggcaggcggatctctgagactgtcctgcaccacatctggcagagccctgaatatgtacgtgatgggatggtttcggcaggctcccggcaacgagcgggaatttgtggccgctacaagcagcagcggcggcagcacaagctaccccgattctgtgaagggcagattcacaatctcccgcgataatgccaagaatactgtgtacctgcagatgaatagtctgaagcctgaagatacagccgcctacagatgtgccgccagcccctacgtgtccacccccaccatgaacatcctggaagagtacagatactggggcctgggaacacaagtgacagtgtccagcggtaccggcggaggcggatctggcggcggaggtagcggtggcggaggatctgaattcgacatccagatgacacagagccctagcagcctgtctgccagcgtgggagacagagtgaccatcacatgcaaggccagcgaccacatcaacaactggctggcctggtatcagcagaagcctggacaggcccctaagctgctgatctacggcgctaccacactggaaacaggcgtgcccagcagattttctggcagcggctctggcaccgactacaccctgacaatatccagcctccagcctgaggacttcgccacctactactgtcagcagagctggaacaccccttggacattcggccagggcaccaagctggaaatcaagagactcgagatccagaaccctgatcctgccgtgtaccagctgcgggatagcaagagcagcgacaagagcgtgtgtctgttcaccgacttcgacagccagaccaacgtgtcccagagcaaggactccgacgtgtacatcaccgataagtgcgtgctggacatgcggagcatggacttcaagagcaactccgccgtggcctggtccaacaagtccgatttcgcctgcgccaacgccttcaacaacagcattatccccgaggacacattcttcccaagccccgagagcagctgcgacgtgaagctggtggaaaagagcttcgagacagacaccaacctgaacttccagaacctgagcgtgatcggcttcagaatcctgctgctgaaagtggccggctttaacctgctgatgaccctgcggctgtggtccagccgcgccaagagaagcggatctggcgtgaagcagaccctgaatttcgacctgctgaagctggctggcgacgtggaatccaacccaggccctactagtatggactggatttggcgcatccttttccttgtcggcgctgctaccggcgcccattccgggccccaggttcagctgcaagagtctggcggaggacttgctcaagctggcggaagcctgagactgtcttgtgccgcctctggcagaaccttcagcatgggctggtttagacaggcccctggcaaagagagagagttcgtcgccgccatcacatacagcggcggcagcccttactacgcctcttctgtcagaggccggttcaccatcagccgggacaacgccaagaacaccgtgtacctccagatgaacagcctgaagccagaggacaccgccgtgtactactgtgccgccaatccaacctacggcagcgactggaatgccgagaattggggccagggcacccaagtgacagtgtctagtggatccggcggcggaggatctggcggaggcggatctgggggcggaggctctttcgaacaagttcagcttcaacagcctggcgctgagctggtcaaacctggcgcttctgtgaagatgagctgcaaagccagcggctacgccttcagcagctactggatcaactggatgaagcagaaacccggccagggactcgaatggatcggccaaatctatcccggcgacggcgacaccaactacaacggcaagttcaagggcagagccacactgaccgccgatacctctagcagcacagcctacatgcagctgagcagcctgaccagcgaagatagcgccgtgtacttctgtgcccggtccatcacaacagtcgtgggctgcgctatggactattggggccagggaacaagcgtgaccgtgtctagtacgcgtgaggacctgaagaacgtgttcccacctgaggtggccgtgttcgagcctagcgaggccgagatcagccacacccagaaagccaccctcgtgtgcctggctaccggcttctaccccgaccatgtggaactgtcttggtgggtcaacggcaaagaggtgcacagcggcgtgtgtaccgacccccagccactgaaagaacagcccgccctgaacgacagccggtactgcctgagcagcagactgagagtgtccgccaccttctggcagaacccccggaaccacttcagatgccaggtgcagttctacggcctgagcgagaacgacgagtggacccaggacagagccaagcccgtgacccagatcgtgtctgccgaagcctggggcagagccgattgcggctttaccagcgagagctaccagcagggcgtgctgagcgccaccatcctgtacgagatcctgctgggcaaggccaccctgtacgccgtgctggtgtctgccctggtgctgatggctatggtcaagcggaaggacagccggggaagggccaagcgatctggatctggagcaacaaacttctcactactcaaacaagcaggtgacgtggaggagaatcccgggccttctagaggcgggatccacaccatggctacctacgaggtgctgtgcgaggtggcaagaaagctgggcaccgacgacagagaagtggtgctgttcctgctgaacgtgttcatccctcagcctacactggcccagctgatcggtgcactgagagccctgaaagaggaaggccggctgacctttcctctgctggccgaatgcctgttcagagccggaagaagggatctgctgcgggacctgctgcatctggaccccagatttctggaaagacacctggccggcaccatgagctacttcagcccttaccagctgaccgtgctgcacgttgacggcgaactgtgcgccagagatattcggagcctgatcttcctgagcaaggacaccatcggcagccggtctacccctcagacatttctgcactgggtgtactgcatggaaaacctggacctgctcggccccacagatgtggatgccctgatgtccatgctgagaagcctgagcagagtggacctccagagacaggtgcagacactgatgggactgcacctgagcggacctagccacagccagcactacagacacacccct

SEQ ID NO: 5551 - DNA, 3414 bp, Artificial Sequence
  Synthetic Polynucloetide
atggccttaccagtgaccgccttgctcctgccgctggccttgctgctccacgccgccaggccggaagtgcaactggtggaatctggagggggaagcgtgcaggcaggcggatctctgagactgtcctgcaccacatctggcagagccctgaatatgtacgtgatgggatggtttcggcaggctcccggcaacgagcgggaatttgtggccgctacaagcagcagcggcggcagcacaagctaccccgattctgtgaagggcagattcacaatctcccgcgataatgccaagaatactgtgtacctgcagatgaatagtctgaagcctgaagatacagccgcctacagatgtgccgccagcccctacgtgtccacccccaccatgaacatcctggaagagtacagatactggggcctgggaacacaagtgacagtgtccagcggtaccggcggaggcggatctggcggcggaggtagcggtggcggaggatctgaattcgacatccagatgacacagagccctagcagcctgtctgccagcgtgggagacagagtgaccatcacatgcaaggccagcgaccacatcaacaactggctggcctggtatcagcagaagcctggacaggcccctaagctgctgatctacggcgctaccacactggaaacaggcgtgcccagcagattttctggcagcggctctggcaccgactacaccctgacaatatccagcctccagcctgaggacttcgccacctactactgtcagcagagctggaacaccccttggacattcggccagggcaccaagctggaaatcaagagactcgaggacctgaagaacgtgttcccacctgaggtggccgtgttcgagcctagcgaggccgagatcagccacacccagaaagccaccctcgtgtgcctggctaccggcttctaccccgaccatgtggaactgtcttggtgggtcaacggcaaagaggtgcacagcggcgtgtctaccgacccccagccactgaaagaacagcccgccctgaacgacagccggtactgcctgagcagcagactgagagtgtccgccaccttctggcagaacccccggaaccacttcagatgccaggtgcagttctacggcctgagcgagaacgacgagtggacccaggacagagccaagcccgtgacccagatcgtgtctgccgaagcctggggcagagccgattgcggctttaccagcgagagctaccagcagggcgtgctgagcgccaccatcctgtacgagatcctgctgggcaaggccaccctgtacgccgtgctggtgtctgccctggtgctgatggctatggtcaagcggaaggacagccggggaagggccaagcgatctggatctggagcaacaaacttctcactactcaaacaagcaggtgacgtggaggagaatcccgggcctactagtatggactggatttggcgcatccttttccttgtcggcgctgctaccggcgcccattccgggccccaggttcagctgcaagagtctggcggaggacttgctcaagctggcggaagcctgagactgtcttgtgccgcctctggcagaaccttcagcatgggctggtttagacaggcccctggcaaagagagagagttcgtcgccgccatcacatacagcggcggcagcccttactacgcctcttctgtcagaggccggttcaccatcagccgggacaacgccaagaacaccgtgtacctccagatgaacagcctgaagccagaggacaccgccgtgtactactgtgccgccaatccaacctacggcagcgactggaatgccgagaattggggccagggcacccaagtgacagtgtctagtggatccggcggcggaggatctggcggaggcggatctgggggcggaggctctttcgaacaagttcagcttcaacagcctggcgctgagctggtcaaacctggcgcttctgtgaagatgagctgcaaagccagcggctacgccttcagcagctactggatcaactggatgaagcagaaacccggccagggactcgaatggatcggccaaatctatcccggcgacggcgacaccaactacaacggcaagttcaagggcagagccacactgaccgccgatacctctagcagcacagcctacatgcagctgagcagcctgaccagcgaagatagcgccgtgtacttctgtgcccggtccatcacaacagtcgtgggctgcgctatggactattggggccagggaacaagcgtgaccgtgtctagtacgcgtatccagaaccctgatcctgccgtgtaccagctgcgggatagcaagagcagcgacaagagcgtgtgtctgttcaccgacttcgacagccagaccaacgtgtcccagagcaaggactccgacgtgtacatcaccgataagaccgtgctggacatgcggagcatggacttcaagagcaactccgccgtggcctggtccaacaagtccgatttcgcctgcgccaacgccttcaacaacagcattatccccgaggacacattcttcccaagccccgagagcagctgcgacgtgaagctggtggaaaagagcttcgagacagacaccaacctgaacttccagaacctgagcgtgatcggcttcagaatcctgctgctgaaagtggccggctttaacctgctgatgaccctgcggctgtggtccagccgcgccaagagaagcggatctggcgtgaagcagaccctgaatttcgacctgctgaagctggctggcgacgtggaatccaacccaggcccttctagaggccatatgaccgagtacaagcccacggtgcgcctcgccacccgcgacgacgtccccagggccgtacgcaccctcgccgccgcgttcgccgactaccccgccacgcgccacaccgtcgatccggaccgccacatcgagcgggtcaccgagctgcaagaactcttcctcacgcgcgtcgggctcgacatcggcaaggtgtgggtcgcggacgacggcgccgcggtggcggtctggaccacgccggagagcgtcgaagcgggggcggtgttcgccgagatcggcccgcgcatggccgagttgagcggttcccggctggccgcgcagcaacagatggaaggcctcctggcgccgcaccggcccaaggagcccgcgtggttcctggccaccgtcggcgtctcgcccgaccaccagggcaagggtctgggcagcgccgtcgtgctccccggagtggaggcggccgagcgcgccggggtgcccgccttcctggagacctccgcgccccgcaacctccccttctacgagcggctcggcttcaccgtcaccgccgacgtcgaggtgcccgaaggaccgcgcacctggtgcatgacccgcaagcccggtgcctga

SEQ ID NO: 5552 - DNA, 3660 bp, Artificial Sequence
  Synthetic Polynucloetide
atggccttaccagtgaccgccttgctcctgccgctggccttgctgctccacgccgccaggccggaagtgcaactggtggaatctggagggggaagcgtgcaggcaggcggatctctgagactgtcctgcaccacatctggcagagccctgaatatgtacgtgatgggatggtttcggcaggctcccggcaacgagcgggaatttgtggccgctacaagcagcagcggcggcagcacaagctaccccgattctgtgaagggcagattcacaatctcccgcgataatgccaagaatactgtgtacctgcagatgaatagtctgaagcctgaagatacagccgcctacagatgtgccgccagcccctacgtgtccacccccaccatgaacatcctggaagagtacagatactggggcctgggaacacaagtgacagtgtccagcggtaccggcggaggcggatctggcggcggaggtagcggtggcggaggatctgaattcgacatccagatgacacagagccctagcagcctgtctgccagcgtgggagacagagtgaccatcacatgcaaggccagcgaccacatcaacaactggctggcctggtatcagcagaagcctggacaggcccctaagctgctgatctacggcgctaccacactggaaacaggcgtgcccagcagattttctggcagcggctctggcaccgactacaccctgacaatatccagcctccagcctgaggacttcgccacctactactgtcagcagagctggaacaccccttggacattcggccagggcaccaagctggaaatcaagagactcgaggacctgaagaacgtgttcccacctgaggtggccgtgttcgagcctagcgaggccgagatcagccacacccagaaagccaccctcgtgtgcctggctaccggcttctaccccgaccatgtggaactgtcttggtgggtcaacggcaaagaggtgcacagcggcgtgtctaccgacccccagccactgaaagaacagcccgccctgaacgacagccggtactgcctgagcagcagactgagagtgtccgccaccttctggcagaacccccggaaccacttcagatgccaggtgcagttctacggcctgagcgagaacgacgagtggacccaggacagagccaagcccgtgacccagatcgtgtctgccgaagcctggggcagagccgattgcggctttaccagcgagagctaccagcagggcgtgctgagcgccaccatcctgtacgagatcctgctgggcaaggccaccctgtacgccgtgctggtgtctgccctggtgctgatggctatggtcaagcggaaggacagccggggaagggccaagcgatctggatctggagcaacaaacttctcactactcaaacaagcaggtgacgtggaggagaatcccgggcctactagtatggactggatttggcgcatccttttccttgtcggcgctgctaccggcgcccattccgggccccaggttcagctgcaagagtctggcggaggacttgctcaagctggcggaagcctgagactgtcttgtgccgcctctggcagaaccttcagcatgggctggtttagacaggcccctggcaaagagagagagttcgtcgccgccatcacatacagcggcggcagcccttactacgcctcttctgtcagaggccggttcaccatcagccgggacaacgccaagaacaccgtgtacctccagatgaacagcctgaagccagaggacaccgccgtgtactactgtgccgccaatccaacctacggcagcgactggaatgccgagaattggggccagggcacccaagtgacagtgtctagtggatccggcggcggaggatctggcggaggcggatctgggggcggaggctctttcgaacaagttcagcttcaacagcctggcgctgagctggtcaaacctggcgcttctgtgaagatgagctgcaaagccagcggctacgccttcagcagctactggatcaactggatgaagcagaaacccggccagggactcgaatggatcggccaaatctatcccggcgacggcgacaccaactacaacggcaagttcaagggcagagccacactgaccgccgatacctctagcagcacagcctacatgcagctgagcagcctgaccagcgaagatagcgccgtgtacttctgtgcccggtccatcacaacagtcgtgggctgcgctatggactattggggccagggaacaagcgtgaccgtgtctagtacgcgtgagcagaaactgatctcggaagaggatgggagcggcaccccattcccttctctggcccctcccatcatgctgctggtggacggcaagcagcagatggtggtcgtgtgcctggtgctggatgtggccccacctggactggacagccccatctggtttagcgccggcaatggctctgccctggacgcctttacctacggcccaagccctgccaccgatggcacctggacaaatctggcccacctgagcctgcccagcgaggaactggcttcttgggagcctctcgtgtgccacacaggacctggcgctgagggacacagcagatccacccagcctatgcacctgtctggcgaggccagcaccgccagaacctgtcctcaggaacctctgagaggcacccctggcggagcactgtggctgggagtgctgagactgctgctgttcaagctgctgctgtttgacctgctgctgacctgctcctgtctgtgcgatcctgccggccctctgccttctcctgccaccaccacaagactgagagccctgggcagccacagactgcaccctgccacagagacaggcggcagagaggccacaagcagccctagaccccagcccagagacagaagatggggcgataccccccctggcagaaagcctggatctccagtccgcgccaagagaagcggatctggcgtgaagcagaccctgaatttcgacctgctgaagctggctggcgacgtggaatccaacccaggcccttctagaggccatatgaccgagtacaagcccacggtgcgcctcgccacccgcgacgacgtccccagggccgtacgcaccctcgccgccgcgttcgccgactaccccgccacgcgccacaccgtcgatccggaccgccacatcgagcgggtcaccgagctgcaagaactcttcctcacgcgcgtcgggctcgacatcggcaaggtgtgggtcgcggacgacggcgccgcggtggcggtctggaccacgccggagagcgtcgaagcgggggcggtgttcgccgagatcggcccgcgcatggccgagttgagcggttcccggctggccgcgcagcaacagatggaaggcctcctggcgccgcaccggcccaaggagcccgcgtggttcctggccaccgtcggcgtctcgcccgaccaccagggcaagggtctgggcagcgccgtcgtgctccccggagtggaggcggccgagcgcgccggggtgcccgccttcctggagacctccgcgccccgcaacctccccttctacgagcggctcggcttcaccgtcaccgccgacgtcgaggtgcccgaaggaccgcgcacctggtgcatgacccgcaagcccggtgcctga

SEQ ID NO: 5553 - DNA, 3525 bp, Artificial Sequence
  Synthetic Polynucloetide
atggccttaccagtgaccgccttgctcctgccgctggccttgctgctccacgccgccaggccggaagtgcaactggtggaatctggagggggaagcgtgcaggcaggcggatctctgagactgtcctgcaccacatctggcagagccctgaatatgtacgtgatgggatggtttcggcaggctcccggcaacgagcgggaatttgtggccgctacaagcagcagcggcggcagcacaagctaccccgattctgtgaagggcagattcacaatctcccgcgataatgccaagaatactgtgtacctgcagatgaatagtctgaagcctgaagatacagccgcctacagatgtgccgccagcccctacgtgtccacccccaccatgaacatcctggaagagtacagatactggggcctgggaacacaagtgacagtgtccagcggtaccggcggaggcggatctggcggcggaggtagcggtggcggaggatctgaattcgacatccagatgacacagagccctagcagcctgtctgccagcgtgggagacagagtgaccatcacatgcaaggccagcgaccacatcaacaactggctggcctggtatcagcagaagcctggacaggcccctaagctgctgatctacggcgctaccacactggaaacaggcgtgcccagcagattttctggcagcggctctggcaccgactacaccctgacaatatccagcctccagcctgaggacttcgccacctactactgtcagcagagctggaacaccccttggacattcggccagggcaccaagctggaaatcaagagactcgaggggaaaccaattcccaaccctcttctgggactggattcaaccggcagcggcgacaagcagctggacgccgacgtgtcccccaagcctaccatcttcctgccctctatcgccgagacaaagctccagaaggccggcacctacctgtgcctgctggaaaagttcttcccagatgtgattaagatccactggcaggaaaagaagtccaacaccatcctgggcagccaggaaggcaacaccatgaagaccaacgacacctacatgaagttcagctggctgaccgtgcccgagaagtccctggacaaagaacacagatgcatcgtgcggcacgaaaacaacaagaacggcgtggaccaggaaatcatcttcccacccatcaagaccgatgtgattacaatggaccccaaggacaactgctccaaggacgccaacgataccctgctgctccagctgaccaacaccagcgcctactacatgtacttgttgctgctgctgaagtccgtggtgtacttcgccatcatcacatgctgcctgctgcggagaaccgccttctgctgcaacggcgagaagtctagggccaagcgatctggatctggagcaacaaacttctcactactcaaacaagcaggtgacgtggaggagaatcccgggcctactagtatggactggatttggcgcatccttttccttgtcggcgctgctaccggcgcccattccgggccccaggttcagctgcaagagtctggcggaggacttgctcaagctggcggaagcctgagactgtcttgtgccgcctctggcagaaccttcagcatgggctggtttagacaggcccctggcaaagagagagagttcgtcgccgccatcacatacagcggcggcagcccttactacgcctcttctgtcagaggccggttcaccatcagccgggacaacgccaagaacaccgtgtacctccagatgaacagcctgaagccagaggacaccgccgtgtactactgtgccgccaatccaacctacggcagcgactggaatgccgagaattggggccagggcacccaagtgacagtgtctagtggatccggcggcggaggatctggcggaggcggatctgggggcggaggctctttcgaacaagttcagcttcaacagcctggcgctgagctggtcaaacctggcgcttctgtgaagatgagctgcaaagccagcggctacgccttcagcagctactggatcaactggatgaagcagaaacccggccagggactcgaatggatcggccaaatctatcccggcgacggcgacaccaactacaacggcaagttcaagggcagagccacactgaccgccgatacctctagcagcacagcctacatgcagctgagcagcctgaccagcgaagatagcgccgtgtacttctgtgcccggtccatcacaacagtcgtgggctgcgctatggactattggggccagggaacaagcgtgaccgtgtctagtacgcgtgagcagaaactgatctcggaagaggatgggagcggcagccagcctcacaccaagcccagcgtgttcgtgatgaagaacggcaccaacgtggcctgcctcgtgaaagagttctaccccaaggacatcaggatcaacctggtgtccagcaagaagatcaccgagttcgaccccgccatcgtgatctcccccagcggcaagtacaacgccgtgaagctggggaagtacgaggacagcaacagcgtgacctgctccgtgcagcacgacaacaagaccgtgcacagcaccgactttgaagtgaaaaccgactccaccgaccacgtgaagcccaaagagacagagaacaccaagcagcccagcaagagctgccacaagcccaaggccatcgtgcacaccgagaaagtgaacatgatgagcctgaccgtgctgggcctgcggatgctgttcgccaaaaccgtggccgtgaacttcctgctgaccgccaagctgttcttcctccgcgccaagagaagcggatctggcgtgaagcagaccctgaatttcgacctgctgaagctggctggcgacgtggaatccaacccaggcccttctagaggccatatgaccgagtacaagcccacggtgcgcctcgccacccgcgacgacgtccccagggccgtacgcaccctcgccgccgcgttcgccgactaccccgccacgcgccacaccgtcgatccggaccgccacatcgagcgggtcaccgagctgcaagaactcttcctcacgcgcgtcgggctcgacatcggcaaggtgtgggtcgcggacgacggcgccgcggtggcggtctggaccacgccggagagcgtcgaagcgggggcggtgttcgccgagatcggcccgcgcatggccgagttgagcggttcccggctggccgcgcagcaacagatggaaggcctcctggcgccgcaccggcccaaggagcccgcgtggttcctggccaccgtcggcgtctcgcccgaccaccagggcaagggtctgggcagcgccgtcgtgctccccggagtggaggcggccgagcgcgccggggtgcccgccttcctggagacctccgcgccccgcaacctccccttctacgagcggctcggcttcaccgtcaccgccgacgtcgaggtgcccgaaggaccgcgcacctggtgcatgacccgcaagcccggtgcctga

SEQ ID NO: 5554 - DNA, 2736 bp, Artificial Sequence
  Synthetic Polynucloetide
atggccttaccagtgaccgccttgctcctgccgctggccttgctgctccacgccgccaggccggaagtgcaactggtggaatctggagggggaagcgtgcaggcaggcggatctctgagactgtcctgcaccacatctggcagagccctgaatatgtacgtgatgggatggtttcggcaggctcccggcaacgagcgggaatttgtggccgctacaagcagcagcggcggcagcacaagctaccccgattctgtgaagggcagattcacaatctcccgcgataatgccaagaatactgtgtacctgcagatgaatagtctgaagcctgaagatacagccgcctacagatgtgccgccagcccctacgtgtccacccccaccatgaacatcctggaagagtacagatactggggcctgggaacacaagtgacagtgtccagcggtaccggcggaggcggatctggcggcggaggtagcggtggcggaggatctgaattcgacatccagatgacacagagccctagcagcctgtctgccagcgtgggagacagagtgaccatcacatgcaaggccagcgaccacatcaacaactggctggcctggtatcagcagaagcctggacaggcccctaagctgctgatctacggcgctaccacactggaaacaggcgtgcccagcagattttctggcagcggctctggcaccgactacaccctgacaatatccagcctccagcctgaggacttcgccacctactactgtcagcagagctggaacaccccttggacattcggccagggcaccaagctggaaatcaagagactcgagagccagcctcacaccaagcccagcgtgttcgtgatgaagaacggcaccaacgtggcctgcctcgtgaaagagttctaccccaaggacatcaggatcaacctggtgtccagcaagaagatcaccgagttcgaccccgccatcgtgatctcccccagcggcaagtacaacgccgtgaagctggggaagtacgaggacagcaacagcgtgacctgctccgtgcagcacgacaacaagaccgtgcacagcaccgactttgaagtgaaaaccgactccaccgaccacgtgaagcccaaagagacagagaacaccaagcagcccagcaagagctgccacaagcccaaggccatcgtgcacaccgagaaagtgaacatgatgagcctgaccgtgctgggcctgcggatgctgttcgccaaaaccgtggccgtgaacttcctgctgaccgccaagctgttcttcctcagggccaagcgatctggatctggagcaacaaacttctcactactcaaacaagcaggtgacgtggaggagaatcccgggcctactagtatggactggatttggcgcatccttttccttgtcggcgctgctaccggcgcccattccgggccccaggttcagctgcaagagtctggcggaggacttgctcaagctggcggaagcctgagactgtcttgtgccgcctctggcagaaccttcagcatgggctggtttagacaggcccctggcaaagagagagagttcgtcgccgccatcacatacagcggcggcagcccttactacgcctcttctgtcagaggccggttcaccatcagccgggacaacgccaagaacaccgtgtacctccagatgaacagcctgaagccagaggacaccgccgtgtactactgtgccgccaatccaacctacggcagcgactggaatgccgagaattggggccagggcacccaagtgacagtgtctagtggatccggcggcggaggatctggcggaggcggatctgggggcggaggctctttcgaacaagttcagcttcaacagcctggcgctgagctggtcaaacctggcgcttctgtgaagatgagctgcaaagccagcggctacgccttcagcagctactggatcaactggatgaagcagaaacccggccagggactcgaatggatcggccaaatctatcccggcgacggcgacaccaactacaacggcaagttcaagggcagagccacactgaccgccgatacctctagcagcacagcctacatgcagctgagcagcctgaccagcgaagatagcgccgtgtacttctgtgcccggtccatcacaacagtcgtgggctgcgctatggactattggggccagggaacaagcgtgaccgtgtctagtacgcgtgacaagcagctggacgccgacgtgtcccccaagcctaccatcttcctgccctctatcgccgagacaaagctccagaaggccggcacctacctgtgcctgctggaaaagttcttcccagatgtgattaagatccactggcaggaaaagaagtccaacaccatcctgggcagccaggaaggcaacaccatgaagaccaacgacacctacatgaagttcagctggctgaccgtgcccgagaagtccctggacaaagaacacagatgcatcgtgcggcacgaaaacaacaagaacggcgtggaccaggaaatcatcttcccacccatcaagaccgatgtgattacaatggaccccaaggacaactgctccaaggacgccaacgataccctgctgctccagctgaccaacaccagcgcctactacatgtacttgttgctgctgctgaagtccgtggtgtacttcgccatcatcacatgctgcctgctgcggagaaccgccttctgctgcaacggcgagaagtct

SEQ ID NO: 5555 - DNA, 3945 bp, Artificial Sequence
  Synthetic Polynucloetide
atggccttaccagtgaccgccttgctcctgccgctggccttgctgctccacgccgccaggccggaagtgcaactggtggaatctggagggggaagcgtgcaggcaggcggatctctgagactgtcctgcaccacatctggcagagccctgaatatgtacgtgatgggatggtttcggcaggctcccggcaacgagcgggaatttgtggccgctacaagcagcagcggcggcagcacaagctaccccgattctgtgaagggcagattcacaatctcccgcgataatgccaagaatactgtgtacctgcagatgaatagtctgaagcctgaagatacagccgcctacagatgtgccgccagcccctacgtgtccacccccaccatgaacatcctggaagagtacagatactggggcctgggaacacaagtgacagtgtccagcggtaccggcggaggcggatctggcggcggaggtagcggtggcggaggatctgaattcgacatccagatgacacagagccctagcagcctgtctgccagcgtgggagacagagtgaccatcacatgcaaggccagcgaccacatcaacaactggctggcctggtatcagcagaagcctggacaggcccctaagctgctgatctacggcgctaccacactggaaacaggcgtgcccagcagattttctggcagcggctctggcaccgactacaccctgacaatatccagcctccagcctgaggacttcgccacctactactgtcagcagagctggaacaccccttggacattcggccagggcaccaagctggaaatcaagagaggacagcctaaggccaatcctaccgtgacactgttccctccaagcagcgaagaactccaggccaacaaggccacacttgtgtgcctgatctccgacttctaccctggggctgtgacagtggcttggaaggccgatggatctcctgtgaaagccggcgtggaaaccaccaagccatccaagcagagcaacaacaaatacgccgccagctcctacctgagcctgacacctgagcagtggaagtcccacagatcctacagctgccaagtgacccacgaaggcagcaccgtggaaaagacagtggcccctacagagtgcagcggatcccagagcttcggcctgctggaccccaagctgtgctacctgctggatggcatcctgttcatctacggcgtgatcctgaccgccctgttcctgagagtgaagttcagcagaagcgccgacgcccctgcctaccagcagggacagaaccaactgtacaacgagctgaacctgggcagacgggaagagtacgacgtgctggacaagcggagaggcagggaccctgagatgggcggaaagccccagcggagaaagaacccccaggaaggactgtataacgaactccagaaagacaagatggccgaagcctacagcgagatcggcatgaagggcgagcggagaagaggcaagggccacgatggcctgtaccagggcctgagcaccgccaccaaggacacctatgacgccctgcacatgcaggccctgcctccaagaagggccaagcgatctggatctggagcaacaaacttctcactactcaaacaagcaggtgacgtggaggagaatcccgggcctactagtatggactggatttggcgcatccttttccttgtcggcgctgctaccggcgcccattccgggccccaggttcagctgcaagagtctggcggaggacttgctcaagctggcggaagcctgagactgtcttgtgccgcctctggcagaaccttcagcatgggctggtttagacaggcccctggcaaagagagagagttcgtcgccgccatcacatacagcggcggcagcccttactacgcctcttctgtcagaggccggttcaccatcagccgggacaacgccaagaacaccgtgtacctccagatgaacagcctgaagccagaggacaccgccgtgtactactgtgccgccaatccaacctacggcagcgactggaatgccgagaattggggccagggcacccaagtgacagtgtctagtggatccggcggcggaggatctggcggaggcggatctgggggcggaggctctttcgaacaagttcagcttcaacagcctggcgctgagctggtcaaacctggcgcttctgtgaagatgagctgcaaagccagcggctacgccttcagcagctactggatcaactggatgaagcagaaacccggccagggactcgaatggatcggccaaatctatcccggcgacggcgacaccaactacaacggcaagttcaagggcagagccacactgaccgccgatacctctagcagcacagcctacatgcagctgagcagcctgaccagcgaagatagcgccgtgtacttctgtgcccggtccatcacaacagtcgtgggctgcgctatggactattggggccagggaacaagcgtgaccgtgtctagtgcctctacaaagggaccctccgtgtttcctctggctcccagcagcaagtctacaagcggaggaacagccgctctgggctgcctggtcaaggattactttcccgagcctgtgaccgtgtcctggaatagcggagcactgacaagcggcgtgcacacctttccagccgtgctgcaaagcagcggcctgtactctctgagcagcgtggtcacagtgcctagctctagcctgggcacccagacctacatctgcaatgtgaaccacaagcctagcaacaccaaggtggacaagagagtggaacccaagagctgtggtacccagagttttgggttgttggaccctaaattgtgctatctgttggacggaatcctgttcatttacggagtgatcctgaccgcattgttcctgcgggttaagttttccagatccgcagacgcacccgcttaccaacaagggcagaaccaactctacaatgaacttaatttggggcggagggaagagtacgacgttctggacaaaaggaggggacgagatcccgagatgggcggaaagcctcagcgaaggaagaatccgcaagaggggctttataacgaactccagaaagataaaatggcagaagcctatagtgagattgggatgaagggagaaaggaggaggggtaaaggtcacgatgggttgtaccaaggattgagcacagccactaaagatacctatgatgcgctccacatgcaggccctgccgccaagacgcgccaagagaagcggatctggcgtgaagcagaccctgaatttcgacctgctgaagctggctggcgacgtggaatccaacccaggcccttctagaggccatatgaccgagtacaagcccacggtgcgcctcgccacccgcgacgacgtccccagggccgtacgcaccctcgccgccgcgttcgccgactaccccgccacgcgccacaccgtcgatccggaccgccacatcgagcgggtcaccgagctgcaagaactcttcctcacgcgcgtcgggctcgacatcggcaaggtgtgggtcgcggacgacggcgccgcggtggcggtctggaccacgccggagagcgtcgaagcgggggcggtgttcgccgagatcggcccgcgcatggccgagttgagcggttcccggctggccgcgcagcaacagatggaaggcctcctggcgccgcaccggcccaaggagcccgcgtggttcctggccaccgtcggcgtctcgcccgaccaccagggcaagggtctgggcagcgccgtcgtgctccccggagtggaggcggccgagcgcgccggggtgcccgccttcctggagacctccgcgccccgcaacctccccttctacgagcggctcggcttcaccgtcaccgccgacgtcgaggtgcccgaaggaccgcgcacctggtgcatgacccgcaagcccggtgcctga

SEQ ID NO: 5556 - DNA, 3300 bp, Artificial Sequence
  Synthetic Polynucloetide
atggccttaccagtgaccgccttgctcctgccgctggccttgctgctccacgccgccaggccggaagtgcaactggtggaatctggagggggaagcgtgcaggcaggcggatctctgagactgtcctgcaccacatctggcagagccctgaatatgtacgtgatgggatggtttcggcaggctcccggcaacgagcgggaatttgtggccgctacaagcagcagcggcggcagcacaagctaccccgattctgtgaagggcagattcacaatctcccgcgataatgccaagaatactgtgtacctgcagatgaatagtctgaagcctgaagatacagccgcctacagatgtgccgccagcccctacgtgtccacccccaccatgaacatcctggaagagtacagatactggggcctgggaacacaagtgacagtgtccagcggtaccggcggaggcggatctggcggcggaggtagcggtggcggaggatctgaattcgacatccagatgacacagagccctagcagcctgtctgccagcgtgggagacagagtgaccatcacatgcaaggccagcgaccacatcaacaactggctggcctggtatcagcagaagcctggacaggcccctaagctgctgatctacggcgctaccacactggaaacaggcgtgcccagcagattttctggcagcggctctggcaccgactacaccctgacaatatccagcctccagcctgaggacttcgccacctactactgtcagcagagctggaacaccccttggacattcggccagggcaccaagctggaaatcaagagactcgaggacctgaagaacgtgttcccacctgaggtggccgtgttcgagcctagcgaggccgagatcagccacacccagaaagccaccctcgtgtgcctggctaccggcttctaccccgaccatgtggaactgtcttggtgggtcaacggcaaagaggtgcacagcggcgtgtctaccgacccccagccactgaaagaacagcccgccctgaacgacagccggtactgcctgagcagcagactgagagtgtccgccaccttctggcagaacccccggaaccacttcagatgccaggtgcagttctacggcctgagcgagaacgacgagtggacccaggacagagccaagcccgtgacccagatcgtgtctgccgaagcctggggcagagccgattgcggatcccagagcttcggcctgctggaccccaagctgtgctacctgctggatggcatcctgttcatctacggcgtgatcctgaccgccctgttcctgagagtgaagttcagcagaagcgccgacgcccctgcctaccagcagggacagaaccaactgtacaacgagctgaacctgggcagacgggaagagtacgacgtgctggacaagcggagaggcagggaccctgagatgggcggaaagccccagcggagaaagaacccccaggaaggactgtataacgaactccagaaagacaagatggccgaagcctacagcgagatcggcatgaagggcgagcggagaagaggcaagggccacgatggcctgtaccagggcctgagcaccgccaccaaggacacctatgacgccctgcacatgcaggccctgcctccaagaagggccaagcgatctggatctggagcaacaaacttctcactactcaaacaagcaggtgacgtggaggagaatcccgggcctactagtatggactggatttggcgcatccttttccttgtcggcgctgctaccggcgcccattccgggccccaggttcagctgcaagagtctggcggaggacttgctcaagctggcggaagcctgagactgtcttgtgccgcctctggcagaaccttcagcatgggctggtttagacaggcccctggcaaagagagagagttcgtcgccgccatcacatacagcggcggcagcccttactacgcctcttctgtcagaggccggttcaccatcagccgggacaacgccaagaacaccgtgtacctccagatgaacagcctgaagccagaggacaccgccgtgtactactgtgccgccaatccaacctacggcagcgactggaatgccgagaattggggccagggcacccaagtgacagtgtctagtggatccggcggcggaggatctggcggaggcggatctgggggcggaggctctttcgaacaagttcagcttcaacagcctggcgctgagctggtcaaacctggcgcttctgtgaagatgagctgcaaagccagcggctacgccttcagcagctactggatcaactggatgaagcagaaacccggccagggactcgaatggatcggccaaatctatcccggcgacggcgacaccaactacaacggcaagttcaagggcagagccacactgaccgccgatacctctagcagcacagcctacatgcagctgagcagcctgaccagcgaagatagcgccgtgtacttctgtgcccggtccatcacaacagtcgtgggctgcgctatggactattggggccagggaacaagcgtgaccgtgtctagtacgcgtatccagaaccctgatcctgccgtgtaccagctgcgggatagcaagagcagcgacaagagcgtgtgtctgttcaccgacttcgacagccagaccaacgtgtcccagagcaaggactccgacgtgtacatcaccgataagaccgtgctggacatgcggagcatggacttcaagagcaactccgccgtggcctggtccaacaagtccgatttcgcctgcgccaacgccttcaacaacagcattatccccgaggacacattcttcccaagccccgagagcagctgcggtacccagagttttgggttgttggaccctaaattgtgctatctgttggacggaatcctgttcatttacggagtgatcctgaccgcattgttcctgcgggttaagttttccagatccgcagacgcacccgcttaccaacaagggcagaaccaactctacaatgaacttaatttggggcggagggaagagtacgacgttctggacaaaaggaggggacgagatcccgagatgggcggaaagcctcagcgaaggaagaatccgcaagaggggctttataacgaactccagaaagataaaatggcagaagcctatagtgagattgggatgaagggagaaaggaggaggggtaaaggtcacgatgggttgtaccaaggattgagcacagccactaaagatacctatgatgcgctccacatgcaggccctgccgccaaga

SEQ ID NO: 5557 - DNA, 3300 bp, Artificial Sequence
  Synthetic Polynucloetide
atggccttaccagtgaccgccttgctcctgccgctggccttgctgctccacgccgccaggccggaagtgcaactggtggaatctggagggggaagcgtgcaggcaggcggatctctgagactgtcctgcaccacatctggcagagccctgaatatgtacgtgatgggatggtttcggcaggctcccggcaacgagcgggaatttgtggccgctacaagcagcagcggcggcagcacaagctaccccgattctgtgaagggcagattcacaatctcccgcgataatgccaagaatactgtgtacctgcagatgaatagtctgaagcctgaagatacagccgcctacagatgtgccgccagcccctacgtgtccacccccaccatgaacatcctggaagagtacagatactggggcctgggaacacaagtgacagtgtccagcggtaccggcggaggcggatctggcggcggaggtagcggtggcggaggatctgaattcgacatccagatgacacagagccctagcagcctgtctgccagcgtgggagacagagtgaccatcacatgcaaggccagcgaccacatcaacaactggctggcctggtatcagcagaagcctggacaggcccctaagctgctgatctacggcgctaccacactggaaacaggcgtgcccagcagattttctggcagcggctctggcaccgactacaccctgacaatatccagcctccagcctgaggacttcgccacctactactgtcagcagagctggaacaccccttggacattcggccagggcaccaagctggaaatcaagagactcgaggacctgaagaacgtgttcccacctgaggtggccgtgttcgagcctagcaaggccgagatcgcccacacccagaaagccaccctcgtgtgcctggctaccggcttctaccccgaccatgtggaactgtcttggtgggtcaacggcaaagaggtgcacagcggcgtgtgtaccgacccccagccactgaaagaacagcccgccctgaacgacagccggtactgcctgagcagcagactgagagtgtccgccaccttctggcagaacccccggaaccacttcagatgccaggtgcagttctacggcctgagcgagaacgacgagtggacccaggacagagccaagcccgtgacccagatcgtgtctgccgaagcctggggcagagccgattgcggatcccagagcttcggcctgctggaccccaagctgtgctacctgctggatggcatcctgttcatctacggcgtgatcctgaccgccctgttcctgagagtgaagttcagcagaagcgccgacgcccctgcctaccagcagggacagaaccaactgtacaacgagctgaacctgggcagacgggaagagtacgacgtgctggacaagcggagaggcagggaccctgagatgggcggaaagccccagcggagaaagaacccccaggaaggactgtataacgaactccagaaagacaagatggccgaagcctacagcgagatcggcatgaagggcgagcggagaagaggcaagggccacgatggcctgtaccagggcctgagcaccgccaccaaggacacctatgacgccctgcacatgcaggccctgcctccaagaagggccaagcgatctggatctggagcaacaaacttctcactactcaaacaagcaggtgacgtggaggagaatcccgggcctactagtatggactggatttggcgcatccttttccttgtcggcgctgctaccggcgcccattccgggccccaggttcagctgcaagagtctggcggaggacttgctcaagctggcggaagcctgagactgtcttgtgccgcctctggcagaaccttcagcatgggctggtttagacaggcccctggcaaagagagagagttcgtcgccgccatcacatacagcggcggcagcccttactacgcctcttctgtcagaggccggttcaccatcagccgggacaacgccaagaacaccgtgtacctccagatgaacagcctgaagccagaggacaccgccgtgtactactgtgccgccaatccaacctacggcagcgactggaatgccgagaattggggccagggcacccaagtgacagtgtctagtggatccggcggcggaggatctggcggaggcggatctgggggcggaggctctttcgaacaagttcagcttcaacagcctggcgctgagctggtcaaacctggcgcttctgtgaagatgagctgcaaagccagcggctacgccttcagcagctactggatcaactggatgaagcagaaacccggccagggactcgaatggatcggccaaatctatcccggcgacggcgacaccaactacaacggcaagttcaagggcagagccacactgaccgccgatacctctagcagcacagcctacatgcagctgagcagcctgaccagcgaagatagcgccgtgtacttctgtgcccggtccatcacaacagtcgtgggctgcgctatggactattggggccagggaacaagcgtgaccgtgtctagtacgcgtatccagaaccctgatcctgccgtgtaccagctgcgggatagcaagagcagcgacaagagcgtgtgtctgttcaccgacttcgacagccagaccaacgtgtcccagagcaaggactccgacgtgtacatcaccgataagtgcgtgctggacatgcggagcatggacttcaagagcaactccgccgtggcctggtccaacaagtccgatttcgcctgcgccaacgccttcaacaacagcattatccccgaggacacattcttcccaagcagcgacgtgccctgcggtacccagagttttgggttgttggaccctaaattgtgctatctgttggacggaatcctgttcatttacggagtgatcctgaccgcattgttcctgcgggttaagttttccagatccgcagacgcacccgcttaccaacaagggcagaaccaactctacaatgaacttaatttggggcggagggaagagtacgacgttctggacaaaaggaggggacgagatcccgagatgggcggaaagcctcagcgaaggaagaatccgcaagaggggctttataacgaactccagaaagataaaatggcagaagcctatagtgagattgggatgaagggagaaaggaggaggggtaaaggtcacgatgggttgtaccaaggattgagcacagccactaaagatacctatgatgcgctccacatgcaggccctgccgccaaga

SEQ ID NO: 5558 - DNA, 3513 bp, Artificial Sequence
  Synthetic Polynucloetide
atggccttaccagtgaccgccttgctcctgccgctggccttgctgctccacgccgccaggccggaagtgcaactggtggaatctggagggggaagcgtgcaggcaggcggatctctgagactgtcctgcaccacatctggcagagccctgaatatgtacgtgatgggatggtttcggcaggctcccggcaacgagcgggaatttgtggccgctacaagcagcagcggcggcagcacaagctaccccgattctgtgaagggcagattcacaatctcccgcgataatgccaagaatactgtgtacctgcagatgaatagtctgaagcctgaagatacagccgcctacagatgtgccgccagcccctacgtgtccacccccaccatgaacatcctggaagagtacagatactggggcctgggaacacaagtgacagtgtccagcggtaccggcggaggcggatctggcggcggaggtagcggtggcggaggatctgaattcgacatccagatgacacagagccctagcagcctgtctgccagcgtgggagacagagtgaccatcacatgcaaggccagcgaccacatcaacaactggctggcctggtatcagcagaagcctggacaggcccctaagctgctgatctacggcgctaccacactggaaacaggcgtgcccagcagattttctggcagcggctctggcaccgactacaccctgacaatatccagcctccagcctgaggacttcgccacctactactgtcagcagagctggaacaccccttggacattcggccagggcaccaagctggaaatcaagagactcgaggggaaaccaattcccaaccctcttctgggactggattcaaccggcagcggcgaggacctgaagaacgtgttcccacctgaggtggccgtgttcgagcctagcgaggccgagatcagccacacccagaaagccaccctcgtgtgcctggctaccggcttctaccccgaccatgtggaactgtcttggtgggtcaacggcaaagaggtgcacagcggcgtgtctaccgacccccagccactgaaagaacagcccgccctgaacgacagccggtactgcctgagcagcagactgagagtgtccgccaccttctggcagaacccccggaaccacttcagatgccaggtgcagttctacggcctgagcgagaacgacgagtggacccaggacagagccaagcccgtgacccagatcgtgtctgccgaagcctggggcagagccgattgcggatcccagagcttcggcctgctggaccccaagctgtgctacctgctggatggcatcctgttcatctacggcgtgatcctgaccgccctgttcctgagagtgaagttcagcagaagcgccgacgcccctgcctaccagcagggacagaaccaactgtacaacgagctgaacctgggcagacgggaagagtacgacgtgctggacaagcggagaggcagggaccctgagatgggcggaaagccccagcggagaaagaacccccaggaaggactgtataacgaactccagaaagacaagatggccgaagcctacagcgagatcggcatgaagggcgagcggagaagaggcaagggccacgatggcctgtaccagggcctgagcaccgccaccaaggacacctatgacgccctgcacatgcaggccctgcctccaagaagggccaagcgatctggatctggagcaacaaacttctcactactcaaacaagcaggtgacgtggaggagaatcccgggcctactagtatggactggatttggcgcatccttttccttgtcggcgctgctaccggcgcccattccgggccccaggttcagctgcaagagtctggcggaggacttgctcaagctggcggaagcctgagactgtcttgtgccgcctctggcagaaccttcagcatgggctggtttagacaggcccctggcaaagagagagagttcgtcgccgccatcacatacagcggcggcagcccttactacgcctcttctgtcagaggccggttcaccatcagccgggacaacgccaagaacaccgtgtacctccagatgaacagcctgaagccagaggacaccgccgtgtactactgtgccgccaatccaacctacggcagcgactggaatgccgagaattggggccagggcacccaagtgacagtgtctagtggatccggcggcggaggatctggcggaggcggatctgggggcggaggctctttcgaacaagttcagcttcaacagcctggcgctgagctggtcaaacctggcgcttctgtgaagatgagctgcaaagccagcggctacgccttcagcagctactggatcaactggatgaagcagaaacccggccagggactcgaatggatcggccaaatctatcccggcgacggcgacaccaactacaacggcaagttcaagggcagagccacactgaccgccgatacctctagcagcacagcctacatgcagctgagcagcctgaccagcgaagatagcgccgtgtacttctgtgcccggtccatcacaacagtcgtgggctgcgctatggactattggggccagggaacaagcgtgaccgtgtctagtacgcgtgagcagaaactgatctcggaagaggatgggagcggcatccagaaccctgatcctgccgtgtaccagctgcgggatagcaagagcagcgacaagagcgtgtgtctgttcaccgacttcgacagccagaccaacgtgtcccagagcaaggactccgacgtgtacatcaccgataagaccgtgctggacatgcggagcatggacttcaagagcaactccgccgtggcctggtccaacaagtccgatttcgcctgcgccaacgccttcaacaacagcattatccccgaggacacattcttcccaagccccgagagcagctgcggtacccagagttttgggttgttggaccctaaattgtgctatctgttggacggaatcctgttcatttacggagtgatcctgaccgcattgttcctgaggagcaagcggtcacggctgctccacagcgattacatgaatatgacaccacgaagaccgggtcctactcgcaaacactaccaaccctacgcacctccccgcgactttgcagcgtaccgatctcgggttaagttttccagatccgcagacgcacccgcttaccaacaagggcagaaccaactctacaatgaacttaatttggggcggagggaagagtacgacgttctggacaaaaggaggggacgagatcccgagatgggcggaaagcctcagcgaaggaagaatccgcaagaggggctttataacgaactccagaaagataaaatggcagaagcctatagtgagattgggatgaagggagaaaggaggaggggtaaaggtcacgatgggttgtaccaaggattgagcacagccactaaagatacctatgatgcgctccacatgcaggccctgccgccaaga

SEQ ID NO: 5559 - DNA, 3636 bp, Artificial Sequence
  Synthetic Polynucloetide
atggccttaccagtgaccgccttgctcctgccgctggccttgctgctccacgccgccaggccggaagtgcaactggtggaatctggagggggaagcgtgcaggcaggcggatctctgagactgtcctgcaccacatctggcagagccctgaatatgtacgtgatgggatggtttcggcaggctcccggcaacgagcgggaatttgtggccgctacaagcagcagcggcggcagcacaagctaccccgattctgtgaagggcagattcacaatctcccgcgataatgccaagaatactgtgtacctgcagatgaatagtctgaagcctgaagatacagccgcctacagatgtgccgccagcccctacgtgtccacccccaccatgaacatcctggaagagtacagatactggggcctgggaacacaagtgacagtgtccagcggtaccggcggaggcggatctggcggcggaggtagcggtggcggaggatctgaattcgacatccagatgacacagagccctagcagcctgtctgccagcgtgggagacagagtgaccatcacatgcaaggccagcgaccacatcaacaactggctggcctggtatcagcagaagcctggacaggcccctaagctgctgatctacggcgctaccacactggaaacaggcgtgcccagcagattttctggcagcggctctggcaccgactacaccctgacaatatccagcctccagcctgaggacttcgccacctactactgtcagcagagctggaacaccccttggacattcggccagggcaccaagctggaaatcaagagactcgaggggaaaccaattcccaaccctcttctgggactggattcaaccggcagcggcgaggacctgaagaacgtgttcccacctgaggtggccgtgttcgagcctagcgaggccgagatcagccacacccagaaagccaccctcgtgtgcctggctaccggcttctaccccgaccatgtggaactgtcttggtgggtcaacggcaaagaggtgcacagcggcgtgtctaccgacccccagccactgaaagaacagcccgccctgaacgacagccggtactgcctgagcagcagactgagagtgtccgccaccttctggcagaacccccggaaccacttcagatgccaggtgcagttctacggcctgagcgagaacgacgagtggacccaggacagagccaagcccgtgacccagatcgtgtctgccgaagcctggggcagagccgattgcggatcccagagcttcggcctgctggaccccaagctgtgctacctgctggatggcatcctgttcatctacggcgtgatcctgaccgccctgttcctgaggagtaagaggagcaggctcctgcacagtgactacatgaacatgactccacgccgccccggacccacccgcaagcattaccagccctatgccccaccacgcgacttcgcagcctatcgctccagagtgaagttcagcagaagcgccgacgcccctgcctaccagcagggacagaaccaactgtacaacgagctgaacctgggcagacgggaagagtacgacgtgctggacaagcggagaggcagggaccctgagatgggcggaaagccccagcggagaaagaacccccaggaaggactgtataacgaactccagaaagacaagatggccgaagcctacagcgagatcggcatgaagggcgagcggagaagaggcaagggccacgatggcctgtaccagggcctgagcaccgccaccaaggacacctatgacgccctgcacatgcaggccctgcctccaagaagggccaagcgatctggatctggagcaacaaacttctcactactcaaacaagcaggtgacgtggaggagaatcccgggcctactagtatggactggatttggcgcatccttttccttgtcggcgctgctaccggcgcccattccgggccccaggttcagctgcaagagtctggcggaggacttgctcaagctggcggaagcctgagactgtcttgtgccgcctctggcagaaccttcagcatgggctggtttagacaggcccctggcaaagagagagagttcgtcgccgccatcacatacagcggcggcagcccttactacgcctcttctgtcagaggccggttcaccatcagccgggacaacgccaagaacaccgtgtacctccagatgaacagcctgaagccagaggacaccgccgtgtactactgtgccgccaatccaacctacggcagcgactggaatgccgagaattggggccagggcacccaagtgacagtgtctagtggatccggcggcggaggatctggcggaggcggatctgggggcggaggctctttcgaacaagttcagcttcaacagcctggcgctgagctggtcaaacctggcgcttctgtgaagatgagctgcaaagccagcggctacgccttcagcagctactggatcaactggatgaagcagaaacccggccagggactcgaatggatcggccaaatctatcccggcgacggcgacaccaactacaacggcaagttcaagggcagagccacactgaccgccgatacctctagcagcacagcctacatgcagctgagcagcctgaccagcgaagatagcgccgtgtacttctgtgcccggtccatcacaacagtcgtgggctgcgctatggactattggggccagggaacaagcgtgaccgtgtctagtacgcgtgagcagaaactgatctcggaagaggatgggagcggcatccagaaccctgatcctgccgtgtaccagctgcgggatagcaagagcagcgacaagagcgtgtgtctgttcaccgacttcgacagccagaccaacgtgtcccagagcaaggactccgacgtgtacatcaccgataagaccgtgctggacatgcggagcatggacttcaagagcaactccgccgtggcctggtccaacaagtccgatttcgcctgcgccaacgccttcaacaacagcattatccccgaggacacattcttcccaagccccgagagcagctgcggtacccagagttttgggttgttggaccctaaattgtgctatctgttggacggaatcctgttcatttacggagtgatcctgaccgcattgttcctgaggagcaagcggtcacggctgctccacagcgattacatgaatatgacaccacgaagaccgggtcctactcgcaaacactaccaaccctacgcacctccccgcgactttgcagcgtaccgatctcgggttaagttttccagatccgcagacgcacccgcttaccaacaagggcagaaccaactctacaatgaacttaatttggggcggagggaagagtacgacgttctggacaaaaggaggggacgagatcccgagatgggcggaaagcctcagcgaaggaagaatccgcaagaggggctttataacgaactccagaaagataaaatggcagaagcctatagtgagattgggatgaagggagaaaggaggaggggtaaaggtcacgatgggttgtaccaaggattgagcacagccactaaagatacctatgatgcgctccacatgcaggccctgccgccaaga

SEQ ID NO: 5560 - DNA, 3519 bp, Artificial Sequence
  Synthetic Polynucloetide
atggccttaccagtgaccgccttgctcctgccgctggccttgctgctccacgccgccaggccggaagtgcaactggtggaatctggagggggaagcgtgcaggcaggcggatctctgagactgtcctgcaccacatctggcagagccctgaatatgtacgtgatgggatggtttcggcaggctcccggcaacgagcgggaatttgtggccgctacaagcagcagcggcggcagcacaagctaccccgattctgtgaagggcagattcacaatctcccgcgataatgccaagaatactgtgtacctgcagatgaatagtctgaagcctgaagatacagccgcctacagatgtgccgccagcccctacgtgtccacccccaccatgaacatcctggaagagtacagatactggggcctgggaacacaagtgacagtgtccagcggtaccggcggaggcggatctggcggcggaggtagcggtggcggaggatctgaattcgacatccagatgacacagagccctagcagcctgtctgccagcgtgggagacagagtgaccatcacatgcaaggccagcgaccacatcaacaactggctggcctggtatcagcagaagcctggacaggcccctaagctgctgatctacggcgctaccacactggaaacaggcgtgcccagcagattttctggcagcggctctggcaccgactacaccctgacaatatccagcctccagcctgaggacttcgccacctactactgtcagcagagctggaacaccccttggacattcggccagggcaccaagctggaaatcaagagactcgaggggaaaccaattcccaaccctcttctgggactggattcaaccggcagcggcgaggacctgaagaacgtgttcccacctgaggtggccgtgttcgagcctagcgaggccgagatcagccacacccagaaagccaccctcgtgtgcctggctaccggcttctaccccgaccatgtggaactgtcttggtgggtcaacggcaaagaggtgcacagcggcgtgtctaccgacccccagccactgaaagaacagcccgccctgaacgacagccggtactgcctgagcagcagactgagagtgtccgccaccttctggcagaacccccggaaccacttcagatgccaggtgcagttctacggcctgagcgagaacgacgagtggacccaggacagagccaagcccgtgacccagatcgtgtctgccgaagcctggggcagagccgattgcggatcccagagcttcggcctgctggaccccaagctgtgctacctgctggatggcatcctgttcatctacggcgtgatcctgaccgccctgttcctgagagtgaagttcagcagaagcgccgacgcccctgcctaccagcagggacagaaccaactgtacaacgagctgaacctgggcagacgggaagagtacgacgtgctggacaagcggagaggcagggaccctgagatgggcggaaagccccagcggagaaagaacccccaggaaggactgtataacgaactccagaaagacaagatggccgaagcctacagcgagatcggcatgaagggcgagcggagaagaggcaagggccacgatggcctgtaccagggcctgagcaccgccaccaaggacacctatgacgccctgcacatgcaggccctgcctccaagaagggccaagcgatctggatctggagcaacaaacttctcactactcaaacaagcaggtgacgtggaggagaatcccgggcctactagtatggactggatttggcgcatccttttccttgtcggcgctgctaccggcgcccattccgggccccaggttcagctgcaagagtctggcggaggacttgctcaagctggcggaagcctgagactgtcttgtgccgcctctggcagaaccttcagcatgggctggtttagacaggcccctggcaaagagagagagttcgtcgccgccatcacatacagcggcggcagcccttactacgcctcttctgtcagaggccggttcaccatcagccgggacaacgccaagaacaccgtgtacctccagatgaacagcctgaagccagaggacaccgccgtgtactactgtgccgccaatccaacctacggcagcgactggaatgccgagaattggggccagggcacccaagtgacagtgtctagtggatccggcggcggaggatctggcggaggcggatctgggggcggaggctctttcgaacaagttcagcttcaacagcctggcgctgagctggtcaaacctggcgcttctgtgaagatgagctgcaaagccagcggctacgccttcagcagctactggatcaactggatgaagcagaaacccggccagggactcgaatggatcggccaaatctatcccggcgacggcgacaccaactacaacggcaagttcaagggcagagccacactgaccgccgatacctctagcagcacagcctacatgcagctgagcagcctgaccagcgaagatagcgccgtgtacttctgtgcccggtccatcacaacagtcgtgggctgcgctatggactattggggccagggaacaagcgtgaccgtgtctagtacgcgtgagcagaaactgatctcggaagaggatctggggagcggcatccagaaccctgatcctgccgtgtaccagctgcgggatagcaagagcagcgacaagagcgtgtgtctgttcaccgacttcgacagccagaccaacgtgtcccagagcaaggactccgacgtgtacatcaccgataagaccgtgctggacatgcggagcatggacttcaagagcaactccgccgtggcctggtccaacaagtccgatttcgcctgcgccaacgccttcaacaacagcattatccccgaggacacattcttcccaagccccgagagcagctgcggtacccagagttttgggttgttggaccctaaattgtgctatctgttggacggaatcctgttcatttacggagtgatcctgaccgcattgttcctgaagagaggccggaagaagctgctgtacatcttcaagcagcctttcatgcggcccgtgcagaccacccaggaagaggacggctgctcctgccggttccccgaggaagaagaaggcggctgcgagctgcgggttaagttttccagatccgcagacgcacccgcttaccaacaagggcagaaccaactctacaatgaacttaatttggggcggagggaagagtacgacgttctggacaaaaggaggggacgagatcccgagatgggcggaaagcctcagcgaaggaagaatccgcaagaggggctttataacgaactccagaaagataaaatggcagaagcctatagtgagattgggatgaagggagaaaggaggaggggtaaaggtcacgatgggttgtaccaaggattgagcacagccactaaagatacctatgatgcgctccacatgcaggccctgccgccaaga

SEQ ID NO: 5561 - DNA, 3645 bp, Artificial Sequence
  Synthetic Polynucloetide
atggccttaccagtgaccgccttgctcctgccgctggccttgctgctccacgccgccaggccggaagtgcaactggtggaatctggagggggaagcgtgcaggcaggcggatctctgagactgtcctgcaccacatctggcagagccctgaatatgtacgtgatgggatggtttcggcaggctcccggcaacgagcgggaatttgtggccgctacaagcagcagcggcggcagcacaagctaccccgattctgtgaagggcagattcacaatctcccgcgataatgccaagaatactgtgtacctgcagatgaatagtctgaagcctgaagatacagccgcctacagatgtgccgccagcccctacgtgtccacccccaccatgaacatcctggaagagtacagatactggggcctgggaacacaagtgacagtgtccagcggtaccggcggaggcggatctggcggcggaggtagcggtggcggaggatctgaattcgacatccagatgacacagagccctagcagcctgtctgccagcgtgggagacagagtgaccatcacatgcaaggccagcgaccacatcaacaactggctggcctggtatcagcagaagcctggacaggcccctaagctgctgatctacggcgctaccacactggaaacaggcgtgcccagcagattttctggcagcggctctggcaccgactacaccctgacaatatccagcctccagcctgaggacttcgccacctactactgtcagcagagctggaacaccccttggacattcggccagggcaccaagctggaaatcaagagactcgaggggaaaccaattcccaaccctcttctgggactggattcaaccggcagcggcgaggacctgaagaacgtgttcccacctgaggtggccgtgttcgagcctagcgaggccgagatcagccacacccagaaagccaccctcgtgtgcctggctaccggcttctaccccgaccatgtggaactgtcttggtgggtcaacggcaaagaggtgcacagcggcgtgtctaccgacccccagccactgaaagaacagcccgccctgaacgacagccggtactgcctgagcagcagactgagagtgtccgccaccttctggcagaacccccggaaccacttcagatgccaggtgcagttctacggcctgagcgagaacgacgagtggacccaggacagagccaagcccgtgacccagatcgtgtctgccgaagcctggggcagagccgattgcggatcccagagcttcggcctgctggaccccaagctgtgctacctgctggatggcatcctgttcatctacggcgtgatcctgaccgccctgttcctgaaacggggcagaaagaaactcctgtatatattcaaacaaccatttatgagaccagtacaaactactcaagaggaagatggctgtagctgccgatttccagaagaagaagaaggaggatgtgaactgagagtgaagttcagcagaagcgccgacgcccctgcctaccagcagggacagaaccaactgtacaacgagctgaacctgggcagacgggaagagtacgacgtgctggacaagcggagaggcagggaccctgagatgggcggaaagccccagcggagaaagaacccccaggaaggactgtataacgaactccagaaagacaagatggccgaagcctacagcgagatcggcatgaagggcgagcggagaagaggcaagggccacgatggcctgtaccagggcctgagcaccgccaccaaggacacctatgacgccctgcacatgcaggccctgcctccaagaagggccaagcgatctggatctggagcaacaaacttctcactactcaaacaagcaggtgacgtggaggagaatcccgggcctactagtatggactggatttggcgcatccttttccttgtcggcgctgctaccggcgcccattccgggccccaggttcagctgcaagagtctggcggaggacttgctcaagctggcggaagcctgagactgtcttgtgccgcctctggcagaaccttcagcatgggctggtttagacaggcccctggcaaagagagagagttcgtcgccgccatcacatacagcggcggcagcccttactacgcctcttctgtcagaggccggttcaccatcagccgggacaacgccaagaacaccgtgtacctccagatgaacagcctgaagccagaggacaccgccgtgtactactgtgccgccaatccaacctacggcagcgactggaatgccgagaattggggccagggcacccaagtgacagtgtctagtggatccggcggcggaggatctggcggaggcggatctgggggcggaggctctttcgaacaagttcagcttcaacagcctggcgctgagctggtcaaacctggcgcttctgtgaagatgagctgcaaagccagcggctacgccttcagcagctactggatcaactggatgaagcagaaacccggccagggactcgaatggatcggccaaatctatcccggcgacggcgacaccaactacaacggcaagttcaagggcagagccacactgaccgccgatacctctagcagcacagcctacatgcagctgagcagcctgaccagcgaagatagcgccgtgtacttctgtgcccggtccatcacaacagtcgtgggctgcgctatggactattggggccagggaacaagcgtgaccgtgtctagtacgcgtgagcagaaactgatctcggaagaggatctggggagcggcatccagaaccctgatcctgccgtgtaccagctgcgggatagcaagagcagcgacaagagcgtgtgtctgttcaccgacttcgacagccagaccaacgtgtcccagagcaaggactccgacgtgtacatcaccgataagaccgtgctggacatgcggagcatggacttcaagagcaactccgccgtggcctggtccaacaagtccgatttcgcctgcgccaacgccttcaacaacagcattatccccgaggacacattcttcccaagccccgagagcagctgcggtacccagagttttgggttgttggaccctaaattgtgctatctgttggacggaatcctgttcatttacggagtgatcctgaccgcattgttcctgaagagaggccggaagaagctgctgtacatcttcaagcagcctttcatgcggcccgtgcagaccacccaggaagaggacggctgctcctgccggttccccgaggaagaagaaggcggctgcgagctgcgggttaagttttccagatccgcagacgcacccgcttaccaacaagggcagaaccaactctacaatgaacttaatttggggcggagggaagagtacgacgttctggacaaaaggaggggacgagatcccgagatgggcggaaagcctcagcgaaggaagaatccgcaagaggggctttataacgaactccagaaagataaaatggcagaagcctatagtgagattgggatgaagggagaaaggaggaggggtaaaggtcacgatgggttgtaccaaggattgagcacagccactaaagatacctatgatgcgctccacatgcaggccctgccgccaaga

SEQ ID NO: 5562 - DNA, 3318 bp, Artificial Sequence
  Synthetic Polynucloetide
atggccttaccagtgaccgccttgctcctgccgctggccttgctgctccacgccgccaggccggaagtgcaactggtggaatctggagggggaagcgtgcaggcaggcggatctctgagactgtcctgcaccacatctggcagagccctgaatatgtacgtgatgggatggtttcggcaggctcccggcaacgagcgggaatttgtggccgctacaagcagcagcggcggcagcacaagctaccccgattctgtgaagggcagattcacaatctcccgcgataatgccaagaatactgtgtacctgcagatgaatagtctgaagcctgaagatacagccgcctacagatgtgccgccagcccctacgtgtccacccccaccatgaacatcctggaagagtacagatactggggcctgggaacacaagtgacagtgtccagcggtaccggcggaggcggatctggcggcggaggtagcggtggcggaggatctgaattcgacatccagatgacacagagccctagcagcctgtctgccagcgtgggagacagagtgaccatcacatgcaaggccagcgaccacatcaacaactggctggcctggtatcagcagaagcctggacaggcccctaagctgctgatctacggcgctaccacactggaaacaggcgtgcccagcagattttctggcagcggctctggcaccgactacaccctgacaatatccagcctccagcctgaggacttcgccacctactactgtcagcagagctggaacaccccttggacattcggccagggcaccaagctggaaatcaagagactcgagcagagcttcggcctgctggaccccaagctgtgctacctgctggatggcatcctgttcatctacggcgtgatcctgaccgccctgttcctgagagtgaagttcagcagaagcgccgacgcccctgcctaccagcagggacagaaccaactgtacaacgagctgaacctgggcagacgggaagagtacgacgtgctggacaagcggagaggcagggaccctgagatgggcggaaagccccagcggagaaagaacccccaggaaggactgtataacgaactccagaaagacaagatggccgaagcctacagcgagatcggcatgaagggcgagcggagaagaggcaagggccacgatggcctgtaccagggcctgagcaccgccaccaaggacacctatgacgccctgcacatgcaggccctgcctccaagaagggccaagcgatctggatctggagcaacaaacttctcactactcaaacaagcaggtgacgtggaggagaatcccgggcctactagtatggactggatttggcgcatccttttccttgtcggcgctgctaccggcgcccattccgggccccaggttcagctgcaagagtctggcggaggacttgctcaagctggcggaagcctgagactgtcttgtgccgcctctggcagaaccttcagcatgggctggtttagacaggcccctggcaaagagagagagttcgtcgccgccatcacatacagcggcggcagcccttactacgcctcttctgtcagaggccggttcaccatcagccgggacaacgccaagaacaccgtgtacctccagatgaacagcctgaagccagaggacaccgccgtgtactactgtgccgccaatccaacctacggcagcgactggaatgccgagaattggggccagggcacccaagtgacagtgtctagtggatccggcggcggaggatctggcggaggcggatctgggggcggaggctctttcgaacaagttcagcttcaacagcctggcgctgagctggtcaaacctggcgcttctgtgaagatgagctgcaaagccagcggctacgccttcagcagctactggatcaactggatgaagcagaaacccggccagggactcgaatggatcggccaaatctatcccggcgacggcgacaccaactacaacggcaagttcaagggcagagccacactgaccgccgatacctctagcagcacagcctacatgcagctgagcagcctgaccagcgaagatagcgccgtgtacttctgtgcccggtccatcacaacagtcgtgggctgcgctatggactattggggccagggaacaagcgtgaccgtgtctagtacgcgtcagagttttgggttgttggaccctaaattgtgctatctgttggacggaatcctgttcatttacggagtgatcctgaccgcattgttcctgcgggttaagttttccagatccgcagacgcacccgcttaccaacaagggcagaaccaactctacaatgaacttaatttggggcggagggaagagtacgacgttctggacaaaaggaggggacgagatcccgagatgggcggaaagcctcagcgaaggaagaatccgcaagaggggctttataacgaactccagaaagataaaatggcagaagcctatagtgagattgggatgaagggagaaaggaggaggggtaaaggtcacgatgggttgtaccaaggattgagcacagccactaaagatacctatgatgcgctccacatgcaggccctgccgccaagacgcgccaagagaagcggatctggcgtgaagcagaccctgaatttcgacctgctgaagctggctggcgacgtggaatccaacccaggcccttctagaggccatatgaccgagtacaagcccacggtgcgcctcgccacccgcgacgacgtccccagggccgtacgcaccctcgccgccgcgttcgccgactaccccgccacgcgccacaccgtcgatccggaccgccacatcgagcgggtcaccgagctgcaagaactcttcctcacgcgcgtcgggctcgacatcggcaaggtgtgggtcgcggacgacggcgccgcggtggcggtctggaccacgccggagagcgtcgaagcgggggcggtgttcgccgagatcggcccgcgcatggccgagttgagcggttcccggctggccgcgcagcaacagatggaaggcctcctggcgccgcaccggcccaaggagcccgcgtggttcctggccaccgtcggcgtctcgcccgaccaccagggcaagggtctgggcagcgccgtcgtgctccccggagtggaggcggccgagcgcgccggggtgcccgccttcctggagacctccgcgccccgcaacctccccttctacgagcggctcggcttcaccgtcaccgccgacgtcgaggtgcccgaaggaccgcgcacctggtgcatgacccgcaagcccggtgcctga

SEQ ID NO: 5563 - DNA, 2790 bp, Artificial Sequence
  Synthetic Polynucloetide
atggccttaccagtgaccgccttgctcctgccgctggccttgctgctccacgccgccaggccggaagtgcaactggtggaatctggagggggaagcgtgcaggcaggcggatctctgagactgtcctgcaccacatctggcagagccctgaatatgtacgtgatgggatggtttcggcaggctcccggcaacgagcgggaatttgtggccgctacaagcagcagcggcggcagcacaagctaccccgattctgtgaagggcagattcacaatctcccgcgataatgccaagaatactgtgtacctgcagatgaatagtctgaagcctgaagatacagccgcctacagatgtgccgccagcccctacgtgtccacccccaccatgaacatcctggaagagtacagatactggggcctgggaacacaagtgacagtgtccagcggtaccggcggaggcggatctggcggcggaggtagcggtggcggaggatctgaattcgacatccagatgacacagagccctagcagcctgtctgccagcgtgggagacagagtgaccatcacatgcaaggccagcgaccacatcaacaactggctggcctggtatcagcagaagcctggacaggcccctaagctgctgatctacggcgctaccacactggaaacaggcgtgcccagcagattttctggcagcggctctggcaccgactacaccctgacaatatccagcctccagcctgaggacttcgccacctactactgtcagcagagctggaacaccccttggacattcggccagggcaccaagctggaaatcaagagactcgagggacagcctaaggccaatcctaccgtgacactgttccctccaagcagcgaagaactccaggccaacaaggccacacttgtgtgcctgatctccgacttctaccctggggctgtgacagtggcttggaaggccgatggatctcctgtgaaagccggcgtggaaaccaccaagccatccaagcagagcaacaacaaatacgccgccagctcctacctgagcctgacacctgagcagtggaagtcccacagatcctacagctgccaagtgacccacgaaggcagcaccgtggaaaagacagtggcccctacagagtgcagccccatcaagaccgatgtgattacaatggaccccaaggacaactgctccaaggacgccaacgataccctgctgctccagctgaccaacaccagcgcctactacatgtacttgttgctgctgctgaagtccgtggtgtacttcgccatcatcacatgctgcctgctgcggagaaccgccttctgctgcaacggcgagaagtctagggccaagcgatctggatctggagcaacaaacttctcactactcaaacaagcaggtgacgtggaggagaatcccgggcctactagtatggactggatttggcgcatccttttccttgtcggcgctgctaccggcgcccattccgggccccaggttcagctgcaagagtctggcggaggacttgctcaagctggcggaagcctgagactgtcttgtgccgcctctggcagaaccttcagcatgggctggtttagacaggcccctggcaaagagagagagttcgtcgccgccatcacatacagcggcggcagcccttactacgcctcttctgtcagaggccggttcaccatcagccgggacaacgccaagaacaccgtgtacctccagatgaacagcctgaagccagaggacaccgccgtgtactactgtgccgccaatccaacctacggcagcgactggaatgccgagaattggggccagggcacccaagtgacagtgtctagtggatccggcggcggaggatctggcggaggcggatctgggggcggaggctctttcgaacaagttcagcttcaacagcctggcgctgagctggtcaaacctggcgcttctgtgaagatgagctgcaaagccagcggctacgccttcagcagctactggatcaactggatgaagcagaaacccggccagggactcgaatggatcggccaaatctatcccggcgacggcgacaccaactacaacggcaagttcaagggcagagccacactgaccgccgatacctctagcagcacagcctacatgcagctgagcagcctgaccagcgaagatagcgccgtgtacttctgtgcccggtccatcacaacagtcgtgggctgcgctatggactattggggccagggaacaagcgtgaccgtgtctagtacgcgtgcctctacaaagggaccctccgtgtttcctctggctcccagcagcaagtctacaagcggaggaacagccgctctgggctgcctggtcaaggattactttcccgagcctgtgaccgtgtcctggaatagcggagcactgacaagcggcgtgcacacctttccagccgtgctgcaaagcagcggcctgtactctctgagcagcgtggtcacagtgcctagctctagcctgggcacccagacctacatctgcaatgtgaaccacaagcctagcaacaccaaggtggacaagagagtggaacccaagagctgtgaagtgaaaaccgactccaccgaccacgtgaagcccaaagagacagagaacaccaagcagcccagcaagagctgccacaagcccaaggccatcgtgcacaccgagaaagtgaacatgatgagcctgaccgtgctgggcctgcggatgctgttcgccaaaaccgtggccgtgaacttcctgctgaccgccaagctgttcttcctc

SEQ ID NO: 5564 - DNA, 2724 bp, Artificial Sequence
  Synthetic Polynucloetide
atggccttaccagtgaccgccttgctcctgccgctggccttgctgctccacgccgccaggccggaagtgcaactggtggaatctggagggggaagcgtgcaggcaggcggatctctgagactgtcctgcaccacatctggcagagccctgaatatgtacgtgatgggatggtttcggcaggctcccggcaacgagcgggaatttgtggccgctacaagcagcagcggcggcagcacaagctaccccgattctgtgaagggcagattcacaatctcccgcgataatgccaagaatactgtgtacctgcagatgaatagtctgaagcctgaagatacagccgcctacagatgtgccgccagcccctacgtgtccacccccaccatgaacatcctggaagagtacagatactggggcctgggaacacaagtgacagtgtccagcggtaccggcggaggcggatctggcggcggaggtagcggtggcggaggatctgaattcgacatccagatgacacagagccctagcagcctgtctgccagcgtgggagacagagtgaccatcacatgcaaggccagcgaccacatcaacaactggctggcctggtatcagcagaagcctggacaggcccctaagctgctgatctacggcgctaccacactggaaacaggcgtgcccagcagattttctggcagcggctctggcaccgactacaccctgacaatatccagcctccagcctgaggacttcgccacctactactgtcagcagagctggaacaccccttggacattcggccagggcaccaagctggaaatcaagagactcgagggacagcctaaggccaatcctaccgtgacactgttccctccaagcagcgaagaactccaggccaacaaggccacacttgtgtgcctgatctccgacttctaccctggggctgtgacagtggcttggaaggccgatggatctcctgtgaaagccggcgtggaaaccaccaagccatccaagcagagcaacaacaaatacgccgccagctcctacctgagcctgacacctgagcagtggaagtcccacagatcctacagctgccaagtgacccacgaaggcagcaccgtggaaaagacagtggcccctacagagtgcagcggcagagccgattgcggcatcaccagcgccagctaccaccagggcgtgctgagcgccaccatcctgtacgagatcctgctgggcaaggccaccctgtacgccgtgctggtgtctgccctggtgctgatggctatggtcaagcggaaggacagccggggaagggccaagcgatctggatctggagcaacaaacttctcactactcaaacaagcaggtgacgtggaggagaatcccgggcctactagtatggactggatttggcgcatccttttccttgtcggcgctgctaccggcgcccattccgggccccaggttcagctgcaagagtctggcggaggacttgctcaagctggcggaagcctgagactgtcttgtgccgcctctggcagaaccttcagcatgggctggtttagacaggcccctggcaaagagagagagttcgtcgccgccatcacatacagcggcggcagcccttactacgcctcttctgtcagaggccggttcaccatcagccgggacaacgccaagaacaccgtgtacctccagatgaacagcctgaagccagaggacaccgccgtgtactactgtgccgccaatccaacctacggcagcgactggaatgccgagaattggggccagggcacccaagtgacagtgtctagtggatccggcggcggaggatctggcggaggcggatctgggggcggaggctctttcgaacaagttcagcttcaacagcctggcgctgagctggtcaaacctggcgcttctgtgaagatgagctgcaaagccagcggctacgccttcagcagctactggatcaactggatgaagcagaaacccggccagggactcgaatggatcggccaaatctatcccggcgacggcgacaccaactacaacggcaagttcaagggcagagccacactgaccgccgatacctctagcagcacagcctacatgcagctgagcagcctgaccagcgaagatagcgccgtgtacttctgtgcccggtccatcacaacagtcgtgggctgcgctatggactattggggccagggaacaagcgtgaccgtgtctagtacgcgtgcctctacaaagggaccctccgtgtttcctctggctcccagcagcaagtctacaagcggaggaacagccgctctgggctgcctggtcaaggattactttcccgagcctgtgaccgtgtcctggaatagcggagcactgacaagcggcgtgcacacctttccagccgtgctgcaaagcagcggcctgtactctctgagcagcgtggtcacagtgcctagctctagcctgggcacccagacctacatctgcaatgtgaaccacaagcctagcaacaccaaggtggacaagagagtggaacccaagagctgtatccccgaggacacattcttcccaagcagcgacgtgccctgcgacgtgaagctggtggaaaagagcttcgagacagacaccaacctgaacttccagaacctgagcgtgatcggcttcagaatcctgctgctgaaagtggccggctttaacctgctgatgaccctgcggctgtggtccagc

SEQ ID NO: 5565 - DNA, 2724 bp, Artificial Sequence
  Synthetic Polynucloetide
atggccttaccagtgaccgccttgctcctgccgctggccttgctgctccacgccgccaggccggaagtgcaactggtggaatctggagggggaagcgtgcaggcaggcggatctctgagactgtcctgcaccacatctggcagagccctgaatatgtacgtgatgggatggtttcggcaggctcccggcaacgagcgggaatttgtggccgctacaagcagcagcggcggcagcacaagctaccccgattctgtgaagggcagattcacaatctcccgcgataatgccaagaatactgtgtacctgcagatgaatagtctgaagcctgaagatacagccgcctacagatgtgccgccagcccctacgtgtccacccccaccatgaacatcctggaagagtacagatactggggcctgggaacacaagtgacagtgtccagcggtaccggcggaggcggatctggcggcggaggtagcggtggcggaggatctgaattcgacatccagatgacacagagccctagcagcctgtctgccagcgtgggagacagagtgaccatcacatgcaaggccagcgaccacatcaacaactggctggcctggtatcagcagaagcctggacaggcccctaagctgctgatctacggcgctaccacactggaaacaggcgtgcccagcagattttctggcagcggctctggcaccgactacaccctgacaatatccagcctccagcctgaggacttcgccacctactactgtcagcagagctggaacaccccttggacattcggccagggcaccaagctggaaatcaagagactcgagggacagcctaaggccaatcctaccgtgacactgttccctccaagcagcgaagaactccaggccaacaaggccacacttgtgtgcctgatctccgacttctaccctggggctgtgacagtggcttggaaggccgatggatctcctgtgaaagccggcgtggaaaccaccaagccatccaagcagagcaacaacaaatacgccgccagctcctacctgagcctgacacctgagcagtggaagtcccacagatcctacagctgccaagtgacccacgaaggcagcaccgtggaaaagacagtggcccctacagagtgcagcggcagagccgattgcggctttaccagcgagagctaccagcagggcgtgctgagcgccaccatcctgtacgagatcctgctgggcaaggccaccctgtacgccgtgctggtgtctgccctggtgctgatggctatggtcaagcggaaggacagccggggaagggccaagcgatctggatctggagcaacaaacttctcactactcaaacaagcaggtgacgtggaggagaatcccgggcctactagtatggactggatttggcgcatccttttccttgtcggcgctgctaccggcgcccattccgggccccaggttcagctgcaagagtctggcggaggacttgctcaagctggcggaagcctgagactgtcttgtgccgcctctggcagaaccttcagcatgggctggtttagacaggcccctggcaaagagagagagttcgtcgccgccatcacatacagcggcggcagcccttactacgcctcttctgtcagaggccggttcaccatcagccgggacaacgccaagaacaccgtgtacctccagatgaacagcctgaagccagaggacaccgccgtgtactactgtgccgccaatccaacctacggcagcgactggaatgccgagaattggggccagggcacccaagtgacagtgtctagtggatccggcggcggaggatctggcggaggcggatctgggggcggaggctctttcgaacaagttcagcttcaacagcctggcgctgagctggtcaaacctggcgcttctgtgaagatgagctgcaaagccagcggctacgccttcagcagctactggatcaactggatgaagcagaaacccggccagggactcgaatggatcggccaaatctatcccggcgacggcgacaccaactacaacggcaagttcaagggcagagccacactgaccgccgatacctctagcagcacagcctacatgcagctgagcagcctgaccagcgaagatagcgccgtgtacttctgtgcccggtccatcacaacagtcgtgggctgcgctatggactattggggccagggaacaagcgtgaccgtgtctagtacgcgtgcctctacaaagggaccctccgtgtttcctctggctcccagcagcaagtctacaagcggaggaacagccgctctgggctgcctggtcaaggattactttcccgagcctgtgaccgtgtcctggaatagcggagcactgacaagcggcgtgcacacctttccagccgtgctgcaaagcagcggcctgtactctctgagcagcgtggtcacagtgcctagctctagcctgggcacccagacctacatctgcaatgtgaaccacaagcctagcaacaccaaggtggacaagagagtggaacccaagagctgtatccccgaggacacattcttcccaagccccgagagcagctgcgacgtgaagctggtggaaaagagcttcgagacagacaccaacctgaacttccagaacctgagcgtgatcggcttcagaatcctgctgctgaaagtggccggctttaacctgctgatgaccctgcggctgtggtccagc

SEQ ID NO: 5566 - DNA, 2313 bp, Artificial Sequence
  Synthetic Polynucloetide
atggccttaccagtgaccgccttgctcctgccgctggccttgctgctccacgccgccaggccggaggttcagctgcttgagtctggcggaggactggttcaacctggcggaagcctgagactgtcttgtgccgccagcggcttcacctttagcagctacgccatgagctgggtccgacaggctcctggcaaaggactggaatgggtgtccagcatcagcggcagcggcgactacatctactacgccgatagcgtgaagggcagattcaccatcagccgggacatcagcaagaacaccctgtacctccagatgaacagcctgagagccgaggacaccgccgtgtactactgtgccaaagaaggcaccggcgctaacagcagcctggccgattatagaggccagggcacactggtcaccgtgtctagtggcggaggaagcggcggaggatctgaagtgcaactggtggaatctggagggggaagcgtgcaggcaggcggatctctgagactgtcctgcaccacatctggcagagccctgaatatgtacgtgatgggatggtttcggcaggctcccggcaacgagcgggaatttgtggccgctacaagcagcagcggcggcagcacaagctaccccgattctgtgaagggcagattcacaatctcccgcgataatgccaagaatactgtgtacctgcagatgaatagtctgaagcctgaagatacagccgcctacagatgtgccgccagcccctacgtgtccacccccaccatgaacatcctggaagagtacagatactggggcctgggaacacaagtgacagtgtccagcggtaccggcggaggcggatctggcggcggaggtagcggtggcggaggatctgaattcgacatccagatgacacagagccctagcagcctgtctgccagcgtgggagacagagtgaccatcacatgcaaggccagcgaccacatcaacaactggctggcctggtatcagcagaagcctggacaggcccctaagctgctgatctacggcgctaccacactggaaacaggcgtgcccagcagattttctggcagcggctctggcaccgactacaccctgacaatatccagcctccagcctgaggacttcgccacctactactgtcagcagagctggaacaccccttggacattcggccagggcaccaagctggaaatcaagagaggcggaggcggaagtggaggcggaggatctggcggcggaggctctcaagttcagcttcaacagcctggcgctgagctggtcaaacctggcgcttctgtgaagatgagctgcaaagccagcggctacgccttcagcagctactggatcaactggatgaagcagaaacccggccagggactcgaatggatcggccaaatctatcccggcgacggcgacaccaactacaacggcaagttcaagggcagagccacactgaccgccgatacctctagcagcacagcctacatgcagctgagcagcctgaccagcgaagatagcgccgtgtacttctgtgcccggtccatcacaacagtcgtgggctgcgctatggactattggggccagggaacaagcgtgaccgtgtctagtacgcgtgagcagaaactgatctcggaagaggatctgaaaattgaagttatgtatcctcctccttacctagacaatgagaagagcaatggaaccattatccatgtgaaagggaaacacctttgtccaagtcccctatttcccggaccttctaagcccttttgggtgctggtggtggttgggggagtcctggcttgctatagcttgctagtaacagtggcctttattattttctgggtgaggagtaagaggagcaggctcctgcacagtgactacatgaacatgactccacgccgccccggacccacccgcaagcattaccagccctatgccccaccacgcgacttcgcagcctatcgctccagagtgaagttcagcaggagcgcagacgcccccgcgtaccagcagggccagaaccagctctataacgagctcaatctaggacgaagagaggagtacgatgttttggacaagagacgtggccgggaccctgagatggggggaaagccgagaaggaagaaccctcaggaaggcctgtacaatgaactgcagaaagataagatggcggaggcctacagtgagattgggatgaaaggcgagcgccggaggggcaaggggcacgatggcctttaccagggtctcagtacagccaccaaggacacctacgacgcccttcacatgcaggccctgccccctcgc

SEQ ID NO: 5567 - DNA, 2334 bp, Artificial Sequence
  Synthetic Polynucloetide
atggccttaccagtgaccgccttgctcctgccgctggccttgctgctccacgccgccaggccggaggttcagctgcttgagtctggcggaggactggttcaacctggcggaagcctgagactgtcttgtgccgccagcggcttcacctttagcagctacgccatgagctgggtccgacaggctcctggcaaaggactggaatgggtgtccagcatcagcggcagcggcgactacatctactacgccgatagcgtgaagggcagattcaccatcagccgggacatcagcaagaacaccctgtacctccagatgaacagcctgagagccgaggacaccgccgtgtactactgtgccaaagaaggcaccggcgctaacagcagcctggccgattatagaggccagggcacactggtcaccgtgtctagtggcggaggaagcggcggaggatctgaagtgcaactggtggaatctggagggggaagcgtgcaggcaggcggatctctgagactgtcctgcaccacatctggcagagccctgaatatgtacgtgatgggatggtttcggcaggctcccggcaacgagcgggaatttgtggccgctacaagcagcagcggcggcagcacaagctaccccgattctgtgaagggcagattcacaatctcccgcgataatgccaagaatactgtgtacctgcagatgaatagtctgaagcctgaagatacagccgcctacagatgtgccgccagcccctacgtgtccacccccaccatgaacatcctggaagagtacagatactggggcctgggaacacaagtgacagtgtccagcggtaccggcggaggcggatctggcggcggaggtagcggtggcggaggatctgaattcgacatccagatgacacagagccctagcagcctgtctgccagcgtgggagacagagtgaccatcacatgcaaggccagcgaccacatcaacaactggctggcctggtatcagcagaagcctggacaggcccctaagctgctgatctacggcgctaccacactggaaacaggcgtgcccagcagattttctggcagcggctctggcaccgactacaccctgacaatatccagcctccagcctgaggacttcgccacctactactgtcagcagagctggaacaccccttggacattcggccagggcaccaagctggaaatcaagagaggcggaggcggaagtggaggcggaggatctggcggcggaggctctcaagttcagcttcaacagcctggcgctgagctggtcaaacctggcgcttctgtgaagatgagctgcaaagccagcggctacgccttcagcagctactggatcaactggatgaagcagaaacccggccagggactcgaatggatcggccaaatctatcccggcgacggcgacaccaactacaacggcaagttcaagggcagagccacactgaccgccgatacctctagcagcacagcctacatgcagctgagcagcctgaccagcgaagatagcgccgtgtacttctgtgcccggtccatcacaacagtcgtgggctgcgctatggactattggggccagggaacaagcgtgaccgtgtctagtacgcgtgagcagaaactgatctcggaagaggatctggcgaagcccaccacgacgccagcgccgcgaccaccaacaccggcgcccaccatcgcgtcgcagcccctgtccctgcgcccagaggcgtgccggccagcggcggggggcgcagtgcacacgagggggctggacttcgcctgtgacatctacatctgggcgcccttggccgggacttgtggggtccttctcctgtcactggttatcaccctttactgcaaacggggcagaaagaaactcctgtatatattcaaacaaccatttatgagaccagtacaaactactcaagaggaagatggctgtagctgccgatttccagaagaagaagaaggaggatgtgaactgagagtgaagttcagcaggagcgcagacgcccccgcgtaccagcagggccagaaccagctctataacgagctgaatctaggacgaagagaggagtacgatgttttggacaagagacgtggccgggaccctgagatggggggaaagccgagaaggaagaaccctcaggaaggcctgtacaatgaactgcagaaagataagatggcggaggcctacagtgagattgggatgaaaggcgagcgccggaggggcaaggggcacgatggcctttaccagggtctcagtacagccaccaaggacacctacgacgcccttcacatgcaggccctgccccctcgctga

SEQ ID NO: 5568 - DNA, 3573 bp, Artificial Sequence
  Synthetic Polynucloetide
atggccttaccagtgaccgccttgctcctgccgctggccttgctgctccacgccgccaggccggaggttcagctgcttgagtctggcggaggactggttcaacctggcggaagcctgagactgtcttgtgccgccagcggcttcacctttagcagctacgccatgagctgggtccgacaggctcctggcaaaggactggaatgggtgtccagcatcagcggcagcggcgactacatctactacgccgatagcgtgaagggcagattcaccatcagccgggacatcagcaagaacaccctgtacctccagatgaacagcctgagagccgaggacaccgccgtgtactactgtgccaaagaaggcaccggcgctaacagcagcctggccgattatagaggccagggcacactggtcaccgtgtctagtggcggaggaagcggcggaggatctgaagtgcaactggtggaatctggagggggaagcgtgcaggcaggcggatctctgagactgtcctgcaccacatctggcagagccctgaatatgtacgtgatgggatggtttcggcaggctcccggcaacgagcgggaatttgtggccgctacaagcagcagcggcggcagcacaagctaccccgattctgtgaagggcagattcacaatctcccgcgataatgccaagaatactgtgtacctgcagatgaatagtctgaagcctgaagatacagccgcctacagatgtgccgccagcccctacgtgtccacccccaccatgaacatcctggaagagtacagatactggggcctgggaacacaagtgacagtgtccagcggtaccggcggaggcggatctggcggcggaggtagcggtggcggaggatctgaattcgacatccagatgacacagagccctagcagcctgtctgccagcgtgggagacagagtgaccatcacatgcaaggccagcgaccacatcaacaactggctggcctggtatcagcagaagcctggacaggcccctaagctgctgatctacggcgctaccacactggaaacaggcgtgcccagcagattttctggcagcggctctggcaccgactacaccctgacaatatccagcctccagcctgaggacttcgccacctactactgtcagcagagctggaacaccccttggacattcggccagggcaccaagctggaaatcaagagaggcggaggcggaagtggaggcggaggatctggcggcggaggctctcaagttcagcttcaacagcctggcgctgagctggtcaaacctggcgcttctgtgaagatgagctgcaaagccagcggctacgccttcagcagctactggatcaactggatgaagcagaaacccggccagggactcgaatggatcggccaaatctatcccggcgacggcgacaccaactacaacggcaagttcaagggcagagccacactgaccgccgatacctctagcagcacagcctacatgcagctgagcagcctgaccagcgaagatagcgccgtgtacttctgtgcccggtccatcacaacagtcgtgggctgcgctatggactattggggccagggaacaagcgtgaccgtgtctagtacgcgtgagcagaaactgatctcggaagaggatctggcgaagcccaccacgacgccagcgccgcgaccaccaacaccggcgcccaccatcgcgtcgcagcccctgtccctgcgcccagaggcgtgccggccagcggcggggggcgcagtgcacacgagggggctggacttcgcctgtgacatctacatctgggcgcccttggccgggacttgtggggtccttctcctgtcactggttatcaccctttactgcgggcgcgccagagtgaagttcagcaggagcgcagacgcccccgcgtaccagcagggccagaaccagctctataacgagctgaatctaggacgaagagaggagtacgatgttttggacaagagacgtggccgggaccctgagatggggggaaagccgagaaggaagaaccctcaggaaggcctgtacaatgaactgcagaaagataagatggcggaggcctacagtgagattgggatgaaaggcgagcgccggaggggcaaggggcacgatggcctttaccagggtctcagtacagccaccaaggacacctacgacgcccttcacatgcaggccctgccccctcgctctagaggatctggagcaacaaacttctcactactcaaacaagcaggtgacgtggaggagaatcccgggcctgggatccacatggccacttacgaggttctctgtgaggtggcgcggaaactgggcacggatgacagggaagtggtattgttcctcctaaacgtgttcatacctcaacccacactggcccaattaattggagctcttagagctttaaaggaggagggcaggttaacgtttcccctgttagcggaatgtctgtttcgtgcaggtcgcagagacctcttgcgcgacctgcttcacttagacccgcgttttttagagcgccacctagcgggcacaatgagttatttcagcccttatcagctcactgttctccacgtagacggggagctgtgtgcgagggatattaggtctttgatatttttaagcaaggacactatagggtctcgcagcacaccacagacattcttacactgggtgtactgtatggaaaacttagacctactgggtcccactgacgtggatgccctaatgtcaatgcttagatctttgtcaagagtagacctacagcgccaagtgcaaaccctaatgggccttcacctttccggcccatcacactcccaacactatcgccatacaccactcgagaccgatttctacgactacaaggacgacgatgacaagactagtggctccggcgagggcagaggaagtctactaacctgcggagatgtggaagaaaatcctggcccacatatgaccgagtacaagcccacggtgcgcctcgccacccgcgacgacgtccccagggccgtacgcaccctcgccgccgcgttcgccgactaccccgccacgcgccacaccgtcgatccggaccgccacatcgagcgggtcaccgagctgcaagaactcttcctcacgcgcgtcgggctcgacatcggcaaggtgtgggtcgcggacgacggcgccgcggtggcggtctggaccacgccggagagcgtcgaagcgggggcggtgttcgccgagatcggcccgcgcatggccgagttgagcggttcccggctggccgcgcagcaacagatggaaggcctcctggcgccgcaccggcccaaggagcccgcgtggttcctggccaccgtcggcgtctcgcccgaccaccagggcaagggtctgggcagcgccgtcgtgctccccggagtggaggcggccgagcgcgccggggtgcccgccttcctggagacctccgcgccccgcaacctccccttctacgagcggctcggcttcaccgtcaccgccgacgtcgaggtgcccgaaggaccgcgcacctggtgcatgacccgcaagcccggtgcctga

SEQ ID NO: 5569 - DNA, 3393 bp, Artificial Sequence
  Synthetic Polynucloetide
atggccttaccagtgaccgccttgctcctgccgctggccttgctgctccacgccgccaggccggaggttcagctgcttgagtctggcggaggactggttcaacctggcggaagcctgagactgtcttgtgccgccagcggcttcacctttagcagctacgccatgagctgggtccgacaggctcctggcaaaggactggaatgggtgtccagcatcagcggcagcggcgactacatctactacgccgatagcgtgaagggcagattcaccatcagccgggacatcagcaagaacaccctgtacctccagatgaacagcctgagagccgaggacaccgccgtgtactactgtgccaaagaaggcaccggcgctaacagcagcctggccgattatagaggccagggcacactggtcaccgtgtctagtggcggaggaagcggcggaggatctgaagtgcaactggtggaatctggagggggaagcgtgcaggcaggcggatctctgagactgtcctgcaccacatctggcagagccctgaatatgtacgtgatgggatggtttcggcaggctcccggcaacgagcgggaatttgtggccgctacaagcagcagcggcggcagcacaagctaccccgattctgtgaagggcagattcacaatctcccgcgataatgccaagaatactgtgtacctgcagatgaatagtctgaagcctgaagatacagccgcctacagatgtgccgccagcccctacgtgtccacccccaccatgaacatcctggaagagtacagatactggggcctgggaacacaagtgacagtgtccagcggtaccggcggaggcggatctggcggcggaggtagcggtggcggaggatctgaattcgacatccagatgacacagagccctagcagcctgtctgccagcgtgggagacagagtgaccatcacatgcaaggccagcgaccacatcaacaactggctggcctggtatcagcagaagcctggacaggcccctaagctgctgatctacggcgctaccacactggaaacaggcgtgcccagcagattttctggcagcggctctggcaccgactacaccctgacaatatccagcctccagcctgaggacttcgccacctactactgtcagcagagctggaacaccccttggacattcggccagggcaccaagctggaaatcaagagactcgagatccagaaccctgatcctgccgtgtaccagctgcgggatagcaagagcagcgacaagagcgtgtgtctgttcaccgacttcgacagccagaccaacgtgtcccagagcaaggactccgacgtgtacatcaccgataagtgcgtgctggacatgcggagcatggacttcaagagcaactccgccgtggcctggtccaacaagtccgatttcgcctgcgccaacgccttcaacaacagcattatccccgaggacacattcttcccaagcagcgacgtgccctgcgacgtgaagctggtggaaaagagcttcgagacagacaccaacctgaacttccagaacctgagcgtgatcggcttcagaatcctgctgctgaaagtggccggctttaacctgctgatgaccctgcggctgtggtccagccgcgccaagagaagcggatctggcgtgaagcagaccctgaatttcgacctgctgaagctggctggcgacgtggaatccaacccaggccctactagtatggactggatttggcgcatccttttccttgtcggcgctgctaccggcgcgcattccttcgaacaagttcagcttcaacagcctggcgctgagctggtcaaacctggcgcttctgtgaagatgagctgcaaagccagcggctacgccttcagcagctactggatcaactggatgaagcagaaacccggccagggactcgaatggatcggccaaatctatcccggcgacggcgacaccaactacaacggcaagttcaagggcagagccacactgaccgccgatacctctagcagcacagcctacatgcagctgagcagcctgaccagcgaagatagcgccgtgtacttctgtgcccggtccatcacaacagtcgtgggctgcgctatggactattggggccagggaacaagcgtgaccgtgtctagtacgcgtgaggacctgaagaacgtgttcccacctgaggtggccgtgttcgagcctagcaaggccgagatcgcccacacccagaaagccaccctcgtgtgcctggctaccggcttctaccccgaccatgtggaactgtcttggtgggtcaacggcaaagaggtgcacagcggcgtgtgtaccgacccccagccactgaaagaacagcccgccctgaacgacagccggtactgcctgagcagcagactgagagtgtccgccaccttctggcagaacccccggaaccacttcagatgccaggtgcagttctacggcctgagcgagaacgacgagtggacccaggacagagccaagcccgtgacccagatcgtgtctgccgaagcctggggcagagccgattgcggcatcaccagcgccagctaccaccagggcgtgctgagcgccaccatcctgtacgagatcctgctgggcaaggccaccctgtacgccgtgctggtgtctgccctggtgctgatggctatggtcaagcggaaggacagccggggaagggccaagcgatctggatctggagcaacaaacttctcactactcaaacaagcaggtgacgtggaggagaatcccgggccttctagaggccatatgaccgagtacaagcccacggtgcgcctcgccacccgcgacgacgtccccagggccgtacgcaccctcgccgccgcgttcgccgactaccccgccacgcgccacaccgtcgatccggaccgccacatcgagcgggtcaccgagctgcaagaactcttcctcacgcgcgtcgggctcgacatcggcaaggtgtgggtcgcggacgacggcgccgcggtggcggtctggaccacgccggagagcgtcgaagcgggggcggtgttcgccgagatcggcccgcgcatggccgagttgagcggttcccggctggccgcgcagcaacagatggaaggcctcctggcgccgcaccggcccaaggagcccgcgtggttcctggccaccgtcggcgtctcgcccgaccaccagggcaagggtctgggcagcgccgtcgtgctccccggagtggaggcggccgagcgcgccggggtgcccgccttcctggagacctccgcgccccgcaacctccccttctacgagcggctcggcttcaccgtcaccgccgacgtcgaggtgcccgaaggaccgcgcacctggtgcatgacccgcaagcccggtgcctga

SEQ ID NO: 5570 - DNA, 3390 bp, Artificial Sequence
  Synthetic Polynucloetide
atggccttaccagtgaccgccttgctcctgccgctggccttgctgctccacgccgccaggccggaggttcagctgcttgagtctggcggaggactggttcaacctggcggaagcctgagactgtcttgtgccgccagcggcttcacctttagcagctacgccatgagctgggtccgacaggctcctggcaaaggactggaatgggtgtccagcatcagcggcagcggcgactacatctactacgccgatagcgtgaagggcagattcaccatcagccgggacatcagcaagaacaccctgtacctccagatgaacagcctgagagccgaggacaccgccgtgtactactgtgccaaagaaggcaccggcgctaacagcagcctggccgattatagaggccagggcacactggtcaccgtgtctagtggcggaggaagcggcggaggatctgaagtgcaactggtggaatctggagggggaagcgtgcaggcaggcggatctctgagactgtcctgcaccacatctggcagagccctgaatatgtacgtgatgggatggtttcggcaggctcccggcaacgagcgggaatttgtggccgctacaagcagcagcggcggcagcacaagctaccccgattctgtgaagggcagattcacaatctcccgcgataatgccaagaatactgtgtacctgcagatgaatagtctgaagcctgaagatacagccgcctacagatgtgccgccagcccctacgtgtccacccccaccatgaacatcctggaagagtacagatactggggcctgggaacacaagtgacagtgtccagcggtaccggcggaggcggatctggcggcggaggtagcggtggcggaggatctgaattcgacatccagatgacacagagccctagcagcctgtctgccagcgtgggagacagagtgaccatcacatgcaaggccagcgaccacatcaacaactggctggcctggtatcagcagaagcctggacaggcccctaagctgctgatctacggcgctaccacactggaaacaggcgtgcccagcagattttctggcagcggctctggcaccgactacaccctgacaatatccagcctccagcctgaggacttcgccacctactactgtcagcagagctggaacaccccttggacattcggccagggcaccaagctggaaatcaagagactcgaggacctgaagaacgtgttcccacctgaggtggccgtgttcgagcctagcaaggccgagatcgcccacacccagaaagccaccctcgtgtgcctggctaccggcttctaccccgaccatgtggaactgtcttggtgggtcaacggcaaagaggtgcacagcggcgtgtgtaccgacccccagccactgaaagaacagcccgccctgaacgacagccggtactgcctgagcagcagactgagagtgtccgccaccttctggcagaacccccggaaccacttcagatgccaggtgcagttctacggcctgagcgagaacgacgagtggacccaggacagagccaagcccgtgacccagatcgtgtctgccgaagcctggggcagagccgattgcggcatcaccagcgccagctaccaccagggcgtgctgagcgccaccatcctgtacgagatcctgctgggcaaggccaccctgtacgccgtgctggtgtctgccctggtgctgatggctatggtcaagcggaaggacagccggggaagggccaagcgatctggatctggagcaacaaacttctcactactcaaacaagcaggtgacgtggaggagaatcccgggcctactagtatggactggatttggcgcatccttttccttgtcggcgctgctaccggcgcgcattccttcgaacaagttcagcttcaacagcctggcgctgagctggtcaaacctggcgcttctgtgaagatgagctgcaaagccagcggctacgccttcagcagctactggatcaactggatgaagcagaaacccggccagggactcgaatggatcggccaaatctatcccggcgacggcgacaccaactacaacggcaagttcaagggcagagccacactgaccgccgatacctctagcagcacagcctacatgcagctgagcagcctgaccagcgaagatagcgccgtgtacttctgtgcccggtccatcacaacagtcgtgggctgcgctatggactattggggccagggaacaagcgtgaccgtgtctagtacgcgtatccagaaccctgatcctgccgtgtaccagctgcgggatagcaagagcagcgacaagagcgtgtgtctgttcaccgacttcgacagccagaccaacgtgtcccagagcaaggactccgacgtgtacatcaccgataagtgcgtgctggacatgcggagcatggacttcaagagcaactccgccgtggcctggtccaacaagtccgatttcgcctgcgccaacgccttcaacaacagcattatccccgaggacacattcttcccaagcagcgacgtgccctgcgacgtgaagctggtggaaaagagcttcgagacagacaccaacctgaacttccagaacctgagcgtgatcggcttcagaatcctgctgctgaaagtggccggctttaacctgctgatgaccctgcggctgtggtccagccgcgccaagagaagcggatctggcgtgaagcagaccctgaatttcgacctgctgaagctggctggcgacgtggaatccaacccaggcccttctagaggccatatgaccgagtacaagcccacggtgcgcctcgccacccgcgacgacgtccccagggccgtacgcaccctcgccgccgcgttcgccgactaccccgccacgcgccacaccgtcgatccggaccgccacatcgagcgggtcaccgagctgcaagaactcttcctcacgcgcgtcgggctcgacatcggcaaggtgtgggtcgcggacgacggcgccgcggtggcggtctggaccacgccggagagcgtcgaagcgggggcggtgttcgccgagatcggcccgcgcatggccgagttgagcggttcccggctggccgcgcagcaacagatggaaggcctcctggcgccgcaccggcccaaggagcccgcgtggttcctggccaccgtcggcgtctcgcccgaccaccagggcaagggtctgggcagcgccgtcgtgctccccggagtggaggcggccgagcgcgccggggtgcccgccttcctggagacctccgcgccccgcaacctccccttctacgagcggctcggcttcaccgtcaccgccgacgtcgaggtgcccgaaggaccgcgcacctggtgcatgacccgcaagcccggtgcctga

SEQ ID NO: 5571 - DNA, 2688 bp, Artificial Sequence
  Synthetic Polynucloetide
atggccttaccagtgaccgccttgctcctgccgctggccttgctgctccacgccgccaggccggaggttcagctgcttgagtctggcggaggactggttcaacctggcggaagcctgagactgtcttgtgccgccagcggcttcacctttagcagctacgccatgagctgggtccgacaggctcctggcaaaggactggaatgggtgtccagcatcagcggcagcggcgactacatctactacgccgatagcgtgaagggcagattcaccatcagccgggacatcagcaagaacaccctgtacctccagatgaacagcctgagagccgaggacaccgccgtgtactactgtgccaaagaaggcaccggcgctaacagcagcctggccgattatagaggccagggcacactggtcaccgtgtctagtggcggaggaagcggcggaggatctgaagtgcaactggtggaatctggagggggaagcgtgcaggcaggcggatctctgagactgtcctgcaccacatctggcagagccctgaatatgtacgtgatgggatggtttcggcaggctcccggcaacgagcgggaatttgtggccgctacaagcagcagcggcggcagcacaagctaccccgattctgtgaagggcagattcacaatctcccgcgataatgccaagaatactgtgtacctgcagatgaatagtctgaagcctgaagatacagccgcctacagatgtgccgccagcccctacgtgtccacccccaccatgaacatcctggaagagtacagatactggggcctgggaacacaagtgacagtgtccagcggtaccggcggaggcggatctggcggcggaggtagcggtggcggaggatctgaattcgacatccagatgacacagagccctagcagcctgtctgccagcgtgggagacagagtgaccatcacatgcaaggccagcgaccacatcaacaactggctggcctggtatcagcagaagcctggacaggcccctaagctgctgatctacggcgctaccacactggaaacaggcgtgcccagcagattttctggcagcggctctggcaccgactacaccctgacaatatccagcctccagcctgaggacttcgccacctactactgtcagcagagctggaacaccccttggacattcggccagggcaccaagctggaaatcaagagactcgaggacctgaagaacgtgttcccacctgaggtggccgtgttcgagcctagcgaggccgagatcagccacacccagaaagccaccctcgtgtgcctggctaccggcttctaccccgaccatgtggaactgtcttggtgggtcaacggcaaagaggtgcacagcggcgtgtgtaccgacccccagccactgaaagaacagcccgccctgaacgacagccggtactgcctgagcagcagactgagagtgtccgccaccttctggcagaacccccggaaccacttcagatgccaggtgcagttctacggcctgagcgagaacgacgagtggacccaggacagagccaagcccgtgacccagatcgtgtctgccgaagcctggggcagagccgattgcggctttaccagcgagagctaccagcagggcgtgctgagcgccaccatcctgtacgagatcctgctgggcaaggccaccctgtacgccgtgctggtgtctgccctggtgctgatggctatggtcaagcggaaggacagccggggaagggccaagcgatctggatctggagcaacaaacttctcactactcaaacaagcaggtgacgtggaggagaatcccgggcctactagtatggactggatttggcgcatccttttccttgtcggcgctgctaccggcgcgcattccttcgaacaagttcagcttcaacagcctggcgctgagctggtcaaacctggcgcttctgtgaagatgagctgcaaagccagcggctacgccttcagcagctactggatcaactggatgaagcagaaacccggccagggactcgaatggatcggccaaatctatcccggcgacggcgacaccaactacaacggcaagttcaagggcagagccacactgaccgccgatacctctagcagcacagcctacatgcagctgagcagcctgaccagcgaagatagcgccgtgtacttctgtgcccggtccatcacaacagtcgtgggctgcgctatggactattggggccagggaacaagcgtgaccgtgtctagtacgcgtatccagaaccctgatcctgccgtgtaccagctgcgggatagcaagagcagcgacaagagcgtgtgtctgttcaccgacttcgacagccagaccaacgtgtcccagagcaaggactccgacgtgtacatcaccgataagtgcgtgctggacatgcggagcatggacttcaagagcaactccgccgtggcctggtccaacaagtccgatttcgcctgcgccaacgccttcaacaacagcattatccccgaggacacattcttcccaagccccgagagcagctgcgacgtgaagctggtggaaaagagcttcgagacagacaccaacctgaacttccagaacctgagcgtgatcggcttcagaatcctgctgctgaaagtggccggctttaacctgctgatgaccctgcggctgtggtccagc

SEQ ID NO: 5572 - DNA, 3363 bp, Artificial Sequence
  Synthetic Polynucloetide
atggccttaccagtgaccgccttgctcctgccgctggccttgctgctccacgccgccaggccggaggttcagctgcttgagtctggcggaggactggttcaacctggcggaagcctgagactgtcttgtgccgccagcggcttcacctttagcagctacgccatgagctgggtccgacaggctcctggcaaaggactggaatgggtgtccagcatcagcggcagcggcgactacatctactacgccgatagcgtgaagggcagattcaccatcagccgggacatcagcaagaacaccctgtacctccagatgaacagcctgagagccgaggacaccgccgtgtactactgtgccaaagaaggcaccggcgctaacagcagcctggccgattatagaggccagggcacactggtcaccgtgtctagtggcggaggaagcggcggaggatctgaagtgcaactggtggaatctggagggggaagcgtgcaggcaggcggatctctgagactgtcctgcaccacatctggcagagccctgaatatgtacgtgatgggatggtttcggcaggctcccggcaacgagcgggaatttgtggccgctacaagcagcagcggcggcagcacaagctaccccgattctgtgaagggcagattcacaatctcccgcgataatgccaagaatactgtgtacctgcagatgaatagtctgaagcctgaagatacagccgcctacagatgtgccgccagcccctacgtgtccacccccaccatgaacatcctggaagagtacagatactggggcctgggaacacaagtgacagtgtccagcggtaccggcggaggcggatctggcggcggaggtagcggtggcggaggatctgaattcgacatccagatgacacagagccctagcagcctgtctgccagcgtgggagacagagtgaccatcacatgcaaggccagcgaccacatcaacaactggctggcctggtatcagcagaagcctggacaggcccctaagctgctgatctacggcgctaccacactggaaacaggcgtgcccagcagattttctggcagcggctctggcaccgactacaccctgacaatatccagcctccagcctgaggacttcgccacctactactgtcagcagagctggaacaccccttggacattcggccagggcaccaagctggaaatcaagagactcgaggacctgaagaacgtgttcccacctgaggtggccgtgttcgagcctagcgaggccgagatcagccacacccagaaagccaccctcgtgtgcctggctaccggcttctaccccgaccatgtggaactgtcttggtgggtcaacggcaaagaggtgcacagcggcgtgtgtaccgacccccagccactgaaagaacagcccgccctgaacgacagccggtactgcctgagcagcagactgagagtgtccgccaccttctggcagaacccccggaaccacttcagatgccaggtgcagttctacggcctgagcgagaacgacgagtggacccaggacagagccaagcccgtgacccagatcgtgtctgccgaagcctggggcagagccgattgcggctttaccagcgagagctaccagcagggcgtgctgagcgccaccatcctgtacgagatcctgctgggcaaggccaccctgtacgccgtgctggtgtctgccctggtgctgatggctatggtcaagcggaaggacagccggggaagggccaagcgatctggatctggagcaacaaacttctcactactcaaacaagcaggtgacgtggaggagaatcccgggcctactagtatggactggatttggcgcatccttttccttgtcggcgctgctaccggcgcgcattccttcgaacaagttcagcttcaacagcctggcgctgagctggtcaaacctggcgcttctgtgaagatgagctgcaaagccagcggctacgccttcagcagctactggatcaactggatgaagcagaaacccggccagggactcgaatggatcggccaaatctatcccggcgacggcgacaccaactacaacggcaagttcaagggcagagccacactgaccgccgatacctctagcagcacagcctacatgcagctgagcagcctgaccagcgaagatagcgccgtgtacttctgtgcccggtccatcacaacagtcgtgggctgcgctatggactattggggccagggaacaagcgtgaccgtgtctagtacgcgtatccagaaccctgatcctgccgtgtaccagctgcgggatagcaagagcagcgacaagagcgtgtgtctgttcaccgacttcgacagccagaccaacgtgtcccagagcaaggactccgacgtgtacatcaccgataagtgcgtgctggacatgcggagcatggacttcaagagcaactccgccgtggcctggtccaacaagtccgatttcgcctgcgccaacgccttcaacaacagcattatccccgaggacacattcttcccaagccccgagagcagctgcgacgtgaagctggtggaaaagagcttcgagacagacaccaacctgaacttccagaacctgagcgtgatcggcttcagaatcctgctgctgaaagtggccggctttaacctgctgatgaccctgcggctgtggtccagccgcgccaagagaagcggatctggcgtgaagcagaccctgaatttcgacctgctgaagctggctggcgacgtggaatccaacccaggcccttctagaggcgggatccacaccatggctacctacgaggtgctgtgcgaggtggcaagaaagctgggcaccgacgacagagaagtggtgctgttcctgctgaacgtgttcatccctcagcctacactggcccagctgatcggtgcactgagagccctgaaagaggaaggccggctgacctttcctctgctggccgaatgcctgttcagagccggaagaagggatctgctgcgggacctgctgcatctggaccccagatttctggaaagacacctggccggcaccatgagctacttcagcccttaccagctgaccgtgctgcacgttgacggcgaactgtgcgccagagatattcggagcctgatcttcctgagcaaggacaccatcggcagccggtctacccctcagacatttctgcactgggtgtactgcatggaaaacctggacctgctcggccccacagatgtggatgccctgatgtccatgctgagaagcctgagcagagtggacctccagagacaggtgcagacactgatgggactgcacctgagcggacctagccacagccagcactacagacacacccct

SEQ ID NO: 5573 - DNA, 2700 bp, Artificial Sequence
  Synthetic Polynucloetide
atggccttaccagtgaccgccttgctcctgccgctggccttgctgctccacgccgccaggccggaggttcagctgcttgagtctggcggaggactggttcaacctggcggaagcctgagactgtcttgtgccgccagcggcttcacctttagcagctacgccatgagctgggtccgacaggctcctggcaaaggactggaatgggtgtccagcatcagcggcagcggcgactacatctactacgccgatagcgtgaagggcagattcaccatcagccgggacatcagcaagaacaccctgtacctccagatgaacagcctgagagccgaggacaccgccgtgtactactgtgccaaagaaggcaccggcgctaacagcagcctggccgattatagaggccagggcacactggtcaccgtgtctagtggcggaggaagcggcggaggatctgaagtgcaactggtggaatctggagggggaagcgtgcaggcaggcggatctctgagactgtcctgcaccacatctggcagagccctgaatatgtacgtgatgggatggtttcggcaggctcccggcaacgagcgggaatttgtggccgctacaagcagcagcggcggcagcacaagctaccccgattctgtgaagggcagattcacaatctcccgcgataatgccaagaatactgtgtacctgcagatgaatagtctgaagcctgaagatacagccgcctacagatgtgccgccagcccctacgtgtccacccccaccatgaacatcctggaagagtacagatactggggcctgggaacacaagtgacagtgtccagcggtaccggcggaggcggatctggcggcggaggtagcggtggcggaggatctgaattcgacatccagatgacacagagccctagcagcctgtctgccagcgtgggagacagagtgaccatcacatgcaaggccagcgaccacatcaacaactggctggcctggtatcagcagaagcctggacaggcccctaagctgctgatctacggcgctaccacactggaaacaggcgtgcccagcagattttctggcagcggctctggcaccgactacaccctgacaatatccagcctccagcctgaggacttcgccacctactactgtcagcagagctggaacaccccttggacattcggccagggcaccaagctggaaatcaagagactcgagatccagaaccctgatcctgccgtgtaccagctgcgggatagcaagagcagcgacaagagcgtgtgtctgttcaccgacttcgacagccagaccaacgtgtcccagagcaaggactccgacgtgtacatcaccgataagtgcgtgctggacatgcggagcatggacttcaagagcaactccgccgtggcctggtccaacaagtccgatttcgcctgcgccaacgccttcaacaacagcattatccccgaggacacattcttcccaagccccgagagcagctgcgacgtgaagctggtggaaaagagcttcgagacagacaccaacctgaacttccagaacctgagcgtgatcggcttcagaatcctgctgctgaaagtggccggctttaacctgctgatgaccctgcggctgtggtccagccgcgccaagagaagcggatctggcgtgaagcagaccctgaatttcgacctgctgaagctggctggcgacgtggaatccaacccaggccctactagtatggactggatttggcgcatccttttccttgtcggcgctgctaccggcgcgcattccttcgaacaagttcagcttcaacagcctggcgctgagctggtcaaacctggcgcttctgtgaagatgagctgcaaagccagcggctacgccttcagcagctactggatcaactggatgaagcagaaacccggccagggactcgaatggatcggccaaatctatcccggcgacggcgacaccaactacaacggcaagttcaagggcagagccacactgaccgccgatacctctagcagcacagcctacatgcagctgagcagcctgaccagcgaagatagcgccgtgtacttctgtgcccggtccatcacaacagtcgtgggctgcgctatggactattggggccagggaacaagcgtgaccgtgtctagtacgcgtgaggacctgaagaacgtgttcccacctgaggtggccgtgttcgagcctagcgaggccgagatcagccacacccagaaagccaccctcgtgtgcctggctaccggcttctaccccgaccatgtggaactgtcttggtgggtcaacggcaaagaggtgcacagcggcgtgtgtaccgacccccagccactgaaagaacagcccgccctgaacgacagccggtactgcctgagcagcagactgagagtgtccgccaccttctggcagaacccccggaaccacttcagatgccaggtgcagttctacggcctgagcgagaacgacgagtggacccaggacagagccaagcccgtgacccagatcgtgtctgccgaagcctggggcagagccgattgcggctttaccagcgagagctaccagcagggcgtgctgagcgccaccatcctgtacgagatcctgctgggcaaggccaccctgtacgccgtgctggtgtctgccctggtgctgatggctatggtcaagcggaaggacagccgggga

SEQ ID NO: 5574 - DNA, 3366 bp, Artificial Sequence
  Synthetic Polynucloetide
atggccttaccagtgaccgccttgctcctgccgctggccttgctgctccacgccgccaggccggaggttcagctgcttgagtctggcggaggactggttcaacctggcggaagcctgagactgtcttgtgccgccagcggcttcacctttagcagctacgccatgagctgggtccgacaggctcctggcaaaggactggaatgggtgtccagcatcagcggcagcggcgactacatctactacgccgatagcgtgaagggcagattcaccatcagccgggacatcagcaagaacaccctgtacctccagatgaacagcctgagagccgaggacaccgccgtgtactactgtgccaaagaaggcaccggcgctaacagcagcctggccgattatagaggccagggcacactggtcaccgtgtctagtggcggaggaagcggcggaggatctgaagtgcaactggtggaatctggagggggaagcgtgcaggcaggcggatctctgagactgtcctgcaccacatctggcagagccctgaatatgtacgtgatgggatggtttcggcaggctcccggcaacgagcgggaatttgtggccgctacaagcagcagcggcggcagcacaagctaccccgattctgtgaagggcagattcacaatctcccgcgataatgccaagaatactgtgtacctgcagatgaatagtctgaagcctgaagatacagccgcctacagatgtgccgccagcccctacgtgtccacccccaccatgaacatcctggaagagtacagatactggggcctgggaacacaagtgacagtgtccagcggtaccggcggaggcggatctggcggcggaggtagcggtggcggaggatctgaattcgacatccagatgacacagagccctagcagcctgtctgccagcgtgggagacagagtgaccatcacatgcaaggccagcgaccacatcaacaactggctggcctggtatcagcagaagcctggacaggcccctaagctgctgatctacggcgctaccacactggaaacaggcgtgcccagcagattttctggcagcggctctggcaccgactacaccctgacaatatccagcctccagcctgaggacttcgccacctactactgtcagcagagctggaacaccccttggacattcggccagggcaccaagctggaaatcaagagactcgagatccagaaccctgatcctgccgtgtaccagctgcgggatagcaagagcagcgacaagagcgtgtgtctgttcaccgacttcgacagccagaccaacgtgtcccagagcaaggactccgacgtgtacatcaccgataagtgcgtgctggacatgcggagcatggacttcaagagcaactccgccgtggcctggtccaacaagtccgatttcgcctgcgccaacgccttcaacaacagcattatccccgaggacacattcttcccaagccccgagagcagctgcgacgtgaagctggtggaaaagagcttcgagacagacaccaacctgaacttccagaacctgagcgtgatcggcttcagaatcctgctgctgaaagtggccggctttaacctgctgatgaccctgcggctgtggtccagccgcgccaagagaagcggatctggcgtgaagcagaccctgaatttcgacctgctgaagctggctggcgacgtggaatccaacccaggccctactagtatggactggatttggcgcatccttttccttgtcggcgctgctaccggcgcgcattccttcgaacaagttcagcttcaacagcctggcgctgagctggtcaaacctggcgcttctgtgaagatgagctgcaaagccagcggctacgccttcagcagctactggatcaactggatgaagcagaaacccggccagggactcgaatggatcggccaaatctatcccggcgacggcgacaccaactacaacggcaagttcaagggcagagccacactgaccgccgatacctctagcagcacagcctacatgcagctgagcagcctgaccagcgaagatagcgccgtgtacttctgtgcccggtccatcacaacagtcgtgggctgcgctatggactattggggccagggaacaagcgtgaccgtgtctagtacgcgtgaggacctgaagaacgtgttcccacctgaggtggccgtgttcgagcctagcgaggccgagatcagccacacccagaaagccaccctcgtgtgcctggctaccggcttctaccccgaccatgtggaactgtcttggtgggtcaacggcaaagaggtgcacagcggcgtgtgtaccgacccccagccactgaaagaacagcccgccctgaacgacagccggtactgcctgagcagcagactgagagtgtccgccaccttctggcagaacccccggaaccacttcagatgccaggtgcagttctacggcctgagcgagaacgacgagtggacccaggacagagccaagcccgtgacccagatcgtgtctgccgaagcctggggcagagccgattgcggctttaccagcgagagctaccagcagggcgtgctgagcgccaccatcctgtacgagatcctgctgggcaaggccaccctgtacgccgtgctggtgtctgccctggtgctgatggctatggtcaagcggaaggacagccggggaagggccaagcgatctggatctggagcaacaaacttctcactactcaaacaagcaggtgacgtggaggagaatcccgggccttctagaggcgggatccacaccatggctacctacgaggtgctgtgcgaggtggcaagaaagctgggcaccgacgacagagaagtggtgctgttcctgctgaacgtgttcatccctcagcctacactggcccagctgatcggtgcactgagagccctgaaagaggaaggccggctgacctttcctctgctggccgaatgcctgttcagagccggaagaagggatctgctgcgggacctgctgcatctggaccccagatttctggaaagacacctggccggcaccatgagctacttcagcccttaccagctgaccgtgctgcacgttgacggcgaactgtgcgccagagatattcggagcctgatcttcctgagcaaggacaccatcggcagccggtctacccctcagacatttctgcactgggtgtactgcatggaaaacctggacctgctcggccccacagatgtggatgccctgatgtccatgctgagaagcctgagcagagtggacctccagagacaggtgcagacactgatgggactgcacctgagcggacctagccacagccagcactacagacacacccct

SEQ ID NO: 5575 - DNA, 3525 bp, Artificial Sequence
  Synthetic Polynucloetide
atggccttaccagtgaccgccttgctcctgccgctggccttgctgctccacgccgccaggccgctcgaggggaaaccaattcccaaccctcttctgggactggattcaaccggcagcggcgaggacctgaagaacgtgttcccacctgaggtggccgtgttcgagcctagcaaggccgagatcgcccacacccagaaagccaccctcgtgtgcctggctaccggcttctaccccgaccatgtggaactgtcttggtgggtcaacggcaaagaggtgcacagcggcgtgtgtaccgacccccagccactgaaagaacagcccgccctgaacgacagccggtactgcctgagcagcagactgagagtgtccgccaccttctggcagaacccccggaaccacttcagatgccaggtgcagttctacggcctgagcgagaacgacgagtggacccaggacagagccaagcccgtgacccagatcgtgtctgccgaagcctggggcagagccgattgcggcatcaccagcgccagctaccaccagggcgtgctgagcgccaccatcctgtacgagatcctgctgggcaaggccaccctgtacgccgtgctggtgtctgccctggtgctgatggctatggtcaagcggaaggacagccggggaagggccaagcgatctggatctggagcaacaaacttctcactactcaaacaagcaggtgacgtggaggagaatcccgggcctactagcatggccttaccagtgaccgccttgctcctgccgctggccttgctgctccacgccgccaggccggaggttcagctgcttgagtctggcggaggactggttcaacctggcggaagcctgagactgtcttgtgccgccagcggcttcacctttagcagctacgccatgagctgggtccgacaggctcctggcaaaggactggaatgggtgtccagcatcagcggcagcggcgactacatctactacgccgatagcgtgaagggcagattcaccatcagccgggacatcagcaagaacaccctgtacctccagatgaacagcctgagagccgaggacaccgccgtgtactactgtgccaaagaaggcaccggcgctaacagcagcctggccgattatagaggccagggcacactggtcaccgtgtctagtggcggaggaagcggcggaggatctgaagtgcaactggtggaatctggagggggaagcgtgcaggcaggcggatctctgagactgtcctgcaccacatctggcagagccctgaatatgtacgtgatgggatggtttcggcaggctcccggcaacgagcgggaatttgtggccgctacaagcagcagcggcggcagcacaagctaccccgattctgtgaagggcagattcacaatctcccgcgataatgccaagaatactgtgtacctgcagatgaatagtctgaagcctgaagatacagccgcctacagatgtgccgccagcccctacgtgtccacccccaccatgaacatcctggaagagtacagatactggggcctgggaacacaagtgacagtgtccagcggtaccggcggaggcggatctggcggcggaggtagcggtggcggaggatctgaattcgacatccagatgacacagagccctagcagcctgtctgccagcgtgggagacagagtgaccatcacatgcaaggccagcgaccacatcaacaactggctggcctggtatcagcagaagcctggacaggcccctaagctgctgatctacggcgctaccacactggaaacaggcgtgcccagcagattttctggcagcggctctggcaccgactacaccctgacaatatccagcctccagcctgaggacttcgccacctactactgtcagcagagctggaacaccccttggacattcggccagggcaccaagctggaaatcaagagaggcggaggcggaagtggaggcggaggatctggcggcggaggctctcaagttcagcttcaacagcctggcgctgagctggtcaaacctggcgcttctgtgaagatgagctgcaaagccagcggctacgccttcagcagctactggatcaactggatgaagcagaaacccggccagggactcgaatggatcggccaaatctatcccggcgacggcgacaccaactacaacggcaagttcaagggcagagccacactgaccgccgatacctctagcagcacagcctacatgcagctgagcagcctgaccagcgaagatagcgccgtgtacttctgtgcccggtccatcacaacagtcgtgggctgcgctatggactattggggccagggaacaagcgtgaccgtgtctagtacgcgtgagcagaaactgatctcggaagaggatgggagcggcatccagaaccctgatcctgccgtgtaccagctgcgggatagcaagagcagcgacaagagcgtgtgtctgttcaccgacttcgacagccagaccaacgtgtcccagagcaaggactccgacgtgtacatcaccgataagtgcgtgctggacatgcggagcatggacttcaagagcaactccgccgtggcctggtccaacaagtccgatttcgcctgcgccaacgccttcaacaacagcattatccccgaggacacattcttcccaagcagcgacgtgccctgcgacgtgaagctggtggaaaagagcttcgagacagacaccaacctgaacttccagaacctgagcgtgatcggcttcagaatcctgctgctgaaagtggccggctttaacctgctgatgaccctgcggctgtggtccagccgcgccaagagaagcggatctggcgtgaagcagaccctgaatttcgacctgctgaagctggctggcgacgtggaatccaacccaggcccttctagaggccatatgaccgagtacaagcccacggtgcgcctcgccacccgcgacgacgtccccagggccgtacgcaccctcgccgccgcgttcgccgactaccccgccacgcgccacaccgtcgatccggaccgccacatcgagcgggtcaccgagctgcaagaactcttcctcacgcgcgtcgggctcgacatcggcaaggtgtgggtcgcggacgacggcgccgcggtggcggtctggaccacgccggagagcgtcgaagcgggggcggtgttcgccgagatcggcccgcgcatggccgagttgagcggttcccggctggccgcgcagcaacagatggaaggcctcctggcgccgcaccggcccaaggagcccgcgtggttcctggccaccgtcggcgtctcgcccgaccaccagggcaagggtctgggcagcgccgtcgtgctccccggagtggaggcggccgagcgcgccggggtgcccgccttcctggagacctccgcgccccgcaacctccccttctacgagcggctcggcttcaccgtcaccgccgacgtcgaggtgcccgaaggaccgcgcacctggtgcatgacccgcaagcccggtgcctga

SEQ ID NO: 5576 - DNA, 3528 bp, Artificial Sequence
  Synthetic Polynucloetide
atggccttaccagtgaccgccttgctcctgccgctggccttgctgctccacgccgccaggccgctcgagcagaaactgatctcggaagaggatctgggctccggcgatcgccctgatcctgccgtgtaccagctgcgggatagcaagagcagcgacaagagcgtgtgtctgttcaccgacttcgacagccagaccaacgtgtcccagagcaaggactccgacgtgtacatcaccgataagtgcgtgctggacatgcggagcatggacttcaagagcaactccgccgtggcctggtccaacaagtccgatttcgcctgcgccaacgccttcaacaacagcattatccccgaggacacattcttcccaagccccgagagcagctgcgacgtgaagctggtggaaaagagcttcgagacagacaccaacctgaacttccagaacctgagcgtgatcggcttcagaatcctgctgctgaaagtggccggctttaacctgctgatgaccctgcggctgtggtccagctctagtcgcgccaagagaagcggatctggcgtgaagcagaccctgaatttcgacctgctgaagctggctggcgacgtggaatccaacccaggccccactagcatggccttaccagtgaccgccttgctcctgccgctggccttgctgctccacgccgccaggccggaggttcagctgcttgagtctggcggaggactggttcaacctggcggaagcctgagactgtcttgtgccgccagcggcttcacctttagcagctacgccatgagctgggtccgacaggctcctggcaaaggactggaatgggtgtccagcatcagcggcagcggcgactacatctactacgccgatagcgtgaagggcagattcaccatcagccgggacatcagcaagaacaccctgtacctccagatgaacagcctgagagccgaggacaccgccgtgtactactgtgccaaagaaggcaccggcgctaacagcagcctggccgattatagaggccagggcacactggtcaccgtgtctagtggcggaggaagcggcggaggatctgaagtgcaactggtggaatctggagggggaagcgtgcaggcaggcggatctctgagactgtcctgcaccacatctggcagagccctgaatatgtacgtgatgggatggtttcggcaggctcccggcaacgagcgggaatttgtggccgctacaagcagcagcggcggcagcacaagctaccccgattctgtgaagggcagattcacaatctcccgcgataatgccaagaatactgtgtacctgcagatgaatagtctgaagcctgaagatacagccgcctacagatgtgccgccagcccctacgtgtccacccccaccatgaacatcctggaagagtacagatactggggcctgggaacacaagtgacagtgtccagcggtaccggcggaggcggatctggcggcggaggtagcggtggcggaggatctgaattcgacatccagatgacacagagccctagcagcctgtctgccagcgtgggagacagagtgaccatcacatgcaaggccagcgaccacatcaacaactggctggcctggtatcagcagaagcctggacaggcccctaagctgctgatctacggcgctaccacactggaaacaggcgtgcccagcagattttctggcagcggctctggcaccgactacaccctgacaatatccagcctccagcctgaggacttcgccacctactactgtcagcagagctggaacaccccttggacattcggccagggcaccaagctggaaatcaagagaggcggaggcggaagtggaggcggaggatctggcggcggaggctctcaagttcagcttcaacagcctggcgctgagctggtcaaacctggcgcttctgtgaagatgagctgcaaagccagcggctacgccttcagcagctactggatcaactggatgaagcagaaacccggccagggactcgaatggatcggccaaatctatcccggcgacggcgacaccaactacaacggcaagttcaagggcagagccacactgaccgccgatacctctagcagcacagcctacatgcagctgagcagcctgaccagcgaagatagcgccgtgtacttctgtgcccggtccatcacaacagtcgtgggctgcgctatggactattggggccagggaacaagcgtgaccgtgtctagtacgcgtgggaaaccaattcccaaccctcttctgggactggattcaaccggcagcggcgaggacctgaagaacgtgttcccacctgaggtggccgtgttcgagcctagcgaggccgagatcagccacacccagaaagccaccctcgtgtgcctggctaccggcttctaccccgaccatgtggaactgtcttggtgggtcaacggcaaagaggtgcacagcggcgtgtgtaccgacccccagccactgaaagaacagcccgccctgaacgacagccggtactgcctgagcagcagactgagagtgtccgccaccttctggcagaacccccggaaccacttcagatgccaggtgcagttctacggcctgagcgagaacgacgagtggacccaggacagagccaagcccgtgacccagatcgtgtctgccgaagcctggggcagagccgattgcggctttaccagcgagagctaccagcagggcgtgctgagcgccaccatcctgtacgagatcctgctgggcaaggccaccctgtacgccgtgctggtgtctgccctggtgctgatggctatggtcaagcggaaggacagccggggaagggccaagcgatctggatctggagcaacaaacttctcactactcaaacaagcaggtgacgtggaggagaatcccgggccttctagaggccatatgaccgagtacaagcccacggtgcgcctcgccacccgcgacgacgtccccagggccgtacgcaccctcgccgccgcgttcgccgactaccccgccacgcgccacaccgtcgatccggaccgccacatcgagcgggtcaccgagctgcaagaactcttcctcacgcgcgtcgggctcgacatcggcaaggtgtgggtcgcggacgacggcgccgcggtggcggtctggaccacgccggagagcgtcgaagcgggggcggtgttcgccgagatcggcccgcgcatggccgagttgagcggttcccggctggccgcgcagcaacagatggaaggcctcctggcgccgcaccggcccaaggagcccgcgtggttcctggccaccgtcggcgtctcgcccgaccaccagggcaagggtctgggcagcgccgtcgtgctccccggagtggaggcggccgagcgcgccggggtgcccgccttcctggagacctccgcgccccgcaacctccccttctacgagcggctcggcttcaccgtcaccgccgacgtcgaggtgcccgaaggaccgcgcacctggtgcatgacccgcaagcccggtgcctga

SEQ ID NO: 5577 - DNA, 3390 bp, Artificial Sequence
  Synthetic Polynucloetide
atggccttaccagtgaccgccttgctcctgccgctggccttgctgctccacgccgccaggccggaggttcagctgcttgagtctggcggaggactggttcaacctggcggaagcctgagactgtcttgtgccgccagcggcttcacctttagcagctacgccatgagctgggtccgacaggctcctggcaaaggactggaatgggtgtccagcatcagcggcagcggcgactacatctactacgccgatagcgtgaagggcagattcaccatcagccgggacatcagcaagaacaccctgtacctccagatgaacagcctgagagccgaggacaccgccgtgtactactgtgccaaagaaggcaccggcgctaacagcagcctggccgattatagaggccagggcacactggtcaccgtgtctagtggcggaggaagcggcggaggatctgaagtgcaactggtggaatctggagggggaagcgtgcaggcaggcggatctctgagactgtcctgcaccacatctggcagagccctgaatatgtacgtgatgggatggtttcggcaggctcccggcaacgagcgggaatttgtggccgctacaagcagcagcggcggcagcacaagctaccccgattctgtgaagggcagattcacaatctcccgcgataatgccaagaatactgtgtacctgcagatgaatagtctgaagcctgaagatacagccgcctacagatgtgccgccagcccctacgtgtccacccccaccatgaacatcctggaagagtacagatactggggcctgggaacacaagtgacagtgtccagcggtaccggcggaggcggatctggcggcggaggtagcggtggcggaggatctgaattcgacatccagatgacacagagccctagcagcctgtctgccagcgtgggagacagagtgaccatcacatgcaaggccagcgaccacatcaacaactggctggcctggtatcagcagaagcctggacaggcccctaagctgctgatctacggcgctaccacactggaaacaggcgtgcccagcagattttctggcagcggctctggcaccgactacaccctgacaatatccagcctccagcctgaggacttcgccacctactactgtcagcagagctggaacaccccttggacattcggccagggcaccaagctggaaatcaagagactcgaggacctgaagaacgtgttcccacctgaggtggccgtgttcgagcctagcgaggccgagatcagccacacccagaaagccaccctcgtgtgcctggctaccggcttctaccccgaccatgtggaactgtcttggtgggtcaacggcaaagaggtgcacagcggcgtgtctaccgacccccagccactgaaagaacagcccgccctgaacgacagccggtactgcctgagcagcagactgagagtgtccgccaccttctggcagaacccccggaaccacttcagatgccaggtgcagttctacggcctgagcgagaacgacgagtggacccaggacagagccaagcccgtgacccagatcgtgtctgccgaagcctggggcagagccgattgcggctttaccagcgagagctaccagcagggcgtgctgagcgccaccatcctgtacgagatcctgctgggcaaggccaccctgtacgccgtgctggtgtctgccctggtgctgatggctatggtcaagcggaaggacagccggggaagggccaagcgatctggatctggagcaacaaacttctcactactcaaacaagcaggtgacgtggaggagaatcccgggcctactagtatggactggatttggcgcatccttttccttgtcggcgctgctaccggcgcgcattccttcgaacaagttcagcttcaacagcctggcgctgagctggtcaaacctggcgcttctgtgaagatgagctgcaaagccagcggctacgccttcagcagctactggatcaactggatgaagcagaaacccggccagggactcgaatggatcggccaaatctatcccggcgacggcgacaccaactacaacggcaagttcaagggcagagccacactgaccgccgatacctctagcagcacagcctacatgcagctgagcagcctgaccagcgaagatagcgccgtgtacttctgtgcccggtccatcacaacagtcgtgggctgcgctatggactattggggccagggaacaagcgtgaccgtgtctagtacgcgtatccagaaccctgatcctgccgtgtaccagctgcgggatagcaagagcagcgacaagagcgtgtgtctgttcaccgacttcgacagccagaccaacgtgtcccagagcaaggactccgacgtgtacatcaccgataagaccgtgctggacatgcggagcatggacttcaagagcaactccgccgtggcctggtccaacaagtccgatttcgcctgcgccaacgccttcaacaacagcattatccccgaggacacattcttcccaagccccgagagcagctgcgacgtgaagctggtggaaaagagcttcgagacagacaccaacctgaacttccagaacctgagcgtgatcggcttcagaatcctgctgctgaaagtggccggctttaacctgctgatgaccctgcggctgtggtccagccgcgccaagagaagcggatctggcgtgaagcagaccctgaatttcgacctgctgaagctggctggcgacgtggaatccaacccaggcccttctagaggccatatgaccgagtacaagcccacggtgcgcctcgccacccgcgacgacgtccccagggccgtacgcaccctcgccgccgcgttcgccgactaccccgccacgcgccacaccgtcgatccggaccgccacatcgagcgggtcaccgagctgcaagaactcttcctcacgcgcgtcgggctcgacatcggcaaggtgtgggtcgcggacgacggcgccgcggtggcggtctggaccacgccggagagcgtcgaagcgggggcggtgttcgccgagatcggcccgcgcatggccgagttgagcggttcccggctggccgcgcagcaacagatggaaggcctcctggcgccgcaccggcccaaggagcccgcgtggttcctggccaccgtcggcgtctcgcccgaccaccagggcaagggtctgggcagcgccgtcgtgctccccggagtggaggcggccgagcgcgccggggtgcccgccttcctggagacctccgcgccccgcaacctccccttctacgagcggctcggcttcaccgtcaccgccgacgtcgaggtgcccgaaggaccgcgcacctggtgcatgacccgcaagcccggtgcctga

SEQ ID NO: 5578 - DNA, 3636 bp, Artificial Sequence
  Synthetic Polynucloetide
atggccttaccagtgaccgccttgctcctgccgctggccttgctgctccacgccgccaggccggaggttcagctgcttgagtctggcggaggactggttcaacctggcggaagcctgagactgtcttgtgccgccagcggcttcacctttagcagctacgccatgagctgggtccgacaggctcctggcaaaggactggaatgggtgtccagcatcagcggcagcggcgactacatctactacgccgatagcgtgaagggcagattcaccatcagccgggacatcagcaagaacaccctgtacctccagatgaacagcctgagagccgaggacaccgccgtgtactactgtgccaaagaaggcaccggcgctaacagcagcctggccgattatagaggccagggcacactggtcaccgtgtctagtggcggaggaagcggcggaggatctgaagtgcaactggtggaatctggagggggaagcgtgcaggcaggcggatctctgagactgtcctgcaccacatctggcagagccctgaatatgtacgtgatgggatggtttcggcaggctcccggcaacgagcgggaatttgtggccgctacaagcagcagcggcggcagcacaagctaccccgattctgtgaagggcagattcacaatctcccgcgataatgccaagaatactgtgtacctgcagatgaatagtctgaagcctgaagatacagccgcctacagatgtgccgccagcccctacgtgtccacccccaccatgaacatcctggaagagtacagatactggggcctgggaacacaagtgacagtgtccagcggtaccggcggaggcggatctggcggcggaggtagcggtggcggaggatctgaattcgacatccagatgacacagagccctagcagcctgtctgccagcgtgggagacagagtgaccatcacatgcaaggccagcgaccacatcaacaactggctggcctggtatcagcagaagcctggacaggcccctaagctgctgatctacggcgctaccacactggaaacaggcgtgcccagcagattttctggcagcggctctggcaccgactacaccctgacaatatccagcctccagcctgaggacttcgccacctactactgtcagcagagctggaacaccccttggacattcggccagggcaccaagctggaaatcaagagactcgaggacctgaagaacgtgttcccacctgaggtggccgtgttcgagcctagcgaggccgagatcagccacacccagaaagccaccctcgtgtgcctggctaccggcttctaccccgaccatgtggaactgtcttggtgggtcaacggcaaagaggtgcacagcggcgtgtctaccgacccccagccactgaaagaacagcccgccctgaacgacagccggtactgcctgagcagcagactgagagtgtccgccaccttctggcagaacccccggaaccacttcagatgccaggtgcagttctacggcctgagcgagaacgacgagtggacccaggacagagccaagcccgtgacccagatcgtgtctgccgaagcctggggcagagccgattgcggctttaccagcgagagctaccagcagggcgtgctgagcgccaccatcctgtacgagatcctgctgggcaaggccaccctgtacgccgtgctggtgtctgccctggtgctgatggctatggtcaagcggaaggacagccggggaagggccaagcgatctggatctggagcaacaaacttctcactactcaaacaagcaggtgacgtggaggagaatcccgggcctactagtatggactggatttggcgcatccttttccttgtcggcgctgctaccggcgcgcattccttcgaacaagttcagcttcaacagcctggcgctgagctggtcaaacctggcgcttctgtgaagatgagctgcaaagccagcggctacgccttcagcagctactggatcaactggatgaagcagaaacccggccagggactcgaatggatcggccaaatctatcccggcgacggcgacaccaactacaacggcaagttcaagggcagagccacactgaccgccgatacctctagcagcacagcctacatgcagctgagcagcctgaccagcgaagatagcgccgtgtacttctgtgcccggtccatcacaacagtcgtgggctgcgctatggactattggggccagggaacaagcgtgaccgtgtctagtacgcgtgagcagaaactgatctcggaagaggatgggagcggcaccccattcccttctctggcccctcccatcatgctgctggtggacggcaagcagcagatggtggtcgtgtgcctggtgctggatgtggccccacctggactggacagccccatctggtttagcgccggcaatggctctgccctggacgcctttacctacggcccaagccctgccaccgatggcacctggacaaatctggcccacctgagcctgcccagcgaggaactggcttcttgggagcctctcgtgtgccacacaggacctggcgctgagggacacagcagatccacccagcctatgcacctgtctggcgaggccagcaccgccagaacctgtcctcaggaacctctgagaggcacccctggcggagcactgtggctgggagtgctgagactgctgctgttcaagctgctgctgtttgacctgctgctgacctgctcctgtctgtgcgatcctgccggccctctgccttctcctgccaccaccacaagactgagagccctgggcagccacagactgcaccctgccacagagacaggcggcagagaggccacaagcagccctagaccccagcccagagacagaagatggggcgataccccccctggcagaaagcctggatctccagtccgcgccaagagaagcggatctggcgtgaagcagaccctgaatttcgacctgctgaagctggctggcgacgtggaatccaacccaggcccttctagaggccatatgaccgagtacaagcccacggtgcgcctcgccacccgcgacgacgtccccagggccgtacgcaccctcgccgccgcgttcgccgactaccccgccacgcgccacaccgtcgatccggaccgccacatcgagcgggtcaccgagctgcaagaactcttcctcacgcgcgtcgggctcgacatcggcaaggtgtgggtcgcggacgacggcgccgcggtggcggtctggaccacgccggagagcgtcgaagcgggggcggtgttcgccgagatcggcccgcgcatggccgagttgagcggttcccggctggccgcgcagcaacagatggaaggcctcctggcgccgcaccggcccaaggagcccgcgtggttcctggccaccgtcggcgtctcgcccgaccaccagggcaagggtctgggcagcgccgtcgtgctccccggagtggaggcggccgagcgcgccggggtgcccgccttcctggagacctccgcgccccgcaacctccccttctacgagcggctcggcttcaccgtcaccgccgacgtcgaggtgcccgaaggaccgcgcacctggtgcatgacccgcaagcccggtgcctga

SEQ ID NO: 5579 - DNA, 3690 bp, Artificial Sequence
  Synthetic Polynucloetide
atggccttaccagtgaccgccttgctcctgccgctggccttgctgctccacgccgccaggccgctcgaggacctgaagaacgtgttcccacctgaggtggccgtgttcgagcctagcgaggccgagatcagccacacccagaaagccaccctcgtgtgcctggctaccggcttctaccccgaccatgtggaactgtcttggtgggtcaacggcaaagaggtgcacagcggcgtgtctaccgacccccagccactgaaagaacagcccgccctgaacgacagccggtactgcctgagcagcagactgagagtgtccgccaccttctggcagaacccccggaaccacttcagatgccaggtgcagttctacggcctgagcgagaacgacgagtggacccaggacagagccaagcccgtgacccagatcgtgtctgccgaagcctggggcagagccgattgcggctttaccagcgagagctaccagcagggcgtgctgagcgccaccatcctgtacgagatcctgctgggcaaggccaccctgtacgccgtgctggtgtctgccctggtgctgatggctatggtcaagcggaaggacagccggggaagggccaagcgatctggatctggagcaacaaacttctcactactcaaacaagcaggtgacgtggaggagaatcccgggcctactagcatggccttaccagtgaccgccttgctcctgccgctggccttgctgctccacgccgccaggccggaggttcagctgcttgagtctggcggaggactggttcaacctggcggaagcctgagactgtcttgtgccgccagcggcttcacctttagcagctacgccatgagctgggtccgacaggctcctggcaaaggactggaatgggtgtccagcatcagcggcagcggcgactacatctactacgccgatagcgtgaagggcagattcaccatcagccgggacatcagcaagaacaccctgtacctccagatgaacagcctgagagccgaggacaccgccgtgtactactgtgccaaagaaggcaccggcgctaacagcagcctggccgattatagaggccagggcacactggtcaccgtgtctagtggcggaggaagcggcggaggatctgaagtgcaactggtggaatctggagggggaagcgtgcaggcaggcggatctctgagactgtcctgcaccacatctggcagagccctgaatatgtacgtgatgggatggtttcggcaggctcccggcaacgagcgggaatttgtggccgctacaagcagcagcggcggcagcacaagctaccccgattctgtgaagggcagattcacaatctcccgcgataatgccaagaatactgtgtacctgcagatgaatagtctgaagcctgaagatacagccgcctacagatgtgccgccagcccctacgtgtccacccccaccatgaacatcctggaagagtacagatactggggcctgggaacacaagtgacagtgtccagcggtaccggcggaggcggatctggcggcggaggtagcggtggcggaggatctgaattcgacatccagatgacacagagccctagcagcctgtctgccagcgtgggagacagagtgaccatcacatgcaaggccagcgaccacatcaacaactggctggcctggtatcagcagaagcctggacaggcccctaagctgctgatctacggcgctaccacactggaaacaggcgtgcccagcagattttctggcagcggctctggcaccgactacaccctgacaatatccagcctccagcctgaggacttcgccacctactactgtcagcagagctggaacaccccttggacattcggccagggcaccaagctggaaatcaagagaggcggaggcggaagtggaggcggaggatctggcggcggaggctctcaagttcagcttcaacagcctggcgctgagctggtcaaacctggcgcttctgtgaagatgagctgcaaagccagcggctacgccttcagcagctactggatcaactggatgaagcagaaacccggccagggactcgaatggatcggccaaatctatcccggcgacggcgacaccaactacaacggcaagttcaagggcagagccacactgaccgccgatacctctagcagcacagcctacatgcagctgagcagcctgaccagcgaagatagcgccgtgtacttctgtgcccggtccatcacaacagtcgtgggctgcgctatggactattggggccagggaacaagcgtgaccgtgtctagtacgcgtgagcagaaactgatctcggaagaggatctggggagcggcaccccattcccttctctggcccctcccatcatgctgctggtggacggcaagcagcagatggtggtcgtgtgcctggtgctggatgtggccccacctggactggacagccccatctggtttagcgccggcaatggctctgccctggacgcctttacctacggcccaagccctgccaccgatggcacctggacaaatctggcccacctgagcctgcccagcgaggaactggcttcttgggagcctctcgtgtgccacacaggacctggcgctgagggacacagcagatccacccagcctatgcacctgtctggcgaggccagcaccgccagaacctgtcctcaggaacctctgagaggcacccctggcggagcactgtggctgggagtgctgagactgctgctgttcaagctgctgctgtttgacctgctgctgacctgctcctgtctgtgcgatcctgccggccctctgccttctcctgccaccaccacaagactgagagccctgggcagccacagactgcaccctgccacagagacaggcggcagagaggccacaagcagccctagaccccagcccagagacagaagatggggcgataccccccctggcagaaagcctggatctccagtccgcgccaagagaagcggatctggcgtgaagcagaccctgaatttcgacctgctgaagctggctggcgacgtggaatccaacccaggcccttctagatctagaggccatatgaccgagtacaagcccacggtgcgcctcgccacccgcgacgacgtccccagggccgtacgcaccctcgccgccgcgttcgccgactaccccgccacgcgccacaccgtcgatccggaccgccacatcgagcgggtcaccgagctgcaagaactcttcctcacgcgcgtcgggctcgacatcggcaaggtgtgggtcgcggacgacggcgccgcggtggcggtctggaccacgccggagagcgtcgaagcgggggcggtgttcgccgagatcggcccgcgcatggccgagttgagcggttcccggctggccgcgcagcaacagatggaaggcctcctggcgccgcaccggcccaaggagcccgcgtggttcctggccaccgtcggcgtctcgcccgaccaccagggcaagggtctgggcagcgccgtcgtgctccccggagtggaggcggccgagcgcgccggggtgcccgccttcctggagacctccgcgccccgcaacctccccttctacgagcggctcggcttcaccgtcaccgccgacgtcgaggtgcccgaaggaccgcgcacctggtgcatgacccgcaagcccggtgcctga

SEQ ID NO: 5580 - DNA, 3501 bp, Artificial Sequence
  Synthetic Polynucloetide
atggccttaccagtgaccgccttgctcctgccgctggccttgctgctccacgccgccaggccggaggttcagctgcttgagtctggcggaggactggttcaacctggcggaagcctgagactgtcttgtgccgccagcggcttcacctttagcagctacgccatgagctgggtccgacaggctcctggcaaaggactggaatgggtgtccagcatcagcggcagcggcgactacatctactacgccgatagcgtgaagggcagattcaccatcagccgggacatcagcaagaacaccctgtacctccagatgaacagcctgagagccgaggacaccgccgtgtactactgtgccaaagaaggcaccggcgctaacagcagcctggccgattatagaggccagggcacactggtcaccgtgtctagtggcggaggaagcggcggaggatctgaagtgcaactggtggaatctggagggggaagcgtgcaggcaggcggatctctgagactgtcctgcaccacatctggcagagccctgaatatgtacgtgatgggatggtttcggcaggctcccggcaacgagcgggaatttgtggccgctacaagcagcagcggcggcagcacaagctaccccgattctgtgaagggcagattcacaatctcccgcgataatgccaagaatactgtgtacctgcagatgaatagtctgaagcctgaagatacagccgcctacagatgtgccgccagcccctacgtgtccacccccaccatgaacatcctggaagagtacagatactggggcctgggaacacaagtgacagtgtccagcggtaccggcggaggcggatctggcggcggaggtagcggtggcggaggatctgaattcgacatccagatgacacagagccctagcagcctgtctgccagcgtgggagacagagtgaccatcacatgcaaggccagcgaccacatcaacaactggctggcctggtatcagcagaagcctggacaggcccctaagctgctgatctacggcgctaccacactggaaacaggcgtgcccagcagattttctggcagcggctctggcaccgactacaccctgacaatatccagcctccagcctgaggacttcgccacctactactgtcagcagagctggaacaccccttggacattcggccagggcaccaagctggaaatcaagagactcgaggggaaaccaattcccaaccctcttctgggactggattcaaccggcagcggcgacaagcagctggacgccgacgtgtcccccaagcctaccatcttcctgccctctatcgccgagacaaagctccagaaggccggcacctacctgtgcctgctggaaaagttcttcccagatgtgattaagatccactggcaggaaaagaagtccaacaccatcctgggcagccaggaaggcaacaccatgaagaccaacgacacctacatgaagttcagctggctgaccgtgcccgagaagtccctggacaaagaacacagatgcatcgtgcggcacgaaaacaacaagaacggcgtggaccaggaaatcatcttcccacccatcaagaccgatgtgattacaatggaccccaaggacaactgctccaaggacgccaacgataccctgctgctccagctgaccaacaccagcgcctactacatgtacttgttgctgctgctgaagtccgtggtgtacttcgccatcatcacatgctgcctgctgcggagaaccgccttctgctgcaacggcgagaagtctagggccaagcgatctggatctggagcaacaaacttctcactactcaaacaagcaggtgacgtggaggagaatcccgggcctactagtatggactggatttggcgcatccttttccttgtcggcgctgctaccggcgcgcattccttcgaacaagttcagcttcaacagcctggcgctgagctggtcaaacctggcgcttctgtgaagatgagctgcaaagccagcggctacgccttcagcagctactggatcaactggatgaagcagaaacccggccagggactcgaatggatcggccaaatctatcccggcgacggcgacaccaactacaacggcaagttcaagggcagagccacactgaccgccgatacctctagcagcacagcctacatgcagctgagcagcctgaccagcgaagatagcgccgtgtacttctgtgcccggtccatcacaacagtcgtgggctgcgctatggactattggggccagggaacaagcgtgaccgtgtctagtacgcgtgagcagaaactgatctcggaagaggatgggagcggcagccagcctcacaccaagcccagcgtgttcgtgatgaagaacggcaccaacgtggcctgcctcgtgaaagagttctaccccaaggacatcaggatcaacctggtgtccagcaagaagatcaccgagttcgaccccgccatcgtgatctcccccagcggcaagtacaacgccgtgaagctggggaagtacgaggacagcaacagcgtgacctgctccgtgcagcacgacaacaagaccgtgcacagcaccgactttgaagtgaaaaccgactccaccgaccacgtgaagcccaaagagacagagaacaccaagcagcccagcaagagctgccacaagcccaaggccatcgtgcacaccgagaaagtgaacatgatgagcctgaccgtgctgggcctgcggatgctgttcgccaaaaccgtggccgtgaacttcctgctgaccgccaagctgttcttcctccgcgccaagagaagcggatctggcgtgaagcagaccctgaatttcgacctgctgaagctggctggcgacgtggaatccaacccaggcccttctagaggccatatgaccgagtacaagcccacggtgcgcctcgccacccgcgacgacgtccccagggccgtacgcaccctcgccgccgcgttcgccgactaccccgccacgcgccacaccgtcgatccggaccgccacatcgagcgggtcaccgagctgcaagaactcttcctcacgcgcgtcgggctcgacatcggcaaggtgtgggtcgcggacgacggcgccgcggtggcggtctggaccacgccggagagcgtcgaagcgggggcggtgttcgccgagatcggcccgcgcatggccgagttgagcggttcccggctggccgcgcagcaacagatggaaggcctcctggcgccgcaccggcccaaggagcccgcgtggttcctggccaccgtcggcgtctcgcccgaccaccagggcaagggtctgggcagcgccgtcgtgctccccggagtggaggcggccgagcgcgccggggtgcccgccttcctggagacctccgcgccccgcaacctccccttctacgagcggctcggcttcaccgtcaccgccgacgtcgaggtgcccgaaggaccgcgcacctggtgcatgacccgcaagcccggtgcctga

SEQ ID NO: 5581 - DNA, 2712 bp, Artificial Sequence
  Synthetic Polynucloetide
atggccttaccagtgaccgccttgctcctgccgctggccttgctgctccacgccgccaggccggaggttcagctgcttgagtctggcggaggactggttcaacctggcggaagcctgagactgtcttgtgccgccagcggcttcacctttagcagctacgccatgagctgggtccgacaggctcctggcaaaggactggaatgggtgtccagcatcagcggcagcggcgactacatctactacgccgatagcgtgaagggcagattcaccatcagccgggacatcagcaagaacaccctgtacctccagatgaacagcctgagagccgaggacaccgccgtgtactactgtgccaaagaaggcaccggcgctaacagcagcctggccgattatagaggccagggcacactggtcaccgtgtctagtggcggaggaagcggcggaggatctgaagtgcaactggtggaatctggagggggaagcgtgcaggcaggcggatctctgagactgtcctgcaccacatctggcagagccctgaatatgtacgtgatgggatggtttcggcaggctcccggcaacgagcgggaatttgtggccgctacaagcagcagcggcggcagcacaagctaccccgattctgtgaagggcagattcacaatctcccgcgataatgccaagaatactgtgtacctgcagatgaatagtctgaagcctgaagatacagccgcctacagatgtgccgccagcccctacgtgtccacccccaccatgaacatcctggaagagtacagatactggggcctgggaacacaagtgacagtgtccagcggtaccggcggaggcggatctggcggcggaggtagcggtggcggaggatctgaattcgacatccagatgacacagagccctagcagcctgtctgccagcgtgggagacagagtgaccatcacatgcaaggccagcgaccacatcaacaactggctggcctggtatcagcagaagcctggacaggcccctaagctgctgatctacggcgctaccacactggaaacaggcgtgcccagcagattttctggcagcggctctggcaccgactacaccctgacaatatccagcctccagcctgaggacttcgccacctactactgtcagcagagctggaacaccccttggacattcggccagggcaccaagctggaaatcaagagactcgagagccagcctcacaccaagcccagcgtgttcgtgatgaagaacggcaccaacgtggcctgcctcgtgaaagagttctaccccaaggacatcaggatcaacctggtgtccagcaagaagatcaccgagttcgaccccgccatcgtgatctcccccagcggcaagtacaacgccgtgaagctggggaagtacgaggacagcaacagcgtgacctgctccgtgcagcacgacaacaagaccgtgcacagcaccgactttgaagtgaaaaccgactccaccgaccacgtgaagcccaaagagacagagaacaccaagcagcccagcaagagctgccacaagcccaaggccatcgtgcacaccgagaaagtgaacatgatgagcctgaccgtgctgggcctgcggatgctgttcgccaaaaccgtggccgtgaacttcctgctgaccgccaagctgttcttcctcagggccaagcgatctggatctggagcaacaaacttctcactactcaaacaagcaggtgacgtggaggagaatcccgggcctactagtatggactggatttggcgcatccttttccttgtcggcgctgctaccggcgcgcattccttcgaacaagttcagcttcaacagcctggcgctgagctggtcaaacctggcgcttctgtgaagatgagctgcaaagccagcggctacgccttcagcagctactggatcaactggatgaagcagaaacccggccagggactcgaatggatcggccaaatctatcccggcgacggcgacaccaactacaacggcaagttcaagggcagagccacactgaccgccgatacctctagcagcacagcctacatgcagctgagcagcctgaccagcgaagatagcgccgtgtacttctgtgcccggtccatcacaacagtcgtgggctgcgctatggactattggggccagggaacaagcgtgaccgtgtctagtacgcgtgacaagcagctggacgccgacgtgtcccccaagcctaccatcttcctgccctctatcgccgagacaaagctccagaaggccggcacctacctgtgcctgctggaaaagttcttcccagatgtgattaagatccactggcaggaaaagaagtccaacaccatcctgggcagccaggaaggcaacaccatgaagaccaacgacacctacatgaagttcagctggctgaccgtgcccgagaagtccctggacaaagaacacagatgcatcgtgcggcacgaaaacaacaagaacggcgtggaccaggaaatcatcttcccacccatcaagaccgatgtgattacaatggaccccaaggacaactgctccaaggacgccaacgataccctgctgctccagctgaccaacaccagcgcctactacatgtacttgttgctgctgctgaagtccgtggtgtacttcgccatcatcacatgctgcctgctgcggagaaccgccttctgctgcaacggcgagaagtct

SEQ ID NO: 5582 - DNA, 3546 bp, Artificial Sequence
  Synthetic Polynucloetide
atggccttaccagtgaccgccttgctcctgccgctggccttgctgctccacgccgccaggccgctcgaggggaaaccaattcccaaccctcttctgggactggattcaaccggcagcggcgacaagcagctggacgccgacgtgtcccccaagcctaccatcttcctgccctctatcgccgagacaaagctccagaaggccggcacctacctgtgcctgctggaaaagttcttcccagatgtgattaagatccactggcaggaaaagaagtccaacaccatcctgggcagccaggaaggcaacaccatgaagaccaacgacacctacatgaagttcagctggctgaccgtgcccgagaagtccctggacaaagaacacagatgcatcgtgcggcacgaaaacaacaagaacggcgtggaccaggaaatcatcttcccacccatcaagaccgatgtgattacaatggaccccaaggacaactgctccaaggacgccaacgataccctgctgctccagctgaccaacaccagcgcctactacatgtacttgttgctgctgctgaagtccgtggtgtacttcgccatcatcacatgctgcctgctgcggagaaccgccttctgctgcaacggcgagaagtctagggccaagcgatctggatctggagcaacaaacttctcactactcaaacaagcaggtgacgtggaggagaatcccgggcctactagcatggccttaccagtgaccgccttgctcctgccgctggccttgctgctccacgccgccaggccggaggttcagctgcttgagtctggcggaggactggttcaacctggcggaagcctgagactgtcttgtgccgccagcggcttcacctttagcagctacgccatgagctgggtccgacaggctcctggcaaaggactggaatgggtgtccagcatcagcggcagcggcgactacatctactacgccgatagcgtgaagggcagattcaccatcagccgggacatcagcaagaacaccctgtacctccagatgaacagcctgagagccgaggacaccgccgtgtactactgtgccaaagaaggcaccggcgctaacagcagcctggccgattatagaggccagggcacactggtcaccgtgtctagtggcggaggaagcggcggaggatctgaagtgcaactggtggaatctggagggggaagcgtgcaggcaggcggatctctgagactgtcctgcaccacatctggcagagccctgaatatgtacgtgatgggatggtttcggcaggctcccggcaacgagcgggaatttgtggccgctacaagcagcagcggcggcagcacaagctaccccgattctgtgaagggcagattcacaatctcccgcgataatgccaagaatactgtgtacctgcagatgaatagtctgaagcctgaagatacagccgcctacagatgtgccgccagcccctacgtgtccacccccaccatgaacatcctggaagagtacagatactggggcctgggaacacaagtgacagtgtccagcggtaccggcggaggcggatctggcggcggaggtagcggtggcggaggatctgaattcgacatccagatgacacagagccctagcagcctgtctgccagcgtgggagacagagtgaccatcacatgcaaggccagcgaccacatcaacaactggctggcctggtatcagcagaagcctggacaggcccctaagctgctgatctacggcgctaccacactggaaacaggcgtgcccagcagattttctggcagcggctctggcaccgactacaccctgacaatatccagcctccagcctgaggacttcgccacctactactgtcagcagagctggaacaccccttggacattcggccagggcaccaagctggaaatcaagagaggcggaggcggaagtggaggcggaggatctggcggcggaggctctcaagttcagcttcaacagcctggcgctgagctggtcaaacctggcgcttctgtgaagatgagctgcaaagccagcggctacgccttcagcagctactggatcaactggatgaagcagaaacccggccagggactcgaatggatcggccaaatctatcccggcgacggcgacaccaactacaacggcaagttcaagggcagagccacactgaccgccgatacctctagcagcacagcctacatgcagctgagcagcctgaccagcgaagatagcgccgtgtacttctgtgcccggtccatcacaacagtcgtgggctgcgctatggactattggggccagggaacaagcgtgaccgtgtctagtacgcgtgagcagaaactgatctcggaagaggatgggagcggcagccagcctcacaccaagcccagcgtgttcgtgatgaagaacggcaccaacgtggcctgcctcgtgaaagagttctaccccaaggacatcaggatcaacctggtgtccagcaagaagatcaccgagttcgaccccgccatcgtgatctcccccagcggcaagtacaacgccgtgaagctggggaagtacgaggacagcaacagcgtgacctgctccgtgcagcacgacaacaagaccgtgcacagcaccgactttgaagtgaaaaccgactccaccgaccacgtgaagcccaaagagacagagaacaccaagcagcccagcaagagctgccacaagcccaaggccatcgtgcacaccgagaaagtgaacatgatgagcctgaccgtgctgggcctgcggatgctgttcgccaaaaccgtggccgtgaacttcctgctgaccgccaagctgttcttcctccgcgccaagagaagcggatctggcgtgaagcagaccctgaatttcgacctgctgaagctggctggcgacgtggaatccaacccaggcccttctagaggccatatgaccgagtacaagcccacggtgcgcctcgccacccgcgacgacgtccccagggccgtacgcaccctcgccgccgcgttcgccgactaccccgccacgcgccacaccgtcgatccggaccgccacatcgagcgggtcaccgagctgcaagaactcttcctcacgcgcgtcgggctcgacatcggcaaggtgtgggtcgcggacgacggcgccgcggtggcggtctggaccacgccggagagcgtcgaagcgggggcggtgttcgccgagatcggcccgcgcatggccgagttgagcggttcccggctggccgcgcagcaacagatggaaggcctcctggcgccgcaccggcccaaggagcccgcgtggttcctggccaccgtcggcgtctcgcccgaccaccagggcaagggtctgggcagcgccgtcgtgctccccggagtggaggcggccgagcgcgccggggtgcccgccttcctggagacctccgcgccccgcaacctccccttctacgagcggctcggcttcaccgtcaccgccgacgtcgaggtgcccgaaggaccgcgcacctggtgcatgacccgcaagcccggtgcctga

SEQ ID NO: 5583 - DNA, 3921 bp, Artificial Sequence
  Synthetic Polynucloetide
atggccttaccagtgaccgccttgctcctgccgctggccttgctgctccacgccgccaggccggaggttcagctgcttgagtctggcggaggactggttcaacctggcggaagcctgagactgtcttgtgccgccagcggcttcacctttagcagctacgccatgagctgggtccgacaggctcctggcaaaggactggaatgggtgtccagcatcagcggcagcggcgactacatctactacgccgatagcgtgaagggcagattcaccatcagccgggacatcagcaagaacaccctgtacctccagatgaacagcctgagagccgaggacaccgccgtgtactactgtgccaaagaaggcaccggcgctaacagcagcctggccgattatagaggccagggcacactggtcaccgtgtctagtggcggaggaagcggcggaggatctgaagtgcaactggtggaatctggagggggaagcgtgcaggcaggcggatctctgagactgtcctgcaccacatctggcagagccctgaatatgtacgtgatgggatggtttcggcaggctcccggcaacgagcgggaatttgtggccgctacaagcagcagcggcggcagcacaagctaccccgattctgtgaagggcagattcacaatctcccgcgataatgccaagaatactgtgtacctgcagatgaatagtctgaagcctgaagatacagccgcctacagatgtgccgccagcccctacgtgtccacccccaccatgaacatcctggaagagtacagatactggggcctgggaacacaagtgacagtgtccagcggtaccggcggaggcggatctggcggcggaggtagcggtggcggaggatctgaattcgacatccagatgacacagagccctagcagcctgtctgccagcgtgggagacagagtgaccatcacatgcaaggccagcgaccacatcaacaactggctggcctggtatcagcagaagcctggacaggcccctaagctgctgatctacggcgctaccacactggaaacaggcgtgcccagcagattttctggcagcggctctggcaccgactacaccctgacaatatccagcctccagcctgaggacttcgccacctactactgtcagcagagctggaacaccccttggacattcggccagggcaccaagctggaaatcaagagaggacagcctaaggccaatcctaccgtgacactgttccctccaagcagcgaagaactccaggccaacaaggccacacttgtgtgcctgatctccgacttctaccctggggctgtgacagtggcttggaaggccgatggatctcctgtgaaagccggcgtggaaaccaccaagccatccaagcagagcaacaacaaatacgccgccagctcctacctgagcctgacacctgagcagtggaagtcccacagatcctacagctgccaagtgacccacgaaggcagcaccgtggaaaagacagtggcccctacagagtgcagcggatcccagagcttcggcctgctggaccccaagctgtgctacctgctggatggcatcctgttcatctacggcgtgatcctgaccgccctgttcctgagagtgaagttcagcagaagcgccgacgcccctgcctaccagcagggacagaaccaactgtacaacgagctgaacctgggcagacgggaagagtacgacgtgctggacaagcggagaggcagggaccctgagatgggcggaaagccccagcggagaaagaacccccaggaaggactgtataacgaactccagaaagacaagatggccgaagcctacagcgagatcggcatgaagggcgagcggagaagaggcaagggccacgatggcctgtaccagggcctgagcaccgccaccaaggacacctatgacgccctgcacatgcaggccctgcctccaagaagggccaagcgatctggatctggagcaacaaacttctcactactcaaacaagcaggtgacgtggaggagaatcccgggcctactagtatggactggatttggcgcatccttttccttgtcggcgctgctaccggcgcgcattccttcgaacaagttcagcttcaacagcctggcgctgagctggtcaaacctggcgcttctgtgaagatgagctgcaaagccagcggctacgccttcagcagctactggatcaactggatgaagcagaaacccggccagggactcgaatggatcggccaaatctatcccggcgacggcgacaccaactacaacggcaagttcaagggcagagccacactgaccgccgatacctctagcagcacagcctacatgcagctgagcagcctgaccagcgaagatagcgccgtgtacttctgtgcccggtccatcacaacagtcgtgggctgcgctatggactattggggccagggaacaagcgtgaccgtgtctagtgcctctacaaagggaccctccgtgtttcctctggctcccagcagcaagtctacaagcggaggaacagccgctctgggctgcctggtcaaggattactttcccgagcctgtgaccgtgtcctggaatagcggagcactgacaagcggcgtgcacacctttccagccgtgctgcaaagcagcggcctgtactctctgagcagcgtggtcacagtgcctagctctagcctgggcacccagacctacatctgcaatgtgaaccacaagcctagcaacaccaaggtggacaagagagtggaacccaagagctgtggtacccagagttttgggttgttggaccctaaattgtgctatctgttggacggaatcctgttcatttacggagtgatcctgaccgcattgttcctgcgggttaagttttccagatccgcagacgcacccgcttaccaacaagggcagaaccaactctacaatgaacttaatttggggcggagggaagagtacgacgttctggacaaaaggaggggacgagatcccgagatgggcggaaagcctcagcgaaggaagaatccgcaagaggggctttataacgaactccagaaagataaaatggcagaagcctatagtgagattgggatgaagggagaaaggaggaggggtaaaggtcacgatgggttgtaccaaggattgagcacagccactaaagatacctatgatgcgctccacatgcaggccctgccgccaagacgcgccaagagaagcggatctggcgtgaagcagaccctgaatttcgacctgctgaagctggctggcgacgtggaatccaacccaggcccttctagaggccatatgaccgagtacaagcccacggtgcgcctcgccacccgcgacgacgtccccagggccgtacgcaccctcgccgccgcgttcgccgactaccccgccacgcgccacaccgtcgatccggaccgccacatcgagcgggtcaccgagctgcaagaactcttcctcacgcgcgtcgggctcgacatcggcaaggtgtgggtcgcggacgacggcgccgcggtggcggtctggaccacgccggagagcgtcgaagcgggggcggtgttcgccgagatcggcccgcgcatggccgagttgagcggttcccggctggccgcgcagcaacagatggaaggcctcctggcgccgcaccggcccaaggagcccgcgtggttcctggccaccgtcggcgtctcgcccgaccaccagggcaagggtctgggcagcgccgtcgtgctccccggagtggaggcggccgagcgcgccggggtgcccgccttcctggagacctccgcgccccgcaacctccccttctacgagcggctcggcttcaccgtcaccgccgacgtcgaggtgcccgaaggaccgcgcacctggtgcatgacccgcaagcccggtgcctga

SEQ ID NO: 5584 - DNA, 3276 bp, Artificial Sequence
  Synthetic Polynucloetide
atggccttaccagtgaccgccttgctcctgccgctggccttgctgctccacgccgccaggccggaggttcagctgcttgagtctggcggaggactggttcaacctggcggaagcctgagactgtcttgtgccgccagcggcttcacctttagcagctacgccatgagctgggtccgacaggctcctggcaaaggactggaatgggtgtccagcatcagcggcagcggcgactacatctactacgccgatagcgtgaagggcagattcaccatcagccgggacatcagcaagaacaccctgtacctccagatgaacagcctgagagccgaggacaccgccgtgtactactgtgccaaagaaggcaccggcgctaacagcagcctggccgattatagaggccagggcacactggtcaccgtgtctagtggcggaggaagcggcggaggatctgaagtgcaactggtggaatctggagggggaagcgtgcaggcaggcggatctctgagactgtcctgcaccacatctggcagagccctgaatatgtacgtgatgggatggtttcggcaggctcccggcaacgagcgggaatttgtggccgctacaagcagcagcggcggcagcacaagctaccccgattctgtgaagggcagattcacaatctcccgcgataatgccaagaatactgtgtacctgcagatgaatagtctgaagcctgaagatacagccgcctacagatgtgccgccagcccctacgtgtccacccccaccatgaacatcctggaagagtacagatactggggcctgggaacacaagtgacagtgtccagcggtaccggcggaggcggatctggcggcggaggtagcggtggcggaggatctgaattcgacatccagatgacacagagccctagcagcctgtctgccagcgtgggagacagagtgaccatcacatgcaaggccagcgaccacatcaacaactggctggcctggtatcagcagaagcctggacaggcccctaagctgctgatctacggcgctaccacactggaaacaggcgtgcccagcagattttctggcagcggctctggcaccgactacaccctgacaatatccagcctccagcctgaggacttcgccacctactactgtcagcagagctggaacaccccttggacattcggccagggcaccaagctggaaatcaagagactcgaggacctgaagaacgtgttcccacctgaggtggccgtgttcgagcctagcgaggccgagatcagccacacccagaaagccaccctcgtgtgcctggctaccggcttctaccccgaccatgtggaactgtcttggtgggtcaacggcaaagaggtgcacagcggcgtgtctaccgacccccagccactgaaagaacagcccgccctgaacgacagccggtactgcctgagcagcagactgagagtgtccgccaccttctggcagaacccccggaaccacttcagatgccaggtgcagttctacggcctgagcgagaacgacgagtggacccaggacagagccaagcccgtgacccagatcgtgtctgccgaagcctggggcagagccgattgcggatcccagagcttcggcctgctggaccccaagctgtgctacctgctggatggcatcctgttcatctacggcgtgatcctgaccgccctgttcctgagagtgaagttcagcagaagcgccgacgcccctgcctaccagcagggacagaaccaactgtacaacgagctgaacctgggcagacgggaagagtacgacgtgctggacaagcggagaggcagggaccctgagatgggcggaaagccccagcggagaaagaacccccaggaaggactgtataacgaactccagaaagacaagatggccgaagcctacagcgagatcggcatgaagggcgagcggagaagaggcaagggccacgatggcctgtaccagggcctgagcaccgccaccaaggacacctatgacgccctgcacatgcaggccctgcctccaagaagggccaagcgatctggatctggagcaacaaacttctcactactcaaacaagcaggtgacgtggaggagaatcccgggcctactagtatggactggatttggcgcatccttttccttgtcggcgctgctaccggcgcgcattccttcgaacaagttcagcttcaacagcctggcgctgagctggtcaaacctggcgcttctgtgaagatgagctgcaaagccagcggctacgccttcagcagctactggatcaactggatgaagcagaaacccggccagggactcgaatggatcggccaaatctatcccggcgacggcgacaccaactacaacggcaagttcaagggcagagccacactgaccgccgatacctctagcagcacagcctacatgcagctgagcagcctgaccagcgaagatagcgccgtgtacttctgtgcccggtccatcacaacagtcgtgggctgcgctatggactattggggccagggaacaagcgtgaccgtgtctagtacgcgtatccagaaccctgatcctgccgtgtaccagctgcgggatagcaagagcagcgacaagagcgtgtgtctgttcaccgacttcgacagccagaccaacgtgtcccagagcaaggactccgacgtgtacatcaccgataagaccgtgctggacatgcggagcatggacttcaagagcaactccgccgtggcctggtccaacaagtccgatttcgcctgcgccaacgccttcaacaacagcattatccccgaggacacattcttcccaagccccgagagcagctgcggtacccagagttttgggttgttggaccctaaattgtgctatctgttggacggaatcctgttcatttacggagtgatcctgaccgcattgttcctgcgggttaagttttccagatccgcagacgcacccgcttaccaacaagggcagaaccaactctacaatgaacttaatttggggcggagggaagagtacgacgttctggacaaaaggaggggacgagatcccgagatgggcggaaagcctcagcgaaggaagaatccgcaagaggggctttataacgaactccagaaagataaaatggcagaagcctatagtgagattgggatgaagggagaaaggaggaggggtaaaggtcacgatgggttgtaccaaggattgagcacagccactaaagatacctatgatgcgctccacatgcaggccctgccgccaaga

SEQ ID NO: 5585 - DNA, 3276 bp, Artificial Sequence
  Synthetic Polynucloetide
atggccttaccagtgaccgccttgctcctgccgctggccttgctgctccacgccgccaggccggaggttcagctgcttgagtctggcggaggactggttcaacctggcggaagcctgagactgtcttgtgccgccagcggcttcacctttagcagctacgccatgagctgggtccgacaggctcctggcaaaggactggaatgggtgtccagcatcagcggcagcggcgactacatctactacgccgatagcgtgaagggcagattcaccatcagccgggacatcagcaagaacaccctgtacctccagatgaacagcctgagagccgaggacaccgccgtgtactactgtgccaaagaaggcaccggcgctaacagcagcctggccgattatagaggccagggcacactggtcaccgtgtctagtggcggaggaagcggcggaggatctgaagtgcaactggtggaatctggagggggaagcgtgcaggcaggcggatctctgagactgtcctgcaccacatctggcagagccctgaatatgtacgtgatgggatggtttcggcaggctcccggcaacgagcgggaatttgtggccgctacaagcagcagcggcggcagcacaagctaccccgattctgtgaagggcagattcacaatctcccgcgataatgccaagaatactgtgtacctgcagatgaatagtctgaagcctgaagatacagccgcctacagatgtgccgccagcccctacgtgtccacccccaccatgaacatcctggaagagtacagatactggggcctgggaacacaagtgacagtgtccagcggtaccggcggaggcggatctggcggcggaggtagcggtggcggaggatctgaattcgacatccagatgacacagagccctagcagcctgtctgccagcgtgggagacagagtgaccatcacatgcaaggccagcgaccacatcaacaactggctggcctggtatcagcagaagcctggacaggcccctaagctgctgatctacggcgctaccacactggaaacaggcgtgcccagcagattttctggcagcggctctggcaccgactacaccctgacaatatccagcctccagcctgaggacttcgccacctactactgtcagcagagctggaacaccccttggacattcggccagggcaccaagctggaaatcaagagactcgaggacctgaagaacgtgttcccacctgaggtggccgtgttcgagcctagcaaggccgagatcgcccacacccagaaagccaccctcgtgtgcctggctaccggcttctaccccgaccatgtggaactgtcttggtgggtcaacggcaaagaggtgcacagcggcgtgtgtaccgacccccagccactgaaagaacagcccgccctgaacgacagccggtactgcctgagcagcagactgagagtgtccgccaccttctggcagaacccccggaaccacttcagatgccaggtgcagttctacggcctgagcgagaacgacgagtggacccaggacagagccaagcccgtgacccagatcgtgtctgccgaagcctggggcagagccgattgcggatcccagagcttcggcctgctggaccccaagctgtgctacctgctggatggcatcctgttcatctacggcgtgatcctgaccgccctgttcctgagagtgaagttcagcagaagcgccgacgcccctgcctaccagcagggacagaaccaactgtacaacgagctgaacctgggcagacgggaagagtacgacgtgctggacaagcggagaggcagggaccctgagatgggcggaaagccccagcggagaaagaacccccaggaaggactgtataacgaactccagaaagacaagatggccgaagcctacagcgagatcggcatgaagggcgagcggagaagaggcaagggccacgatggcctgtaccagggcctgagcaccgccaccaaggacacctatgacgccctgcacatgcaggccctgcctccaagaagggccaagcgatctggatctggagcaacaaacttctcactactcaaacaagcaggtgacgtggaggagaatcccgggcctactagtatggactggatttggcgcatccttttccttgtcggcgctgctaccggcgcgcattccttcgaacaagttcagcttcaacagcctggcgctgagctggtcaaacctggcgcttctgtgaagatgagctgcaaagccagcggctacgccttcagcagctactggatcaactggatgaagcagaaacccggccagggactcgaatggatcggccaaatctatcccggcgacggcgacaccaactacaacggcaagttcaagggcagagccacactgaccgccgatacctctagcagcacagcctacatgcagctgagcagcctgaccagcgaagatagcgccgtgtacttctgtgcccggtccatcacaacagtcgtgggctgcgctatggactattggggccagggaacaagcgtgaccgtgtctagtacgcgtatccagaaccctgatcctgccgtgtaccagctgcgggatagcaagagcagcgacaagagcgtgtgtctgttcaccgacttcgacagccagaccaacgtgtcccagagcaaggactccgacgtgtacatcaccgataagtgcgtgctggacatgcggagcatggacttcaagagcaactccgccgtggcctggtccaacaagtccgatttcgcctgcgccaacgccttcaacaacagcattatccccgaggacacattcttcccaagcagcgacgtgccctgcggtacccagagttttgggttgttggaccctaaattgtgctatctgttggacggaatcctgttcatttacggagtgatcctgaccgcattgttcctgcgggttaagttttccagatccgcagacgcacccgcttaccaacaagggcagaaccaactctacaatgaacttaatttggggcggagggaagagtacgacgttctggacaaaaggaggggacgagatcccgagatgggcggaaagcctcagcgaaggaagaatccgcaagaggggctttataacgaactccagaaagataaaatggcagaagcctatagtgagattgggatgaagggagaaaggaggaggggtaaaggtcacgatgggttgtaccaaggattgagcacagccactaaagatacctatgatgcgctccacatgcaggccctgccgccaaga

SEQ ID NO: 5586 - DNA, 3489 bp, Artificial Sequence
  Synthetic Polynucloetide
atggccttaccagtgaccgccttgctcctgccgctggccttgctgctccacgccgccaggccggaggttcagctgcttgagtctggcggaggactggttcaacctggcggaagcctgagactgtcttgtgccgccagcggcttcacctttagcagctacgccatgagctgggtccgacaggctcctggcaaaggactggaatgggtgtccagcatcagcggcagcggcgactacatctactacgccgatagcgtgaagggcagattcaccatcagccgggacatcagcaagaacaccctgtacctccagatgaacagcctgagagccgaggacaccgccgtgtactactgtgccaaagaaggcaccggcgctaacagcagcctggccgattatagaggccagggcacactggtcaccgtgtctagtggcggaggaagcggcggaggatctgaagtgcaactggtggaatctggagggggaagcgtgcaggcaggcggatctctgagactgtcctgcaccacatctggcagagccctgaatatgtacgtgatgggatggtttcggcaggctcccggcaacgagcgggaatttgtggccgctacaagcagcagcggcggcagcacaagctaccccgattctgtgaagggcagattcacaatctcccgcgataatgccaagaatactgtgtacctgcagatgaatagtctgaagcctgaagatacagccgcctacagatgtgccgccagcccctacgtgtccacccccaccatgaacatcctggaagagtacagatactggggcctgggaacacaagtgacagtgtccagcggtaccggcggaggcggatctggcggcggaggtagcggtggcggaggatctgaattcgacatccagatgacacagagccctagcagcctgtctgccagcgtgggagacagagtgaccatcacatgcaaggccagcgaccacatcaacaactggctggcctggtatcagcagaagcctggacaggcccctaagctgctgatctacggcgctaccacactggaaacaggcgtgcccagcagattttctggcagcggctctggcaccgactacaccctgacaatatccagcctccagcctgaggacttcgccacctactactgtcagcagagctggaacaccccttggacattcggccagggcaccaagctggaaatcaagagactcgaggggaaaccaattcccaaccctcttctgggactggattcaaccggcagcggcgaggacctgaagaacgtgttcccacctgaggtggccgtgttcgagcctagcgaggccgagatcagccacacccagaaagccaccctcgtgtgcctggctaccggcttctaccccgaccatgtggaactgtcttggtgggtcaacggcaaagaggtgcacagcggcgtgtctaccgacccccagccactgaaagaacagcccgccctgaacgacagccggtactgcctgagcagcagactgagagtgtccgccaccttctggcagaacccccggaaccacttcagatgccaggtgcagttctacggcctgagcgagaacgacgagtggacccaggacagagccaagcccgtgacccagatcgtgtctgccgaagcctggggcagagccgattgcggatcccagagcttcggcctgctggaccccaagctgtgctacctgctggatggcatcctgttcatctacggcgtgatcctgaccgccctgttcctgagagtgaagttcagcagaagcgccgacgcccctgcctaccagcagggacagaaccaactgtacaacgagctgaacctgggcagacgggaagagtacgacgtgctggacaagcggagaggcagggaccctgagatgggcggaaagccccagcggagaaagaacccccaggaaggactgtataacgaactccagaaagacaagatggccgaagcctacagcgagatcggcatgaagggcgagcggagaagaggcaagggccacgatggcctgtaccagggcctgagcaccgccaccaaggacacctatgacgccctgcacatgcaggccctgcctccaagaagggccaagcgatctggatctggagcaacaaacttctcactactcaaacaagcaggtgacgtggaggagaatcccgggcctactagtatggactggatttggcgcatccttttccttgtcggcgctgctaccggcgcgcattccttcgaacaagttcagcttcaacagcctggcgctgagctggtcaaacctggcgcttctgtgaagatgagctgcaaagccagcggctacgccttcagcagctactggatcaactggatgaagcagaaacccggccagggactcgaatggatcggccaaatctatcccggcgacggcgacaccaactacaacggcaagttcaagggcagagccacactgaccgccgatacctctagcagcacagcctacatgcagctgagcagcctgaccagcgaagatagcgccgtgtacttctgtgcccggtccatcacaacagtcgtgggctgcgctatggactattggggccagggaacaagcgtgaccgtgtctagtacgcgtgagcagaaactgatctcggaagaggatgggagcggcatccagaaccctgatcctgccgtgtaccagctgcgggatagcaagagcagcgacaagagcgtgtgtctgttcaccgacttcgacagccagaccaacgtgtcccagagcaaggactccgacgtgtacatcaccgataagaccgtgctggacatgcggagcatggacttcaagagcaactccgccgtggcctggtccaacaagtccgatttcgcctgcgccaacgccttcaacaacagcattatccccgaggacacattcttcccaagccccgagagcagctgcggtacccagagttttgggttgttggaccctaaattgtgctatctgttggacggaatcctgttcatttacggagtgatcctgaccgcattgttcctgaggagcaagcggtcacggctgctccacagcgattacatgaatatgacaccacgaagaccgggtcctactcgcaaacactaccaaccctacgcacctccccgcgactttgcagcgtaccgatctcgggttaagttttccagatccgcagacgcacccgcttaccaacaagggcagaaccaactctacaatgaacttaatttggggcggagggaagagtacgacgttctggacaaaaggaggggacgagatcccgagatgggcggaaagcctcagcgaaggaagaatccgcaagaggggctttataacgaactccagaaagataaaatggcagaagcctatagtgagattgggatgaagggagaaaggaggaggggtaaaggtcacgatgggttgtaccaaggattgagcacagccactaaagatacctatgatgcgctccacatgcaggccctgccgccaaga

SEQ ID NO: 5587 - DNA, 3612 bp, Artificial Sequence
  Synthetic Polynucloetide
atggccttaccagtgaccgccttgctcctgccgctggccttgctgctccacgccgccaggccggaggttcagctgcttgagtctggcggaggactggttcaacctggcggaagcctgagactgtcttgtgccgccagcggcttcacctttagcagctacgccatgagctgggtccgacaggctcctggcaaaggactggaatgggtgtccagcatcagcggcagcggcgactacatctactacgccgatagcgtgaagggcagattcaccatcagccgggacatcagcaagaacaccctgtacctccagatgaacagcctgagagccgaggacaccgccgtgtactactgtgccaaagaaggcaccggcgctaacagcagcctggccgattatagaggccagggcacactggtcaccgtgtctagtggcggaggaagcggcggaggatctgaagtgcaactggtggaatctggagggggaagcgtgcaggcaggcggatctctgagactgtcctgcaccacatctggcagagccctgaatatgtacgtgatgggatggtttcggcaggctcccggcaacgagcgggaatttgtggccgctacaagcagcagcggcggcagcacaagctaccccgattctgtgaagggcagattcacaatctcccgcgataatgccaagaatactgtgtacctgcagatgaatagtctgaagcctgaagatacagccgcctacagatgtgccgccagcccctacgtgtccacccccaccatgaacatcctggaagagtacagatactggggcctgggaacacaagtgacagtgtccagcggtaccggcggaggcggatctggcggcggaggtagcggtggcggaggatctgaattcgacatccagatgacacagagccctagcagcctgtctgccagcgtgggagacagagtgaccatcacatgcaaggccagcgaccacatcaacaactggctggcctggtatcagcagaagcctggacaggcccctaagctgctgatctacggcgctaccacactggaaacaggcgtgcccagcagattttctggcagcggctctggcaccgactacaccctgacaatatccagcctccagcctgaggacttcgccacctactactgtcagcagagctggaacaccccttggacattcggccagggcaccaagctggaaatcaagagactcgaggggaaaccaattcccaaccctcttctgggactggattcaaccggcagcggcgaggacctgaagaacgtgttcccacctgaggtggccgtgttcgagcctagcgaggccgagatcagccacacccagaaagccaccctcgtgtgcctggctaccggcttctaccccgaccatgtggaactgtcttggtgggtcaacggcaaagaggtgcacagcggcgtgtctaccgacccccagccactgaaagaacagcccgccctgaacgacagccggtactgcctgagcagcagactgagagtgtccgccaccttctggcagaacccccggaaccacttcagatgccaggtgcagttctacggcctgagcgagaacgacgagtggacccaggacagagccaagcccgtgacccagatcgtgtctgccgaagcctggggcagagccgattgcggatcccagagcttcggcctgctggaccccaagctgtgctacctgctggatggcatcctgttcatctacggcgtgatcctgaccgccctgttcctgaggagtaagaggagcaggctcctgcacagtgactacatgaacatgactccacgccgccccggacccacccgcaagcattaccagccctatgccccaccacgcgacttcgcagcctatcgctccagagtgaagttcagcagaagcgccgacgcccctgcctaccagcagggacagaaccaactgtacaacgagctgaacctgggcagacgggaagagtacgacgtgctggacaagcggagaggcagggaccctgagatgggcggaaagccccagcggagaaagaacccccaggaaggactgtataacgaactccagaaagacaagatggccgaagcctacagcgagatcggcatgaagggcgagcggagaagaggcaagggccacgatggcctgtaccagggcctgagcaccgccaccaaggacacctatgacgccctgcacatgcaggccctgcctccaagaagggccaagcgatctggatctggagcaacaaacttctcactactcaaacaagcaggtgacgtggaggagaatcccgggcctactagtatggactggatttggcgcatccttttccttgtcggcgctgctaccggcgcgcattccttcgaacaagttcagcttcaacagcctggcgctgagctggtcaaacctggcgcttctgtgaagatgagctgcaaagccagcggctacgccttcagcagctactggatcaactggatgaagcagaaacccggccagggactcgaatggatcggccaaatctatcccggcgacggcgacaccaactacaacggcaagttcaagggcagagccacactgaccgccgatacctctagcagcacagcctacatgcagctgagcagcctgaccagcgaagatagcgccgtgtacttctgtgcccggtccatcacaacagtcgtgggctgcgctatggactattggggccagggaacaagcgtgaccgtgtctagtacgcgtgagcagaaactgatctcggaagaggatgggagcggcatccagaaccctgatcctgccgtgtaccagctgcgggatagcaagagcagcgacaagagcgtgtgtctgttcaccgacttcgacagccagaccaacgtgtcccagagcaaggactccgacgtgtacatcaccgataagaccgtgctggacatgcggagcatggacttcaagagcaactccgccgtggcctggtccaacaagtccgatttcgcctgcgccaacgccttcaacaacagcattatccccgaggacacattcttcccaagccccgagagcagctgcggtacccagagttttgggttgttggaccctaaattgtgctatctgttggacggaatcctgttcatttacggagtgatcctgaccgcattgttcctgaggagcaagcggtcacggctgctccacagcgattacatgaatatgacaccacgaagaccgggtcctactcgcaaacactaccaaccctacgcacctccccgcgactttgcagcgtaccgatctcgggttaagttttccagatccgcagacgcacccgcttaccaacaagggcagaaccaactctacaatgaacttaatttggggcggagggaagagtacgacgttctggacaaaaggaggggacgagatcccgagatgggcggaaagcctcagcgaaggaagaatccgcaagaggggctttataacgaactccagaaagataaaatggcagaagcctatagtgagattgggatgaagggagaaaggaggaggggtaaaggtcacgatgggttgtaccaaggattgagcacagccactaaagatacctatgatgcgctccacatgcaggccctgccgccaaga

SEQ ID NO: 5588 - DNA, 3495 bp, Artificial Sequence
  Synthetic Polynucloetide
atggccttaccagtgaccgccttgctcctgccgctggccttgctgctccacgccgccaggccggaggttcagctgcttgagtctggcggaggactggttcaacctggcggaagcctgagactgtcttgtgccgccagcggcttcacctttagcagctacgccatgagctgggtccgacaggctcctggcaaaggactggaatgggtgtccagcatcagcggcagcggcgactacatctactacgccgatagcgtgaagggcagattcaccatcagccgggacatcagcaagaacaccctgtacctccagatgaacagcctgagagccgaggacaccgccgtgtactactgtgccaaagaaggcaccggcgctaacagcagcctggccgattatagaggccagggcacactggtcaccgtgtctagtggcggaggaagcggcggaggatctgaagtgcaactggtggaatctggagggggaagcgtgcaggcaggcggatctctgagactgtcctgcaccacatctggcagagccctgaatatgtacgtgatgggatggtttcggcaggctcccggcaacgagcgggaatttgtggccgctacaagcagcagcggcggcagcacaagctaccccgattctgtgaagggcagattcacaatctcccgcgataatgccaagaatactgtgtacctgcagatgaatagtctgaagcctgaagatacagccgcctacagatgtgccgccagcccctacgtgtccacccccaccatgaacatcctggaagagtacagatactggggcctgggaacacaagtgacagtgtccagcggtaccggcggaggcggatctggcggcggaggtagcggtggcggaggatctgaattcgacatccagatgacacagagccctagcagcctgtctgccagcgtgggagacagagtgaccatcacatgcaaggccagcgaccacatcaacaactggctggcctggtatcagcagaagcctggacaggcccctaagctgctgatctacggcgctaccacactggaaacaggcgtgcccagcagattttctggcagcggctctggcaccgactacaccctgacaatatccagcctccagcctgaggacttcgccacctactactgtcagcagagctggaacaccccttggacattcggccagggcaccaagctggaaatcaagagactcgaggggaaaccaattcccaaccctcttctgggactggattcaaccggcagcggcgaggacctgaagaacgtgttcccacctgaggtggccgtgttcgagcctagcgaggccgagatcagccacacccagaaagccaccctcgtgtgcctggctaccggcttctaccccgaccatgtggaactgtcttggtgggtcaacggcaaagaggtgcacagcggcgtgtctaccgacccccagccactgaaagaacagcccgccctgaacgacagccggtactgcctgagcagcagactgagagtgtccgccaccttctggcagaacccccggaaccacttcagatgccaggtgcagttctacggcctgagcgagaacgacgagtggacccaggacagagccaagcccgtgacccagatcgtgtctgccgaagcctggggcagagccgattgcggatcccagagcttcggcctgctggaccccaagctgtgctacctgctggatggcatcctgttcatctacggcgtgatcctgaccgccctgttcctgagagtgaagttcagcagaagcgccgacgcccctgcctaccagcagggacagaaccaactgtacaacgagctgaacctgggcagacgggaagagtacgacgtgctggacaagcggagaggcagggaccctgagatgggcggaaagccccagcggagaaagaacccccaggaaggactgtataacgaactccagaaagacaagatggccgaagcctacagcgagatcggcatgaagggcgagcggagaagaggcaagggccacgatggcctgtaccagggcctgagcaccgccaccaaggacacctatgacgccctgcacatgcaggccctgcctccaagaagggccaagcgatctggatctggagcaacaaacttctcactactcaaacaagcaggtgacgtggaggagaatcccgggcctactagtatggactggatttggcgcatccttttccttgtcggcgctgctaccggcgcgcattccttcgaacaagttcagcttcaacagcctggcgctgagctggtcaaacctggcgcttctgtgaagatgagctgcaaagccagcggctacgccttcagcagctactggatcaactggatgaagcagaaacccggccagggactcgaatggatcggccaaatctatcccggcgacggcgacaccaactacaacggcaagttcaagggcagagccacactgaccgccgatacctctagcagcacagcctacatgcagctgagcagcctgaccagcgaagatagcgccgtgtacttctgtgcccggtccatcacaacagtcgtgggctgcgctatggactattggggccagggaacaagcgtgaccgtgtctagtacgcgtgagcagaaactgatctcggaagaggatctggggagcggcatccagaaccctgatcctgccgtgtaccagctgcgggatagcaagagcagcgacaagagcgtgtgtctgttcaccgacttcgacagccagaccaacgtgtcccagagcaaggactccgacgtgtacatcaccgataagaccgtgctggacatgcggagcatggacttcaagagcaactccgccgtggcctggtccaacaagtccgatttcgcctgcgccaacgccttcaacaacagcattatccccgaggacacattcttcccaagccccgagagcagctgcggtacccagagttttgggttgttggaccctaaattgtgctatctgttggacggaatcctgttcatttacggagtgatcctgaccgcattgttcctgaagagaggccggaagaagctgctgtacatcttcaagcagcctttcatgcggcccgtgcagaccacccaggaagaggacggctgctcctgccggttccccgaggaagaagaaggcggctgcgagctgcgggttaagttttccagatccgcagacgcacccgcttaccaacaagggcagaaccaactctacaatgaacttaatttggggcggagggaagagtacgacgttctggacaaaaggaggggacgagatcccgagatgggcggaaagcctcagcgaaggaagaatccgcaagaggggctttataacgaactccagaaagataaaatggcagaagcctatagtgagattgggatgaagggagaaaggaggaggggtaaaggtcacgatgggttgtaccaaggattgagcacagccactaaagatacctatgatgcgctccacatgcaggccctgccgccaaga

SEQ ID NO: 5589 - DNA, 3621 bp, Artificial Sequence
  Synthetic Polynucloetide
atggccttaccagtgaccgccttgctcctgccgctggccttgctgctccacgccgccaggccggaggttcagctgcttgagtctggcggaggactggttcaacctggcggaagcctgagactgtcttgtgccgccagcggcttcacctttagcagctacgccatgagctgggtccgacaggctcctggcaaaggactggaatgggtgtccagcatcagcggcagcggcgactacatctactacgccgatagcgtgaagggcagattcaccatcagccgggacatcagcaagaacaccctgtacctccagatgaacagcctgagagccgaggacaccgccgtgtactactgtgccaaagaaggcaccggcgctaacagcagcctggccgattatagaggccagggcacactggtcaccgtgtctagtggcggaggaagcggcggaggatctgaagtgcaactggtggaatctggagggggaagcgtgcaggcaggcggatctctgagactgtcctgcaccacatctggcagagccctgaatatgtacgtgatgggatggtttcggcaggctcccggcaacgagcgggaatttgtggccgctacaagcagcagcggcggcagcacaagctaccccgattctgtgaagggcagattcacaatctcccgcgataatgccaagaatactgtgtacctgcagatgaatagtctgaagcctgaagatacagccgcctacagatgtgccgccagcccctacgtgtccacccccaccatgaacatcctggaagagtacagatactggggcctgggaacacaagtgacagtgtccagcggtaccggcggaggcggatctggcggcggaggtagcggtggcggaggatctgaattcgacatccagatgacacagagccctagcagcctgtctgccagcgtgggagacagagtgaccatcacatgcaaggccagcgaccacatcaacaactggctggcctggtatcagcagaagcctggacaggcccctaagctgctgatctacggcgctaccacactggaaacaggcgtgcccagcagattttctggcagcggctctggcaccgactacaccctgacaatatccagcctccagcctgaggacttcgccacctactactgtcagcagagctggaacaccccttggacattcggccagggcaccaagctggaaatcaagagactcgaggggaaaccaattcccaaccctcttctgggactggattcaaccggcagcggcgaggacctgaagaacgtgttcccacctgaggtggccgtgttcgagcctagcgaggccgagatcagccacacccagaaagccaccctcgtgtgcctggctaccggcttctaccccgaccatgtggaactgtcttggtgggtcaacggcaaagaggtgcacagcggcgtgtctaccgacccccagccactgaaagaacagcccgccctgaacgacagccggtactgcctgagcagcagactgagagtgtccgccaccttctggcagaacccccggaaccacttcagatgccaggtgcagttctacggcctgagcgagaacgacgagtggacccaggacagagccaagcccgtgacccagatcgtgtctgccgaagcctggggcagagccgattgcggatcccagagcttcggcctgctggaccccaagctgtgctacctgctggatggcatcctgttcatctacggcgtgatcctgaccgccctgttcctgaaacggggcagaaagaaactcctgtatatattcaaacaaccatttatgagaccagtacaaactactcaagaggaagatggctgtagctgccgatttccagaagaagaagaaggaggatgtgaactgagagtgaagttcagcagaagcgccgacgcccctgcctaccagcagggacagaaccaactgtacaacgagctgaacctgggcagacgggaagagtacgacgtgctggacaagcggagaggcagggaccctgagatgggcggaaagccccagcggagaaagaacccccaggaaggactgtataacgaactccagaaagacaagatggccgaagcctacagcgagatcggcatgaagggcgagcggagaagaggcaagggccacgatggcctgtaccagggcctgagcaccgccaccaaggacacctatgacgccctgcacatgcaggccctgcctccaagaagggccaagcgatctggatctggagcaacaaacttctcactactcaaacaagcaggtgacgtggaggagaatcccgggcctactagtatggactggatttggcgcatccttttccttgtcggcgctgctaccggcgcgcattccttcgaacaagttcagcttcaacagcctggcgctgagctggtcaaacctggcgcttctgtgaagatgagctgcaaagccagcggctacgccttcagcagctactggatcaactggatgaagcagaaacccggccagggactcgaatggatcggccaaatctatcccggcgacggcgacaccaactacaacggcaagttcaagggcagagccacactgaccgccgatacctctagcagcacagcctacatgcagctgagcagcctgaccagcgaagatagcgccgtgtacttctgtgcccggtccatcacaacagtcgtgggctgcgctatggactattggggccagggaacaagcgtgaccgtgtctagtacgcgtgagcagaaactgatctcggaagaggatctggggagcggcatccagaaccctgatcctgccgtgtaccagctgcgggatagcaagagcagcgacaagagcgtgtgtctgttcaccgacttcgacagccagaccaacgtgtcccagagcaaggactccgacgtgtacatcaccgataagaccgtgctggacatgcggagcatggacttcaagagcaactccgccgtggcctggtccaacaagtccgatttcgcctgcgccaacgccttcaacaacagcattatccccgaggacacattcttcccaagccccgagagcagctgcggtacccagagttttgggttgttggaccctaaattgtgctatctgttggacggaatcctgttcatttacggagtgatcctgaccgcattgttcctgaagagaggccggaagaagctgctgtacatcttcaagcagcctttcatgcggcccgtgcagaccacccaggaagaggacggctgctcctgccggttccccgaggaagaagaaggcggctgcgagctgcgggttaagttttccagatccgcagacgcacccgcttaccaacaagggcagaaccaactctacaatgaacttaatttggggcggagggaagagtacgacgttctggacaaaaggaggggacgagatcccgagatgggcggaaagcctcagcgaaggaagaatccgcaagaggggctttataacgaactccagaaagataaaatggcagaagcctatagtgagattgggatgaagggagaaaggaggaggggtaaaggtcacgatgggttgtaccaaggattgagcacagccactaaagatacctatgatgcgctccacatgcaggccctgccgccaaga

SEQ ID NO: 5590 - DNA, 3294 bp, Artificial Sequence
  Synthetic Polynucloetide
atggccttaccagtgaccgccttgctcctgccgctggccttgctgctccacgccgccaggccggaggttcagctgcttgagtctggcggaggactggttcaacctggcggaagcctgagactgtcttgtgccgccagcggcttcacctttagcagctacgccatgagctgggtccgacaggctcctggcaaaggactggaatgggtgtccagcatcagcggcagcggcgactacatctactacgccgatagcgtgaagggcagattcaccatcagccgggacatcagcaagaacaccctgtacctccagatgaacagcctgagagccgaggacaccgccgtgtactactgtgccaaagaaggcaccggcgctaacagcagcctggccgattatagaggccagggcacactggtcaccgtgtctagtggcggaggaagcggcggaggatctgaagtgcaactggtggaatctggagggggaagcgtgcaggcaggcggatctctgagactgtcctgcaccacatctggcagagccctgaatatgtacgtgatgggatggtttcggcaggctcccggcaacgagcgggaatttgtggccgctacaagcagcagcggcggcagcacaagctaccccgattctgtgaagggcagattcacaatctcccgcgataatgccaagaatactgtgtacctgcagatgaatagtctgaagcctgaagatacagccgcctacagatgtgccgccagcccctacgtgtccacccccaccatgaacatcctggaagagtacagatactggggcctgggaacacaagtgacagtgtccagcggtaccggcggaggcggatctggcggcggaggtagcggtggcggaggatctgaattcgacatccagatgacacagagccctagcagcctgtctgccagcgtgggagacagagtgaccatcacatgcaaggccagcgaccacatcaacaactggctggcctggtatcagcagaagcctggacaggcccctaagctgctgatctacggcgctaccacactggaaacaggcgtgcccagcagattttctggcagcggctctggcaccgactacaccctgacaatatccagcctccagcctgaggacttcgccacctactactgtcagcagagctggaacaccccttggacattcggccagggcaccaagctggaaatcaagagactcgagcagagcttcggcctgctggaccccaagctgtgctacctgctggatggcatcctgttcatctacggcgtgatcctgaccgccctgttcctgagagtgaagttcagcagaagcgccgacgcccctgcctaccagcagggacagaaccaactgtacaacgagctgaacctgggcagacgggaagagtacgacgtgctggacaagcggagaggcagggaccctgagatgggcggaaagccccagcggagaaagaacccccaggaaggactgtataacgaactccagaaagacaagatggccgaagcctacagcgagatcggcatgaagggcgagcggagaagaggcaagggccacgatggcctgtaccagggcctgagcaccgccaccaaggacacctatgacgccctgcacatgcaggccctgcctccaagaagggccaagcgatctggatctggagcaacaaacttctcactactcaaacaagcaggtgacgtggaggagaatcccgggcctactagtatggactggatttggcgcatccttttccttgtcggcgctgctaccggcgcgcattccttcgaacaagttcagcttcaacagcctggcgctgagctggtcaaacctggcgcttctgtgaagatgagctgcaaagccagcggctacgccttcagcagctactggatcaactggatgaagcagaaacccggccagggactcgaatggatcggccaaatctatcccggcgacggcgacaccaactacaacggcaagttcaagggcagagccacactgaccgccgatacctctagcagcacagcctacatgcagctgagcagcctgaccagcgaagatagcgccgtgtacttctgtgcccggtccatcacaacagtcgtgggctgcgctatggactattggggccagggaacaagcgtgaccgtgtctagtacgcgtcagagttttgggttgttggaccctaaattgtgctatctgttggacggaatcctgttcatttacggagtgatcctgaccgcattgttcctgcgggttaagttttccagatccgcagacgcacccgcttaccaacaagggcagaaccaactctacaatgaacttaatttggggcggagggaagagtacgacgttctggacaaaaggaggggacgagatcccgagatgggcggaaagcctcagcgaaggaagaatccgcaagaggggctttataacgaactccagaaagataaaatggcagaagcctatagtgagattgggatgaagggagaaaggaggaggggtaaaggtcacgatgggttgtaccaaggattgagcacagccactaaagatacctatgatgcgctccacatgcaggccctgccgccaagacgcgccaagagaagcggatctggcgtgaagcagaccctgaatttcgacctgctgaagctggctggcgacgtggaatccaacccaggcccttctagaggccatatgaccgagtacaagcccacggtgcgcctcgccacccgcgacgacgtccccagggccgtacgcaccctcgccgccgcgttcgccgactaccccgccacgcgccacaccgtcgatccggaccgccacatcgagcgggtcaccgagctgcaagaactcttcctcacgcgcgtcgggctcgacatcggcaaggtgtgggtcgcggacgacggcgccgcggtggcggtctggaccacgccggagagcgtcgaagcgggggcggtgttcgccgagatcggcccgcgcatggccgagttgagcggttcccggctggccgcgcagcaacagatggaaggcctcctggcgccgcaccggcccaaggagcccgcgtggttcctggccaccgtcggcgtctcgcccgaccaccagggcaagggtctgggcagcgccgtcgtgctccccggagtggaggcggccgagcgcgccggggtgcccgccttcctggagacctccgcgccccgcaacctccccttctacgagcggctcggcttcaccgtcaccgccgacgtcgaggtgcccgaaggaccgcgcacctggtgcatgacccgcaagcccggtgcctga

SEQ ID NO: 5591 - DNA, 2766 bp, Artificial Sequence
  Synthetic Polynucloetide
atggccttaccagtgaccgccttgctcctgccgctggccttgctgctccacgccgccaggccggaggttcagctgcttgagtctggcggaggactggttcaacctggcggaagcctgagactgtcttgtgccgccagcggcttcacctttagcagctacgccatgagctgggtccgacaggctcctggcaaaggactggaatgggtgtccagcatcagcggcagcggcgactacatctactacgccgatagcgtgaagggcagattcaccatcagccgggacatcagcaagaacaccctgtacctccagatgaacagcctgagagccgaggacaccgccgtgtactactgtgccaaagaaggcaccggcgctaacagcagcctggccgattatagaggccagggcacactggtcaccgtgtctagtggcggaggaagcggcggaggatctgaagtgcaactggtggaatctggagggggaagcgtgcaggcaggcggatctctgagactgtcctgcaccacatctggcagagccctgaatatgtacgtgatgggatggtttcggcaggctcccggcaacgagcgggaatttgtggccgctacaagcagcagcggcggcagcacaagctaccccgattctgtgaagggcagattcacaatctcccgcgataatgccaagaatactgtgtacctgcagatgaatagtctgaagcctgaagatacagccgcctacagatgtgccgccagcccctacgtgtccacccccaccatgaacatcctggaagagtacagatactggggcctgggaacacaagtgacagtgtccagcggtaccggcggaggcggatctggcggcggaggtagcggtggcggaggatctgaattcgacatccagatgacacagagccctagcagcctgtctgccagcgtgggagacagagtgaccatcacatgcaaggccagcgaccacatcaacaactggctggcctggtatcagcagaagcctggacaggcccctaagctgctgatctacggcgctaccacactggaaacaggcgtgcccagcagattttctggcagcggctctggcaccgactacaccctgacaatatccagcctccagcctgaggacttcgccacctactactgtcagcagagctggaacaccccttggacattcggccagggcaccaagctggaaatcaagagactcgagggacagcctaaggccaatcctaccgtgacactgttccctccaagcagcgaagaactccaggccaacaaggccacacttgtgtgcctgatctccgacttctaccctggggctgtgacagtggcttggaaggccgatggatctcctgtgaaagccggcgtggaaaccaccaagccatccaagcagagcaacaacaaatacgccgccagctcctacctgagcctgacacctgagcagtggaagtcccacagatcctacagctgccaagtgacccacgaaggcagcaccgtggaaaagacagtggcccctacagagtgcagccccatcaagaccgatgtgattacaatggaccccaaggacaactgctccaaggacgccaacgataccctgctgctccagctgaccaacaccagcgcctactacatgtacttgttgctgctgctgaagtccgtggtgtacttcgccatcatcacatgctgcctgctgcggagaaccgccttctgctgcaacggcgagaagtctagggccaagcgatctggatctggagcaacaaacttctcactactcaaacaagcaggtgacgtggaggagaatcccgggcctactagtatggactggatttggcgcatccttttccttgtcggcgctgctaccggcgcgcattccttcgaacaagttcagcttcaacagcctggcgctgagctggtcaaacctggcgcttctgtgaagatgagctgcaaagccagcggctacgccttcagcagctactggatcaactggatgaagcagaaacccggccagggactcgaatggatcggccaaatctatcccggcgacggcgacaccaactacaacggcaagttcaagggcagagccacactgaccgccgatacctctagcagcacagcctacatgcagctgagcagcctgaccagcgaagatagcgccgtgtacttctgtgcccggtccatcacaacagtcgtgggctgcgctatggactattggggccagggaacaagcgtgaccgtgtctagtacgcgtgcctctacaaagggaccctccgtgtttcctctggctcccagcagcaagtctacaagcggaggaacagccgctctgggctgcctggtcaaggattactttcccgagcctgtgaccgtgtcctggaatagcggagcactgacaagcggcgtgcacacctttccagccgtgctgcaaagcagcggcctgtactctctgagcagcgtggtcacagtgcctagctctagcctgggcacccagacctacatctgcaatgtgaaccacaagcctagcaacaccaaggtggacaagagagtggaacccaagagctgtgaagtgaaaaccgactccaccgaccacgtgaagcccaaagagacagagaacaccaagcagcccagcaagagctgccacaagcccaaggccatcgtgcacaccgagaaagtgaacatgatgagcctgaccgtgctgggcctgcggatgctgttcgccaaaaccgtggccgtgaacttcctgctgaccgccaagctgttcttcctc

SEQ ID NO: 5592 - DNA, 2700 bp, Artificial Sequence
  Synthetic Polynucloetide
atggccttaccagtgaccgccttgctcctgccgctggccttgctgctccacgccgccaggccggaggttcagctgcttgagtctggcggaggactggttcaacctggcggaagcctgagactgtcttgtgccgccagcggcttcacctttagcagctacgccatgagctgggtccgacaggctcctggcaaaggactggaatgggtgtccagcatcagcggcagcggcgactacatctactacgccgatagcgtgaagggcagattcaccatcagccgggacatcagcaagaacaccctgtacctccagatgaacagcctgagagccgaggacaccgccgtgtactactgtgccaaagaaggcaccggcgctaacagcagcctggccgattatagaggccagggcacactggtcaccgtgtctagtggcggaggaagcggcggaggatctgaagtgcaactggtggaatctggagggggaagcgtgcaggcaggcggatctctgagactgtcctgcaccacatctggcagagccctgaatatgtacgtgatgggatggtttcggcaggctcccggcaacgagcgggaatttgtggccgctacaagcagcagcggcggcagcacaagctaccccgattctgtgaagggcagattcacaatctcccgcgataatgccaagaatactgtgtacctgcagatgaatagtctgaagcctgaagatacagccgcctacagatgtgccgccagcccctacgtgtccacccccaccatgaacatcctggaagagtacagatactggggcctgggaacacaagtgacagtgtccagcggtaccggcggaggcggatctggcggcggaggtagcggtggcggaggatctgaattcgacatccagatgacacagagccctagcagcctgtctgccagcgtgggagacagagtgaccatcacatgcaaggccagcgaccacatcaacaactggctggcctggtatcagcagaagcctggacaggcccctaagctgctgatctacggcgctaccacactggaaacaggcgtgcccagcagattttctggcagcggctctggcaccgactacaccctgacaatatccagcctccagcctgaggacttcgccacctactactgtcagcagagctggaacaccccttggacattcggccagggcaccaagctggaaatcaagagactcgagggacagcctaaggccaatcctaccgtgacactgttccctccaagcagcgaagaactccaggccaacaaggccacacttgtgtgcctgatctccgacttctaccctggggctgtgacagtggcttggaaggccgatggatctcctgtgaaagccggcgtggaaaccaccaagccatccaagcagagcaacaacaaatacgccgccagctcctacctgagcctgacacctgagcagtggaagtcccacagatcctacagctgccaagtgacccacgaaggcagcaccgtggaaaagacagtggcccctacagagtgcagcggcagagccgattgcggcatcaccagcgccagctaccaccagggcgtgctgagcgccaccatcctgtacgagatcctgctgggcaaggccaccctgtacgccgtgctggtgtctgccctggtgctgatggctatggtcaagcggaaggacagccggggaagggccaagcgatctggatctggagcaacaaacttctcactactcaaacaagcaggtgacgtggaggagaatcccgggcctactagtatggactggatttggcgcatccttttccttgtcggcgctgctaccggcgcgcattccttcgaacaagttcagcttcaacagcctggcgctgagctggtcaaacctggcgcttctgtgaagatgagctgcaaagccagcggctacgccttcagcagctactggatcaactggatgaagcagaaacccggccagggactcgaatggatcggccaaatctatcccggcgacggcgacaccaactacaacggcaagttcaagggcagagccacactgaccgccgatacctctagcagcacagcctacatgcagctgagcagcctgaccagcgaagatagcgccgtgtacttctgtgcccggtccatcacaacagtcgtgggctgcgctatggactattggggccagggaacaagcgtgaccgtgtctagtacgcgtgcctctacaaagggaccctccgtgtttcctctggctcccagcagcaagtctacaagcggaggaacagccgctctgggctgcctggtcaaggattactttcccgagcctgtgaccgtgtcctggaatagcggagcactgacaagcggcgtgcacacctttccagccgtgctgcaaagcagcggcctgtactctctgagcagcgtggtcacagtgcctagctctagcctgggcacccagacctacatctgcaatgtgaaccacaagcctagcaacaccaaggtggacaagagagtggaacccaagagctgtatccccgaggacacattcttcccaagcagcgacgtgccctgcgacgtgaagctggtggaaaagagcttcgagacagacaccaacctgaacttccagaacctgagcgtgatcggcttcagaatcctgctgctgaaagtggccggctttaacctgctgatgaccctgcggctgtggtccagc

SEQ ID NO: 5593 - DNA, 2700 bp, Artificial Sequence
  Synthetic Polynucloetide
atggccttaccagtgaccgccttgctcctgccgctggccttgctgctccacgccgccaggccggaggttcagctgcttgagtctggcggaggactggttcaacctggcggaagcctgagactgtcttgtgccgccagcggcttcacctttagcagctacgccatgagctgggtccgacaggctcctggcaaaggactggaatgggtgtccagcatcagcggcagcggcgactacatctactacgccgatagcgtgaagggcagattcaccatcagccgggacatcagcaagaacaccctgtacctccagatgaacagcctgagagccgaggacaccgccgtgtactactgtgccaaagaaggcaccggcgctaacagcagcctggccgattatagaggccagggcacactggtcaccgtgtctagtggcggaggaagcggcggaggatctgaagtgcaactggtggaatctggagggggaagcgtgcaggcaggcggatctctgagactgtcctgcaccacatctggcagagccctgaatatgtacgtgatgggatggtttcggcaggctcccggcaacgagcgggaatttgtggccgctacaagcagcagcggcggcagcacaagctaccccgattctgtgaagggcagattcacaatctcccgcgataatgccaagaatactgtgtacctgcagatgaatagtctgaagcctgaagatacagccgcctacagatgtgccgccagcccctacgtgtccacccccaccatgaacatcctggaagagtacagatactggggcctgggaacacaagtgacagtgtccagcggtaccggcggaggcggatctggcggcggaggtagcggtggcggaggatctgaattcgacatccagatgacacagagccctagcagcctgtctgccagcgtgggagacagagtgaccatcacatgcaaggccagcgaccacatcaacaactggctggcctggtatcagcagaagcctggacaggcccctaagctgctgatctacggcgctaccacactggaaacaggcgtgcccagcagattttctggcagcggctctggcaccgactacaccctgacaatatccagcctccagcctgaggacttcgccacctactactgtcagcagagctggaacaccccttggacattcggccagggcaccaagctggaaatcaagagactcgagggacagcctaaggccaatcctaccgtgacactgttccctccaagcagcgaagaactccaggccaacaaggccacacttgtgtgcctgatctccgacttctaccctggggctgtgacagtggcttggaaggccgatggatctcctgtgaaagccggcgtggaaaccaccaagccatccaagcagagcaacaacaaatacgccgccagctcctacctgagcctgacacctgagcagtggaagtcccacagatcctacagctgccaagtgacccacgaaggcagcaccgtggaaaagacagtggcccctacagagtgcagcggcagagccgattgcggctttaccagcgagagctaccagcagggcgtgctgagcgccaccatcctgtacgagatcctgctgggcaaggccaccctgtacgccgtgctggtgtctgccctggtgctgatggctatggtcaagcggaaggacagccggggaagggccaagcgatctggatctggagcaacaaacttctcactactcaaacaagcaggtgacgtggaggagaatcccgggcctactagtatggactggatttggcgcatccttttccttgtcggcgctgctaccggcgcgcattccttcgaacaagttcagcttcaacagcctggcgctgagctggtcaaacctggcgcttctgtgaagatgagctgcaaagccagcggctacgccttcagcagctactggatcaactggatgaagcagaaacccggccagggactcgaatggatcggccaaatctatcccggcgacggcgacaccaactacaacggcaagttcaagggcagagccacactgaccgccgatacctctagcagcacagcctacatgcagctgagcagcctgaccagcgaagatagcgccgtgtacttctgtgcccggtccatcacaacagtcgtgggctgcgctatggactattggggccagggaacaagcgtgaccgtgtctagtacgcgtgcctctacaaagggaccctccgtgtttcctctggctcccagcagcaagtctacaagcggaggaacagccgctctgggctgcctggtcaaggattactttcccgagcctgtgaccgtgtcctggaatagcggagcactgacaagcggcgtgcacacctttccagccgtgctgcaaagcagcggcctgtactctctgagcagcgtggtcacagtgcctagctctagcctgggcacccagacctacatctgcaatgtgaaccacaagcctagcaacaccaaggtggacaagagagtggaacccaagagctgtatccccgaggacacattcttcccaagccccgagagcagctgcgacgtgaagctggtggaaaagagcttcgagacagacaccaacctgaacttccagaacctgagcgtgatcggcttcagaatcctgctgctgaaagtggccggctttaacctgctgatgaccctgcggctgtggtccagc

SEQ ID NO: 5594 - DNA, 2178 bp, Artificial Sequence
  Synthetic Polynucloetide
atggccttaccagtgaccgccttgctcctgccgctggccttgctgctccacgccgccaggccggaggttcagctgcttgagtctggcggaggactggttcaacctggcggaagcctgagactgtcttgtgccgccagcggcttcacctttagcagctacgccatgagctgggtccgacaggctcctggcaaaggactggaatgggtgtccagcatcagcggcagcggcgactacatctactacgccgatagcgtgaagggcagattcaccatcagccgggacatcagcaagaacaccctgtacctccagatgaacagcctgagagccgaggacaccgccgtgtactactgtgccaaagaaggcaccggcgctaacagcagcctggccgattatagaggccagggcacactggtcaccgtgtctagtggcggaggaagcggcggaggatctgaagtgcaactggtggaatctggagggggaagcgtgcaggcaggcggatctctgagactgtcctgcaccacatctggcagagccctgaatatgtacgtgatgggatggtttcggcaggctcccggcaacgagcgggaatttgtggccgctacaagcagcagcggcggcagcacaagctaccccgattctgtgaagggcagattcacaatctcccgcgataatgccaagaatactgtgtacctgcagatgaatagtctgaagcctgaagatacagccgcctacagatgtgccgccagcccctacgtgtccacccccaccatgaacatcctggaagagtacagatactggggcctgggaacacaagtgacagtgtccagcggtaccggcggaggcggatctggcggcggaggtagcggtggcggaggatctgaattcgacatccagatgacacagagccctagcagcctgtctgccagcgtgggagacagagtgaccatcacatgcaaggccagcgaccacatcaacaactggctggcctggtatcagcagaagcctggacaggcccctaagctgctgatctacggcgctaccacactggaaacaggcgtgcccagcagattttctggcagcggctctggcaccgactacaccctgacaatatccagcctccagcctgaggacttcgccacctactactgtcagcagagctggaacaccccttggacattcggccagggcaccaagctggaaatcaagagaggcggaggcggaagtggaggcggaggatctggcggcggaggctctcaagttcagcttcaacagcctggcgctgagctggtcaaacctggcgcttctgtgaagatgagctgcaaagccagcggctacgccttcagcagctactggatcaactggatgaagcagaaacccggccagggactcgaatggatcggccaaatctatcccggcgacggcgacaccaactacaacggcaagttcaagggcagagccacactgaccgccgatacctctagcagcacagcctacatgcagctgagcagcctgaccagcgaagatagcgccgtgtacttctgtgcccggtccatcacaacagtcgtgggctgcgctatggactattggggccagggaacaagcgtgaccgtgtctagtacgcgtgacggtaacgaggagatgggaggaatcactcaaaccccttacaaagtctcaatttcaggaacaactgttatccttacatgtccccagtatcctggcagcgagatcctttggcagcataacgacaagaatatagggggagatgaagacgataagaatatcggatctgacgaggatcacttgagcctgaaagagttctccgagcttgaacaaagcggatattatgtgtgctatccgcgcgggtcaaagccggaagacgctaacttttacctttatctccgagccagagtgtgcgaaaattgcatggaaatggacgttatgtccgttgctacaatagttatcgtagatatatgcatcacgggtggactgcttctgctggtttattattggtccaagaatagaaaggccaaagctaaacccgtgaccagaggcgctggcgcaggcggaaggcaaaggggacaaaacaaagaacggccaccaccagtgccaaatccagattatgagcctattcggaaaggacagagggacctgtactctggcctgaatcagagaagaatc

SEQ ID NO: 5595 - DNA, 2073 bp, Artificial Sequence
  Synthetic Polynucloetide
atggccttaccagtgaccgccttgctcctgccgctggccttgctgctccacgccgccaggccggaggttcagctgcttgagtctggcggaggactggttcaacctggcggaagcctgagactgtcttgtgccgccagcggcttcacctttagcagctacgccatgagctgggtccgacaggctcctggcaaaggactggaatgggtgtccagcatcagcggcagcggcgactacatctactacgccgatagcgtgaagggcagattcaccatcagccgggacatcagcaagaacaccctgtacctccagatgaacagcctgagagccgaggacaccgccgtgtactactgtgccaaagaaggcaccggcgctaacagcagcctggccgattatagaggccagggcacactggtcaccgtgtctagtggcggaggaagcggcggaggatctgaagtgcaactggtggaatctggagggggaagcgtgcaggcaggcggatctctgagactgtcctgcaccacatctggcagagccctgaatatgtacgtgatgggatggtttcggcaggctcccggcaacgagcgggaatttgtggccgctacaagcagcagcggcggcagcacaagctaccccgattctgtgaagggcagattcacaatctcccgcgataatgccaagaatactgtgtacctgcagatgaatagtctgaagcctgaagatacagccgcctacagatgtgccgccagcccctacgtgtccacccccaccatgaacatcctggaagagtacagatactggggcctgggaacacaagtgacagtgtccagcggtaccggcggaggcggatctggcggcggaggtagcggtggcggaggatctgaattcgacatccagatgacacagagccctagcagcctgtctgccagcgtgggagacagagtgaccatcacatgcaaggccagcgaccacatcaacaactggctggcctggtatcagcagaagcctggacaggcccctaagctgctgatctacggcgctaccacactggaaacaggcgtgcccagcagattttctggcagcggctctggcaccgactacaccctgacaatatccagcctccagcctgaggacttcgccacctactactgtcagcagagctggaacaccccttggacattcggccagggcaccaagctggaaatcaagagaggcggaggcggaagtggaggcggaggatctggcggcggaggctctcaagttcagcttcaacagcctggcgctgagctggtcaaacctggcgcttctgtgaagatgagctgcaaagccagcggctacgccttcagcagctactggatcaactggatgaagcagaaacccggccagggactcgaatggatcggccaaatctatcccggcgacggcgacaccaactacaacggcaagttcaagggcagagccacactgaccgccgatacctctagcagcacagcctacatgcagctgagcagcctgaccagcgaagatagcgccgtgtacttctgtgcccggtccatcacaacagtcgtgggctgcgctatggactattggggccagggaacaagcgtgaccgtgtctagtacgcgtttcaagatccccatcgaggaactggaagatcgggtgttcgtgaactgcaacacctctatcacctgggtggaaggcaccgtgggaacactgctgagcgacatcaccagactggacctcggcaagcggattctggaccctcggggcatctacagatgcaacggcaccgacatctacaaggacaaagaaagcaccgtgcaggtccactacagaatgtgccagtcctgcgtggaactggaccctgctacagtggccggcatcatcgtgaccgatgtgatcgctactctgctgctggctctgggagtgttctgcttcgccggacacgaaacaggcagactgtctggcgctgccgatacacaggccctgctgagaaacgaccaagtgtatcagcccctgcgcgacagagatgatgcccagtattctcacctcggcggcaactgggctagaaacaag

SEQ ID NO: 5596 - DNA, 2103 bp, Artificial Sequence
  Synthetic Polynucloetide
atggccttaccagtgaccgccttgctcctgccgctggccttgctgctccacgccgccaggccggaggttcagctgcttgagtctggcggaggactggttcaacctggcggaagcctgagactgtcttgtgccgccagcggcttcacctttagcagctacgccatgagctgggtccgacaggctcctggcaaaggactggaatgggtgtccagcatcagcggcagcggcgactacatctactacgccgatagcgtgaagggcagattcaccatcagccgggacatcagcaagaacaccctgtacctccagatgaacagcctgagagccgaggacaccgccgtgtactactgtgccaaagaaggcaccggcgctaacagcagcctggccgattatagaggccagggcacactggtcaccgtgtctagtggcggaggaagcggcggaggatctgaagtgcaactggtggaatctggagggggaagcgtgcaggcaggcggatctctgagactgtcctgcaccacatctggcagagccctgaatatgtacgtgatgggatggtttcggcaggctcccggcaacgagcgggaatttgtggccgctacaagcagcagcggcggcagcacaagctaccccgattctgtgaagggcagattcacaatctcccgcgataatgccaagaatactgtgtacctgcagatgaatagtctgaagcctgaagatacagccgcctacagatgtgccgccagcccctacgtgtccacccccaccatgaacatcctggaagagtacagatactggggcctgggaacacaagtgacagtgtccagcggtaccggcggaggcggatctggcggcggaggtagcggtggcggaggatctgaattcgacatccagatgacacagagccctagcagcctgtctgccagcgtgggagacagagtgaccatcacatgcaaggccagcgaccacatcaacaactggctggcctggtatcagcagaagcctggacaggcccctaagctgctgatctacggcgctaccacactggaaacaggcgtgcccagcagattttctggcagcggctctggcaccgactacaccctgacaatatccagcctccagcctgaggacttcgccacctactactgtcagcagagctggaacaccccttggacattcggccagggcaccaagctggaaatcaagagaggcggaggcggaagtggaggcggaggatctggcggcggaggctctcaagttcagcttcaacagcctggcgctgagctggtcaaacctggcgcttctgtgaagatgagctgcaaagccagcggctacgccttcagcagctactggatcaactggatgaagcagaaacccggccagggactcgaatggatcggccaaatctatcccggcgacggcgacaccaactacaacggcaagttcaagggcagagccacactgaccgccgatacctctagcagcacagcctacatgcagctgagcagcctgaccagcgaagatagcgccgtgtacttctgtgcccggtccatcacaacagtcgtgggctgcgctatggactattggggccagggaacaagcgtgaccgtgtctagtacgcgtcagagcatcaagggcaaccacctggtcaaggtgtacgactaccaagaggacggcagcgtgctgctgacatgtgatgccgaggccaagaacatcacctggtttaaggacggcaagatgatcggcttcctgaccgaggacaagaagaagtggaacctgggcagcaacgctaaggaccccagaggcatgtatcagtgcaagggcagccagaacaagagcaagcccctccaggtgtactaccggatgtgccagaactgcatcgagctgaacgccgctaccatcagcggctttctgttcgccgagatcgtgtccatcttcgtgctggccgtgggcgtgtactttatcgctggacaggatggcgtgcggcagagcagagcttccgataagcaaaccctgctgcctaacgaccagctgtaccagcctctgaaggacagagaggacgaccagtacagccacctccagggcaatcagctgagaagaaac

SEQ ID NO: 5597 - DNA, 2052 bp, Artificial Sequence
  Synthetic Polynucloetide
atggccttaccagtgaccgccttgctcctgccgctggccttgctgctccacgccgccaggccggaggttcagctgcttgagtctggcggaggactggttcaacctggcggaagcctgagactgtcttgtgccgccagcggcttcacctttagcagctacgccatgagctgggtccgacaggctcctggcaaaggactggaatgggtgtccagcatcagcggcagcggcgactacatctactacgccgatagcgtgaagggcagattcaccatcagccgggacatcagcaagaacaccctgtacctccagatgaacagcctgagagccgaggacaccgccgtgtactactgtgccaaagaaggcaccggcgctaacagcagcctggccgattatagaggccagggcacactggtcaccgtgtctagtggcggaggaagcggcggaggatctgaagtgcaactggtggaatctggagggggaagcgtgcaggcaggcggatctctgagactgtcctgcaccacatctggcagagccctgaatatgtacgtgatgggatggtttcggcaggctcccggcaacgagcgggaatttgtggccgctacaagcagcagcggcggcagcacaagctaccccgattctgtgaagggcagattcacaatctcccgcgataatgccaagaatactgtgtacctgcagatgaatagtctgaagcctgaagatacagccgcctacagatgtgccgccagcccctacgtgtccacccccaccatgaacatcctggaagagtacagatactggggcctgggaacacaagtgacagtgtccagcggtaccggcggaggcggatctggcggcggaggtagcggtggcggaggatctgaattcgacatccagatgacacagagccctagcagcctgtctgccagcgtgggagacagagtgaccatcacatgcaaggccagcgaccacatcaacaactggctggcctggtatcagcagaagcctggacaggcccctaagctgctgatctacggcgctaccacactggaaacaggcgtgcccagcagattttctggcagcggctctggcaccgactacaccctgacaatatccagcctccagcctgaggacttcgccacctactactgtcagcagagctggaacaccccttggacattcggccagggcaccaagctggaaatcaagagaggcggaggcggaagtggaggcggaggatctggcggcggaggctctcaagttcagcttcaacagcctggcgctgagctggtcaaacctggcgcttctgtgaagatgagctgcaaagccagcggctacgccttcagcagctactggatcaactggatgaagcagaaacccggccagggactcgaatggatcggccaaatctatcccggcgacggcgacaccaactacaacggcaagttcaagggcagagccacactgaccgccgatacctctagcagcacagcctacatgcagctgagcagcctgaccagcgaagatagcgccgtgtacttctgtgcccggtccatcacaacagtcgtgggctgcgctatggactattggggccagggaacaagcgtgaccgtgtctagtacgcgtcagagttttgggttgttggaccctaaattgtgctatctgttggacggaatcctgttcatttacggagtgatcctgaccgcattgttcctgcgggttaagttttccagatccgcagacgcacccgcttaccaacaagggcagaaccaactctacaatgaacttaatttggggcggagggaagagtacgacgttctggacaaaaggaggggacgagatcccgagatgggcggaaagcctcagcgaaggaagaatccgcaagaggggctttataacgaactccagaaagataaaatggcagaagcctatagtgagattgggatgaagggagaaaggaggaggggtaaaggtcacgatgggttgtaccaaggattgagcacagccactaaagatacctatgatgcgctccacatgcaggccctgccgccaaga

SEQ ID NO: 5598 - DNA, 2754 bp, Artificial Sequence
  Synthetic Polynucloetide
atggccttaccagtgaccgccttgctcctgccgctggccttgctgctccacgccgccaggccggaggttcagctgcttgagtctggcggaggactggttcaacctggcggaagcctgagactgtcttgtgccgccagcggcttcacctttagcagctacgccatgagctgggtccgacaggctcctggcaaaggactggaatgggtgtccagcatcagcggcagcggcgactacatctactacgccgatagcgtgaagggcagattcaccatcagccgggacatcagcaagaacaccctgtacctccagatgaacagcctgagagccgaggacaccgccgtgtactactgtgccaaagaaggcaccggcgctaacagcagcctggccgattatagaggccagggcacactggtcaccgtgtctagtggcggaggaagcggcggaggatctgaagtgcaactggtggaatctggagggggaagcgtgcaggcaggcggatctctgagactgtcctgcaccacatctggcagagccctgaatatgtacgtgatgggatggtttcggcaggctcccggcaacgagcgggaatttgtggccgctacaagcagcagcggcggcagcacaagctaccccgattctgtgaagggcagattcacaatctcccgcgataatgccaagaatactgtgtacctgcagatgaatagtctgaagcctgaagatacagccgcctacagatgtgccgccagcccctacgtgtccacccccaccatgaacatcctggaagagtacagatactggggcctgggaacacaagtgacagtgtccagcggtaccggcggaggcggatctggcggcggaggtagcggtggcggaggatctgaattcgacatccagatgacacagagccctagcagcctgtctgccagcgtgggagacagagtgaccatcacatgcaaggccagcgaccacatcaacaactggctggcctggtatcagcagaagcctggacaggcccctaagctgctgatctacggcgctaccacactggaaacaggcgtgcccagcagattttctggcagcggctctggcaccgactacaccctgacaatatccagcctccagcctgaggacttcgccacctactactgtcagcagagctggaacaccccttggacattcggccagggcaccaagctggaaatcaagagaggcggaggcggaagtggaggcggaggatctggcggcggaggctctcaagttcagcttcaacagcctggcgctgagctggtcaaacctggcgcttctgtgaagatgagctgcaaagccagcggctacgccttcagcagctactggatcaactggatgaagcagaaacccggccagggactcgaatggatcggccaaatctatcccggcgacggcgacaccaactacaacggcaagttcaagggcagagccacactgaccgccgatacctctagcagcacagcctacatgcagctgagcagcctgaccagcgaagatagcgccgtgtacttctgtgcccggtccatcacaacagtcgtgggctgcgctatggactattggggccagggaacaagcgtgaccgtgtctagtacgcgtgggagcggcatccagaaccctgatcctgccgtgtaccagctgcgggatagcaagagcagcgacaagagcgtgtgtctgttcaccgacttcgacagccagaccaacgtgtcccagagcaaggactccgacgtgtacatcaccgataagaccgtgctggacatgcggagcatggacttcaagagcaactccgccgtggcctggtccaacaagtccgatttcgcctgcgccaacgccttcaacaacagcattatccccgaggacacattcttcccaagccccgagagcagctgcgacgtgaagctggtggaaaagagcttcgagacagacaccaacctgaacttccagaacctgagcgtgatcggcttcagaatcctgctgctgaaagtggccggctttaacctgctgatgaccctgcggctgtggtccagccgcgccaagagaagcggatctggcgtgaagcagaccctgaatttcgacctgctgaagctggctggcgacgtggaatccaacccaggcccttctagaggccatatgaccgagtacaagcccacggtgcgcctcgccacccgcgacgacgtccccagggccgtacgcaccctcgccgccgcgttcgccgactaccccgccacgcgccacaccgtcgatccggaccgccacatcgagcgggtcaccgagctgcaagaactcttcctcacgcgcgtcgggctcgacatcggcaaggtgtgggtcgcggacgacggcgccgcggtggcggtctggaccacgccggagagcgtcgaagcgggggcggtgttcgccgagatcggcccgcgcatggccgagttgagcggttcccggctggccgcgcagcaacagatggaaggcctcctggcgccgcaccggcccaaggagcccgcgtggttcctggccaccgtcggcgtctcgcccgaccaccagggcaagggtctgggcagcgccgtcgtgctccccggagtggaggcggccgagcgcgccggggtgcccgccttcctggagacctccgcgccccgcaacctccccttctacgagcggctcggcttcaccgtcaccgccgacgtcgaggtgcccgaaggaccgcgcacctggtgcatgacccgcaagcccggtgcctga

SEQ ID NO: 5599 - DNA, 2850 bp, Artificial Sequence
  Synthetic Polynucloetide
atggccttaccagtgaccgccttgctcctgccgctggccttgctgctccacgccgccaggccggaggttcagctgcttgagtctggcggaggactggttcaacctggcggaagcctgagactgtcttgtgccgccagcggcttcacctttagcagctacgccatgagctgggtccgacaggctcctggcaaaggactggaatgggtgtccagcatcagcggcagcggcgactacatctactacgccgatagcgtgaagggcagattcaccatcagccgggacatcagcaagaacaccctgtacctccagatgaacagcctgagagccgaggacaccgccgtgtactactgtgccaaagaaggcaccggcgctaacagcagcctggccgattatagaggccagggcacactggtcaccgtgtctagtggcggaggaagcggcggaggatctgaagtgcaactggtggaatctggagggggaagcgtgcaggcaggcggatctctgagactgtcctgcaccacatctggcagagccctgaatatgtacgtgatgggatggtttcggcaggctcccggcaacgagcgggaatttgtggccgctacaagcagcagcggcggcagcacaagctaccccgattctgtgaagggcagattcacaatctcccgcgataatgccaagaatactgtgtacctgcagatgaatagtctgaagcctgaagatacagccgcctacagatgtgccgccagcccctacgtgtccacccccaccatgaacatcctggaagagtacagatactggggcctgggaacacaagtgacagtgtccagcggtaccggcggaggcggatctggcggcggaggtagcggtggcggaggatctgaattcgacatccagatgacacagagccctagcagcctgtctgccagcgtgggagacagagtgaccatcacatgcaaggccagcgaccacatcaacaactggctggcctggtatcagcagaagcctggacaggcccctaagctgctgatctacggcgctaccacactggaaacaggcgtgcccagcagattttctggcagcggctctggcaccgactacaccctgacaatatccagcctccagcctgaggacttcgccacctactactgtcagcagagctggaacaccccttggacattcggccagggcaccaagctggaaatcaagagaggcggaggcggaagtggaggcggaggatctggcggcggaggctctcaagttcagcttcaacagcctggcgctgagctggtcaaacctggcgcttctgtgaagatgagctgcaaagccagcggctacgccttcagcagctactggatcaactggatgaagcagaaacccggccagggactcgaatggatcggccaaatctatcccggcgacggcgacaccaactacaacggcaagttcaagggcagagccacactgaccgccgatacctctagcagcacagcctacatgcagctgagcagcctgaccagcgaagatagcgccgtgtacttctgtgcccggtccatcacaacagtcgtgggctgcgctatggactattggggccagggaacaagcgtgaccgtgtctagtctcgaggacctgaagaacgtgttcccacctgaggtggccgtgttcgagcctagcgaggccgagatcagccacacccagaaagccaccctcgtgtgcctggctaccggcttctaccccgaccatgtggaactgtcttggtgggtcaacggcaaagaggtgcacagcggcgtgtctaccgacccccagccactgaaagaacagcccgccctgaacgacagccggtactgcctgagcagcagactgagagtgtccgccaccttctggcagaacccccggaaccacttcagatgccaggtgcagttctacggcctgagcgagaacgacgagtggacccaggacagagccaagcccgtgacccagatcgtgtctgccgaagcctggggcagagccgattgcggctttaccagcgagagctaccagcagggcgtgctgagcgccaccatcctgtacgagatcctgctgggcaaggccaccctgtacgccgtgctggtgtctgccctggtgctgatggctatggtcaagcggaaggacagccggggaagggccaagcgatctggatctggagcaacaaacttctcactactcaaacaagcaggtgacgtggaggagaatcccgggcctactagaggccatatgaccgagtacaagcccacggtgcgcctcgccacccgcgacgacgtccccagggccgtacgcaccctcgccgccgcgttcgccgactaccccgccacgcgccacaccgtcgatccggaccgccacatcgagcgggtcaccgagctgcaagaactcttcctcacgcgcgtcgggctcgacatcggcaaggtgtgggtcgcggacgacggcgccgcggtggcggtctggaccacgccggagagcgtcgaagcgggggcggtgttcgccgagatcggcccgcgcatggccgagttgagcggttcccggctggccgcgcagcaacagatggaaggcctcctggcgccgcaccggcccaaggagcccgcgtggttcctggccaccgtcggcgtctcgcccgaccaccagggcaagggtctgggcagcgccgtcgtgctccccggagtggaggcggccgagcgcgccggggtgcccgccttcctggagacctccgcgccccgcaacctccccttctacgagcggctcggcttcaccgtcaccgccgacgtcgaggtgcccgaaggaccgcgcacctggtgcatgacccgcaagcccggtgcctga

SEQ ID NO: 5600 - DNA, 3000 bp, Artificial Sequence
  Synthetic Polynucloetide
atggccttaccagtgaccgccttgctcctgccgctggccttgctgctccacgccgccaggccggaggttcagctgcttgagtctggcggaggactggttcaacctggcggaagcctgagactgtcttgtgccgccagcggcttcacctttagcagctacgccatgagctgggtccgacaggctcctggcaaaggactggaatgggtgtccagcatcagcggcagcggcgactacatctactacgccgatagcgtgaagggcagattcaccatcagccgggacatcagcaagaacaccctgtacctccagatgaacagcctgagagccgaggacaccgccgtgtactactgtgccaaagaaggcaccggcgctaacagcagcctggccgattatagaggccagggcacactggtcaccgtgtctagtggcggaggaagcggcggaggatctgaagtgcaactggtggaatctggagggggaagcgtgcaggcaggcggatctctgagactgtcctgcaccacatctggcagagccctgaatatgtacgtgatgggatggtttcggcaggctcccggcaacgagcgggaatttgtggccgctacaagcagcagcggcggcagcacaagctaccccgattctgtgaagggcagattcacaatctcccgcgataatgccaagaatactgtgtacctgcagatgaatagtctgaagcctgaagatacagccgcctacagatgtgccgccagcccctacgtgtccacccccaccatgaacatcctggaagagtacagatactggggcctgggaacacaagtgacagtgtccagcggtaccggcggaggcggatctggcggcggaggtagcggtggcggaggatctgaattcgacatccagatgacacagagccctagcagcctgtctgccagcgtgggagacagagtgaccatcacatgcaaggccagcgaccacatcaacaactggctggcctggtatcagcagaagcctggacaggcccctaagctgctgatctacggcgctaccacactggaaacaggcgtgcccagcagattttctggcagcggctctggcaccgactacaccctgacaatatccagcctccagcctgaggacttcgccacctactactgtcagcagagctggaacaccccttggacattcggccagggcaccaagctggaaatcaagagaggcggaggcggaagtggaggcggaggatctggcggcggaggctctcaagttcagcttcaacagcctggcgctgagctggtcaaacctggcgcttctgtgaagatgagctgcaaagccagcggctacgccttcagcagctactggatcaactggatgaagcagaaacccggccagggactcgaatggatcggccaaatctatcccggcgacggcgacaccaactacaacggcaagttcaagggcagagccacactgaccgccgatacctctagcagcacagcctacatgcagctgagcagcctgaccagcgaagatagcgccgtgtacttctgtgcccggtccatcacaacagtcgtgggctgcgctatggactattggggccagggaacaagcgtgaccgtgtctagtacgcgtgagcagaaactgatctcggaagaggatctggggagcggcaccccattcccttctctggcccctcccatcatgctgctggtggacggcaagcagcagatggtggtcgtgtgcctggtgctggatgtggccccacctggactggacagccccatctggtttagcgccggcaatggctctgccctggacgcctttacctacggcccaagccctgccaccgatggcacctggacaaatctggcccacctgagcctgcccagcgaggaactggcttcttgggagcctctcgtgtgccacacaggacctggcgctgagggacacagcagatccacccagcctatgcacctgtctggcgaggccagcaccgccagaacctgtcctcaggaacctctgagaggcacccctggcggagcactgtggctgggagtgctgagactgctgctgttcaagctgctgctgtttgacctgctgctgacctgctcctgtctgtgcgatcctgccggccctctgccttctcctgccaccaccacaagactgagagccctgggcagccacagactgcaccctgccacagagacaggcggcagagaggccacaagcagccctagaccccagcccagagacagaagatggggcgataccccccctggcagaaagcctggatctccagtccgcgccaagagaagcggatctggcgtgaagcagaccctgaatttcgacctgctgaagctggctggcgacgtggaatccaacccaggcccttctagatctagaggccatatgaccgagtacaagcccacggtgcgcctcgccacccgcgacgacgtccccagggccgtacgcaccctcgccgccgcgttcgccgactaccccgccacgcgccacaccgtcgatccggaccgccacatcgagcgggtcaccgagctgcaagaactcttcctcacgcgcgtcgggctcgacatcggcaaggtgtgggtcgcggacgacggcgccgcggtggcggtctggaccacgccggagagcgtcgaagcgggggcggtgttcgccgagatcggcccgcgcatggccgagttgagcggttcccggctggccgcgcagcaacagatggaaggcctcctggcgccgcaccggcccaaggagcccgcgtggttcctggccaccgtcggcgtctcgcccgaccaccagggcaagggtctgggcagcgccgtcgtgctccccggagtggaggcggccgagcgcgccggggtgcccgccttcctggagacctccgcgccccgcaacctccccttctacgagcggctcggcttcaccgtcaccgccgacgtcgaggtgcccgaaggaccgcgcacctggtgcatgacccgcaagcccggtgcctga

SEQ ID NO: 5601 - DNA, 2442 bp, Artificial Sequence
  Synthetic Polynucloetide
atggccttaccagtgaccgccttgctcctgccgctggccttgctgctccacgccgccaggccggaggttcagctgcttgagtctggcggaggactggttcaacctggcggaagcctgagactgtcttgtgccgccagcggcttcacctttagcagctacgccatgagctgggtccgacaggctcctggcaaaggactggaatgggtgtccagcatcagcggcagcggcgactacatctactacgccgatagcgtgaagggcagattcaccatcagccgggacatcagcaagaacaccctgtacctccagatgaacagcctgagagccgaggacaccgccgtgtactactgtgccaaagaaggcaccggcgctaacagcagcctggccgattatagaggccagggcacactggtcaccgtgtctagtggcggaggaagcggcggaggatctgaagtgcaactggtggaatctggagggggaagcgtgcaggcaggcggatctctgagactgtcctgcaccacatctggcagagccctgaatatgtacgtgatgggatggtttcggcaggctcccggcaacgagcgggaatttgtggccgctacaagcagcagcggcggcagcacaagctaccccgattctgtgaagggcagattcacaatctcccgcgataatgccaagaatactgtgtacctgcagatgaatagtctgaagcctgaagatacagccgcctacagatgtgccgccagcccctacgtgtccacccccaccatgaacatcctggaagagtacagatactggggcctgggaacacaagtgacagtgtccagcggtaccggcggaggcggatctggcggcggaggtagcggtggcggaggatctgaattcgacatccagatgacacagagccctagcagcctgtctgccagcgtgggagacagagtgaccatcacatgcaaggccagcgaccacatcaacaactggctggcctggtatcagcagaagcctggacaggcccctaagctgctgatctacggcgctaccacactggaaacaggcgtgcccagcagattttctggcagcggctctggcaccgactacaccctgacaatatccagcctccagcctgaggacttcgccacctactactgtcagcagagctggaacaccccttggacattcggccagggcaccaagctggaaatcaagagactcgaggacctgaagaacgtgttcccacctgaggtggccgtgttcgagcctagcgaggccgagatcagccacacccagaaagccaccctcgtgtgcctggctaccggcttctaccccgaccatgtggaactgtcttggtgggtcaacggcaaagaggtgcacagcggcgtgtctaccgacccccagccactgaaagaacagcccgccctgaacgacagccggtactgcctgagcagcagactgagagtgtccgccaccttctggcagaacccccggaaccacttcagatgccaggtgcagttctacggcctgagcgagaacgacgagtggacccaggacagagccaagcccgtgacccagatcgtgtctgccgaagcctggggcagagccgattgcggctttaccagcgagagctaccagcagggcgtgctgagcgccaccatcctgtacgagatcctgctgggcaaggccaccctgtacgccgtgctggtgtctgccctggtgctgatggctatggtcaagcggaaggacagccggggaagggccaagcgatctggatctggagcaacaaacttctcactactcaaacaagcaggtgacgtggaggagaatcccgggcctactagaggccatatgaccgagtacaagcccacggtgcgcctcgccacccgcgacgacgtccccagggccgtacgcaccctcgccgccgcgttcgccgactaccccgccacgcgccacaccgtcgatccggaccgccacatcgagcgggtcaccgagctgcaagaactcttcctcacgcgcgtcgggctcgacatcggcaaggtgtgggtcgcggacgacggcgccgcggtggcggtctggaccacgccggagagcgtcgaagcgggggcggtgttcgccgagatcggcccgcgcatggccgagttgagcggttcccggctggccgcgcagcaacagatggaaggcctcctggcgccgcaccggcccaaggagcccgcgtggttcctggccaccgtcggcgtctcgcccgaccaccagggcaagggtctgggcagcgccgtcgtgctccccggagtggaggcggccgagcgcgccggggtgcccgccttcctggagacctccgcgccccgcaacctccccttctacgagcggctcggcttcaccgtcaccgccgacgtcgaggtgcccgaaggaccgcgcacctggtgcatgacccgcaagcccggtgcctga

SEQ ID NO: 5602 - DNA, 1749 bp, Artificial Sequence
  Synthetic Polynucloetide
atggccttaccagtgaccgccttgctcctgccgctggccttgctgctccacgccgccaggccggaggttcagctgcttgagtctggcggaggactggttcaacctggcggaagcctgagactgtcttgtgccgccagcggcttcacctttagcagctacgccatgagctgggtccgacaggctcctggcaaaggactggaatgggtgtccagcatcagcggcagcggcgactacatctactacgccgatagcgtgaagggcagattcaccatcagccgggacatcagcaagaacaccctgtacctccagatgaacagcctgagagccgaggacaccgccgtgtactactgtgccaaagaaggcaccggcgctaacagcagcctggccgattatagaggccagggcacactggtcaccgtgtctagtggcggaggaagcggcggaggatctgaagtgcaactggtggaatctggagggggaagcgtgcaggcaggcggatctctgagactgtcctgcaccacatctggcagagccctgaatatgtacgtgatgggatggtttcggcaggctcccggcaacgagcgggaatttgtggccgctacaagcagcagcggcggcagcacaagctaccccgattctgtgaagggcagattcacaatctcccgcgataatgccaagaatactgtgtacctgcagatgaatagtctgaagcctgaagatacagccgcctacagatgtgccgccagcccctacgtgtccacccccaccatgaacatcctggaagagtacagatactggggcctgggaacacaagtgacagtgtccagcggtaccggcggaggcggatctggcggcggaggtagcggtggcggaggatctgaattcgacatccagatgacacagagccctagcagcctgtctgccagcgtgggagacagagtgaccatcacatgcaaggccagcgaccacatcaacaactggctggcctggtatcagcagaagcctggacaggcccctaagctgctgatctacggcgctaccacactggaaacaggcgtgcccagcagattttctggcagcggctctggcaccgactacaccctgacaatatccagcctccagcctgaggacttcgccacctactactgtcagcagagctggaacaccccttggacattcggccagggcaccaagctggaaatcaagagactcgaggacctgaagaacgtgttcccacctgaggtggccgtgttcgagcctagcgaggccgagatcagccacacccagaaagccaccctcgtgtgcctggctaccggcttctaccccgaccatgtggaactgtcttggtgggtcaacggcaaagaggtgcacagcggcgtgtctaccgacccccagccactgaaagaacagcccgccctgaacgacagccggtactgcctgagcagcagactgagagtgtccgccaccttctggcagaacccccggaaccacttcagatgccaggtgcagttctacggcctgagcgagaacgacgagtggacccaggacagagccaagcccgtgacccagatcgtgtctgccgaagcctggggcagagccgattgcggctttaccagcgagagctaccagcagggcgtgctgagcgccaccatcctgtacgagatcctgctgggcaaggccaccctgtacgccgtgctggtgtctgccctggtgctgatggctatggtcaagcggaaggacagccgggga

SEQ ID NO: 5603 - DNA, 2496 bp, Artificial Sequence
  Synthetic Polynucloetide
atggccttaccagtgaccgccttgctcctgccgctggccttgctgctccacgccgccaggccggaggttcagctgcttgagtctggcggaggactggttcaacctggcggaagcctgagactgtcttgtgccgccagcggcttcacctttagcagctacgccatgagctgggtccgacaggctcctggcaaaggactggaatgggtgtccagcatcagcggcagcggcgactacatctactacgccgatagcgtgaagggcagattcaccatcagccgggacatcagcaagaacaccctgtacctccagatgaacagcctgagagccgaggacaccgccgtgtactactgtgccaaagaaggcaccggcgctaacagcagcctggccgattatagaggccagggcacactggtcaccgtgtctagtggcggaggaagcggcggaggatctgaagtgcaactggtggaatctggagggggaagcgtgcaggcaggcggatctctgagactgtcctgcaccacatctggcagagccctgaatatgtacgtgatgggatggtttcggcaggctcccggcaacgagcgggaatttgtggccgctacaagcagcagcggcggcagcacaagctaccccgattctgtgaagggcagattcacaatctcccgcgataatgccaagaatactgtgtacctgcagatgaatagtctgaagcctgaagatacagccgcctacagatgtgccgccagcccctacgtgtccacccccaccatgaacatcctggaagagtacagatactggggcctgggaacacaagtgacagtgtccagcggtaccggcggaggcggatctggcggcggaggtagcggtggcggaggatctgaattcgacatccagatgacacagagccctagcagcctgtctgccagcgtgggagacagagtgaccatcacatgcaaggccagcgaccacatcaacaactggctggcctggtatcagcagaagcctggacaggcccctaagctgctgatctacggcgctaccacactggaaacaggcgtgcccagcagattttctggcagcggctctggcaccgactacaccctgacaatatccagcctccagcctgaggacttcgccacctactactgtcagcagagctggaacaccccttggacattcggccagggcaccaagctggaaatcaagagactcgaggggaaaccaattcccaaccctcttctgggactggattcaaccggcagcggcgaggacctgaagaacgtgttcccacctgaggtggccgtgttcgagcctagcgaggccgagatcagccacacccagaaagccaccctcgtgtgcctggctaccggcttctaccccgaccatgtggaactgtcttggtgggtcaacggcaaagaggtgcacagcggcgtgtgtaccgacccccagccactgaaagaacagcccgccctgaacgacagccggtactgcctgagcagcagactgagagtgtccgccaccttctggcagaacccccggaaccacttcagatgccaggtgcagttctacggcctgagcgagaacgacgagtggacccaggacagagccaagcccgtgacccagatcgtgtctgccgaagcctggggcagagccgattgcggctttaccagcgagagctaccagcagggcgtgctgagcgccaccatcctgtacgagatcctgctgggcaaggccaccctgtacgccgtgctggtgtctgccctggtgctgatggctatggtcaagcggaaggacagccggggaagggccaagcgatctggatctggagcaacaaacttctcactactcaaacaagcaggtgacgtggaggagaatcccgggcctactagaggccatatgaccgagtacaagcccacggtgcgcctcgccacccgcgacgacgtccccagggccgtacgcaccctcgccgccgcgttcgccgactaccccgccacgcgccacaccgtcgatccggaccgccacatcgagcgggtcaccgagctgcaagaactcttcctcacgcgcgtcgggctcgacatcggcaaggtgtgggtcgcggacgacggcgccgcggtggcggtctggaccacgccggagagcgtcgaagcgggggcggtgttcgccgagatcggcccgcgcatggccgagttgagcggttcccggctggccgcgcagcaacagatggaaggcctcctggcgccgcaccggcccaaggagcccgcgtggttcctggccaccgtcggcgtctcgcccgaccaccagggcaagggtctgggcagcgccgtcgtgctccccggagtggaggcggccgagcgcgccggggtgcccgccttcctggagacctccgcgccccgcaacctccccttctacgagcggctcggcttcaccgtcaccgccgacgtcgaggtgcccgaaggaccgcgcacctggtgcatgacccgcaagcccggtgcctga

SEQ ID NO: 5604 - DNA, 1806 bp, Artificial Sequence
  Synthetic Polynucloetide
atggccttaccagtgaccgccttgctcctgccgctggccttgctgctccacgccgccaggccggaggttcagctgcttgagtctggcggaggactggttcaacctggcggaagcctgagactgtcttgtgccgccagcggcttcacctttagcagctacgccatgagctgggtccgacaggctcctggcaaaggactggaatgggtgtccagcatcagcggcagcggcgactacatctactacgccgatagcgtgaagggcagattcaccatcagccgggacatcagcaagaacaccctgtacctccagatgaacagcctgagagccgaggacaccgccgtgtactactgtgccaaagaaggcaccggcgctaacagcagcctggccgattatagaggccagggcacactggtcaccgtgtctagtggcggaggaagcggcggaggatctgaagtgcaactggtggaatctggagggggaagcgtgcaggcaggcggatctctgagactgtcctgcaccacatctggcagagccctgaatatgtacgtgatgggatggtttcggcaggctcccggcaacgagcgggaatttgtggccgctacaagcagcagcggcggcagcacaagctaccccgattctgtgaagggcagattcacaatctcccgcgataatgccaagaatactgtgtacctgcagatgaatagtctgaagcctgaagatacagccgcctacagatgtgccgccagcccctacgtgtccacccccaccatgaacatcctggaagagtacagatactggggcctgggaacacaagtgacagtgtccagcggtaccggcggaggcggatctggcggcggaggtagcggtggcggaggatctgaattcgacatccagatgacacagagccctagcagcctgtctgccagcgtgggagacagagtgaccatcacatgcaaggccagcgaccacatcaacaactggctggcctggtatcagcagaagcctggacaggcccctaagctgctgatctacggcgctaccacactggaaacaggcgtgcccagcagattttctggcagcggctctggcaccgactacaccctgacaatatccagcctccagcctgaggacttcgccacctactactgtcagcagagctggaacaccccttggacattcggccagggcaccaagctggaaatcaagagactcgaggggaaaccaattcccaaccctcttctgggactggattcaaccggcagcggcgaggacctgaagaacgtgttcccacctgaggtggccgtgttcgagcctagcgaggccgagatcagccacacccagaaagccaccctcgtgtgcctggctaccggcttctaccccgaccatgtggaactgtcttggtgggtcaacggcaaagaggtgcacagcggcgtgtgtaccgacccccagccactgaaagaacagcccgccctgaacgacagccggtactgcctgagcagcagactgagagtgtccgccaccttctggcagaacccccggaaccacttcagatgccaggtgcagttctacggcctgagcgagaacgacgagtggacccaggacagagccaagcccgtgacccagatcgtgtctgccgaagcctggggcagagccgattgcggctttaccagcgagagctaccagcagggcgtgctgagcgccaccatcctgtacgagatcctgctgggcaaggccaccctgtacgccgtgctggtgtctgccctggtgctgatggctatggtcaagcggaaggacagccggggatga

SEQ ID NO: 5605 - DNA, 2754 bp, Artificial Sequence
  Synthetic Polynucloetide
atggccttaccagtgaccgccttgctcctgccgctggccttgctgctccacgccgccaggccggaggttcagctgcttgagtctggcggaggactggttcaacctggcggaagcctgagactgtcttgtgccgccagcggcttcacctttagcagctacgccatgagctgggtccgacaggctcctggcaaaggactggaatgggtgtccagcatcagcggcagcggcgactacatctactacgccgatagcgtgaagggcagattcaccatcagccgggacatcagcaagaacaccctgtacctccagatgaacagcctgagagccgaggacaccgccgtgtactactgtgccaaagaaggcaccggcgctaacagcagcctggccgattatagaggccagggcacactggtcaccgtgtctagtggcggaggaagcggcggaggatctgaagtgcaactggtggaatctggagggggaagcgtgcaggcaggcggatctctgagactgtcctgcaccacatctggcagagccctgaatatgtacgtgatgggatggtttcggcaggctcccggcaacgagcgggaatttgtggccgctacaagcagcagcggcggcagcacaagctaccccgattctgtgaagggcagattcacaatctcccgcgataatgccaagaatactgtgtacctgcagatgaatagtctgaagcctgaagatacagccgcctacagatgtgccgccagcccctacgtgtccacccccaccatgaacatcctggaagagtacagatactggggcctgggaacacaagtgacagtgtccagcggtaccggcggaggcggatctggcggcggaggtagcggtggcggaggatctgaattcgacatccagatgacacagagccctagcagcctgtctgccagcgtgggagacagagtgaccatcacatgcaaggccagcgaccacatcaacaactggctggcctggtatcagcagaagcctggacaggcccctaagctgctgatctacggcgctaccacactggaaacaggcgtgcccagcagattttctggcagcggctctggcaccgactacaccctgacaatatccagcctccagcctgaggacttcgccacctactactgtcagcagagctggaacaccccttggacattcggccagggcaccaagctggaaatcaagagaggcggaggcggaagtggaggcggaggatctggcggcggaggctctcaagttcagcttcaacagcctggcgctgagctggtcaaacctggcgcttctgtgaagatgagctgcaaagccagcggctacgccttcagcagctactggatcaactggatgaagcagaaacccggccagggactcgaatggatcggccaaatctatcccggcgacggcgacaccaactacaacggcaagttcaagggcagagccacactgaccgccgatacctctagcagcacagcctacatgcagctgagcagcctgaccagcgaagatagcgccgtgtacttctgtgcccggtccatcacaacagtcgtgggctgcgctatggactattggggccagggaacaagcgtgaccgtgtctagtacgcgtgggagcggcatccagaaccctgatcctgccgtgtaccagctgcgggatagcaagagcagcgacaagagcgtgtgtctgttcaccgacttcgacagccagaccaacgtgtcccagagcaaggactccgacgtgtacatcaccgataagaccgtgctggacatgcggagcatggacttcaagagcaactccgccgtggcctggtccaacaagtccgatttcgcctgcgccaacgccttcaacaacagcattatccccgaggacacattcttcccaagcagcgacgtgccctgcgacgtgaagctggtggaaaagagcttcgagacagacaccaacctgaacttccagaacctgagcgtgatcggcttcagaatcctgctgctgaaagtggccggctttaacctgctgatgaccctgcggctgtggtccagccgcgccaagagaagcggatctggcgtgaagcagaccctgaatttcgacctgctgaagctggctggcgacgtggaatccaacccaggcccttctagaggccatatgaccgagtacaagcccacggtgcgcctcgccacccgcgacgacgtccccagggccgtacgcaccctcgccgccgcgttcgccgactaccccgccacgcgccacaccgtcgatccggaccgccacatcgagcgggtcaccgagctgcaagaactcttcctcacgcgcgtcgggctcgacatcggcaaggtgtgggtcgcggacgacggcgccgcggtggcggtctggaccacgccggagagcgtcgaagcgggggcggtgttcgccgagatcggcccgcgcatggccgagttgagcggttcccggctggccgcgcagcaacagatggaaggcctcctggcgccgcaccggcccaaggagcccgcgtggttcctggccaccgtcggcgtctcgcccgaccaccagggcaagggtctgggcagcgccgtcgtgctccccggagtggaggcggccgagcgcgccggggtgcccgccttcctggagacctccgcgccccgcaacctccccttctacgagcggctcggcttcaccgtcaccgccgacgtcgaggtgcccgaaggaccgcgcacctggtgcatgacccgcaagcccggtgcctga

SEQ ID NO: 5606 - DNA, 2850 bp, Artificial Sequence
  Synthetic Polynucloetide
atggccttaccagtgaccgccttgctcctgccgctggccttgctgctccacgccgccaggccggaggttcagctgcttgagtctggcggaggactggttcaacctggcggaagcctgagactgtcttgtgccgccagcggcttcacctttagcagctacgccatgagctgggtccgacaggctcctggcaaaggactggaatgggtgtccagcatcagcggcagcggcgactacatctactacgccgatagcgtgaagggcagattcaccatcagccgggacatcagcaagaacaccctgtacctccagatgaacagcctgagagccgaggacaccgccgtgtactactgtgccaaagaaggcaccggcgctaacagcagcctggccgattatagaggccagggcacactggtcaccgtgtctagtggcggaggaagcggcggaggatctgaagtgcaactggtggaatctggagggggaagcgtgcaggcaggcggatctctgagactgtcctgcaccacatctggcagagccctgaatatgtacgtgatgggatggtttcggcaggctcccggcaacgagcgggaatttgtggccgctacaagcagcagcggcggcagcacaagctaccccgattctgtgaagggcagattcacaatctcccgcgataatgccaagaatactgtgtacctgcagatgaatagtctgaagcctgaagatacagccgcctacagatgtgccgccagcccctacgtgtccacccccaccatgaacatcctggaagagtacagatactggggcctgggaacacaagtgacagtgtccagcggtaccggcggaggcggatctggcggcggaggtagcggtggcggaggatctgaattcgacatccagatgacacagagccctagcagcctgtctgccagcgtgggagacagagtgaccatcacatgcaaggccagcgaccacatcaacaactggctggcctggtatcagcagaagcctggacaggcccctaagctgctgatctacggcgctaccacactggaaacaggcgtgcccagcagattttctggcagcggctctggcaccgactacaccctgacaatatccagcctccagcctgaggacttcgccacctactactgtcagcagagctggaacaccccttggacattcggccagggcaccaagctggaaatcaagagaggcggaggcggaagtggaggcggaggatctggcggcggaggctctcaagttcagcttcaacagcctggcgctgagctggtcaaacctggcgcttctgtgaagatgagctgcaaagccagcggctacgccttcagcagctactggatcaactggatgaagcagaaacccggccagggactcgaatggatcggccaaatctatcccggcgacggcgacaccaactacaacggcaagttcaagggcagagccacactgaccgccgatacctctagcagcacagcctacatgcagctgagcagcctgaccagcgaagatagcgccgtgtacttctgtgcccggtccatcacaacagtcgtgggctgcgctatggactattggggccagggaacaagcgtgaccgtgtctagtctcgaggacctgaagaacgtgttcccacctgaggtggccgtgttcgagcctagcaaggccgagatcgcccacacccagaaagccaccctcgtgtgcctggctaccggcttctaccccgaccatgtggaactgtcttggtgggtcaacggcaaagaggtgcacagcggcgtgtctaccgacccccagccactgaaagaacagcccgccctgaacgacagccggtactgcctgagcagcagactgagagtgtccgccaccttctggcagaacccccggaaccacttcagatgccaggtgcagttctacggcctgagcgagaacgacgagtggacccaggacagagccaagcccgtgacccagatcgtgtctgccgaagcctggggcagagccgattgcggcatcaccagcgccagctaccaccagggcgtgctgagcgccaccatcctgtacgagatcctgctgggcaaggccaccctgtacgccgtgctggtgtctgccctggtgctgatggctatggtcaagcggaaggacagccggggaagggccaagcgatctggatctggagcaacaaacttctcactactcaaacaagcaggtgacgtggaggagaatcccgggcctactagaggccatatgaccgagtacaagcccacggtgcgcctcgccacccgcgacgacgtccccagggccgtacgcaccctcgccgccgcgttcgccgactaccccgccacgcgccacaccgtcgatccggaccgccacatcgagcgggtcaccgagctgcaagaactcttcctcacgcgcgtcgggctcgacatcggcaaggtgtgggtcgcggacgacggcgccgcggtggcggtctggaccacgccggagagcgtcgaagcgggggcggtgttcgccgagatcggcccgcgcatggccgagttgagcggttcccggctggccgcgcagcaacagatggaaggcctcctggcgccgcaccggcccaaggagcccgcgtggttcctggccaccgtcggcgtctcgcccgaccaccagggcaagggtctgggcagcgccgtcgtgctccccggagtggaggcggccgagcgcgccggggtgcccgccttcctggagacctccgcgccccgcaacctccccttctacgagcggctcggcttcaccgtcaccgccgacgtcgaggtgcccgaaggaccgcgcacctggtgcatgacccgcaagcccggtgcctga

SEQ ID NO: 5607 - DNA, 3804 bp, Artificial Sequence
  Synthetic Polynucloetide
atggccttaccagtgaccgccttgctcctgccgctggccttgctgctccacgccgccaggccggaggttcagctgcttgagtctggcggaggactggttcaacctggcggaagcctgagactgtcttgtgccgccagcggcttcacctttagcagctacgccatgagctgggtccgacaggctcctggcaaaggactggaatgggtgtccagcatcagcggcagcggcgactacatctactacgccgatagcgtgaagggcagattcaccatcagccgggacatcagcaagaacaccctgtacctccagatgaacagcctgagagccgaggacaccgccgtgtactactgtgccaaagaaggcaccggcgctaacagcagcctggccgattatagaggccagggcacactggtcaccgtgtctagtggcggaggaagcggcggaggatctgaagtgcaactggtggaatctggagggggaagcgtgcaggcaggcggatctctgagactgtcctgcaccacatctggcagagccctgaatatgtacgtgatgggatggtttcggcaggctcccggcaacgagcgggaatttgtggccgctacaagcagcagcggcggcagcacaagctaccccgattctgtgaagggcagattcacaatctcccgcgataatgccaagaatactgtgtacctgcagatgaatagtctgaagcctgaagatacagccgcctacagatgtgccgccagcccctacgtgtccacccccaccatgaacatcctggaagagtacagatactggggcctgggaacacaagtgacagtgtccagcggtaccggcggaggcggatctggcggcggaggtagcggtggcggaggatctgaattcgacatccagatgacacagagccctagcagcctgtctgccagcgtgggagacagagtgaccatcacatgcaaggccagcgaccacatcaacaactggctggcctggtatcagcagaagcctggacaggcccctaagctgctgatctacggcgctaccacactggaaacaggcgtgcccagcagattttctggcagcggctctggcaccgactacaccctgacaatatccagcctccagcctgaggacttcgccacctactactgtcagcagagctggaacaccccttggacattcggccagggcaccaagctggaaatcaagagactcgagatccagaaccctgatcctgccgtgtaccagctgcgggatagcaagagcagcgacaagagcgtgtgtctgttcaccgacttcgacagccagaccaacgtgtcccagagcaaggactccgacgtgtacatcaccgataagtgcgtgctggacatgcggagcatggacttcaagagcaactccgccgtggcctggtccaacaagtccgatttcgcctgcgccaacgccttcaacaacagcattatccccgaggacacattcttcccaagcagcgacgtgccctgcgacgtgaagctggtggaaaagagcttcgagacagacaccaacctgaacttccagaacctgagcgtgatcggcttcagaatcctgctgctgaaagtggccggctttaacctgctgatgaccctgcggctgtggtccagccgcgccaagagaagcggatctggcgtgaagcagaccctgaatttcgacctgctgaagctggctggcgacgtggaatccaacccaggccctactagtatggactggatttggcgcatccttttccttgtcggcgctgctaccggcgcccattccgggccccaggttcagctgcaagagtctggcggaggacttgctcaagctggcggaagcctgagactgtcttgtgccgcctctggcagaaccttcagcatgggctggtttagacaggcccctggcaaagagagagagttcgtcgccgccatcacatacagcggcggcagcccttactacgcctcttctgtcagaggccggttcaccatcagccgggacaacgccaagaacaccgtgtacctccagatgaacagcctgaagccagaggacaccgccgtgtactactgtgccgccaatccaacctacggcagcgactggaatgccgagaattggggccagggcacccaagtgacagtgtctagtggatccggcggcggaggatctggcggaggcggatctgggggcggaggctctttcgaacaagttcagcttcaacagcctggcgctgagctggtcaaacctggcgcttctgtgaagatgagctgcaaagccagcggctacgccttcagcagctactggatcaactggatgaagcagaaacccggccagggactcgaatggatcggccaaatctatcccggcgacggcgacaccaactacaacggcaagttcaagggcagagccacactgaccgccgatacctctagcagcacagcctacatgcagctgagcagcctgaccagcgaagatagcgccgtgtacttctgtgcccggtccatcacaacagtcgtgggctgcgctatggactattggggccagggaacaagcgtgaccgtgtctagtacgcgtgaggacctgaagaacgtgttcccacctgaggtggccgtgttcgagcctagcaaggccgagatcgcccacacccagaaagccaccctcgtgtgcctggctaccggcttctaccccgaccatgtggaactgtcttggtgggtcaacggcaaagaggtgcacagcggcgtgtgtaccgacccccagccactgaaagaacagcccgccctgaacgacagccggtactgcctgagcagcagactgagagtgtccgccaccttctggcagaacccccggaaccacttcagatgccaggtgcagttctacggcctgagcgagaacgacgagtggacccaggacagagccaagcccgtgacccagatcgtgtctgccgaagcctggggcagagccgattgcggcatcaccagcgccagctaccaccagggcgtgctgagcgccaccatcctgtacgagatcctgctgggcaaggccaccctgtacgccgtgctggtgtctgccctggtgctgatggctatggtcaagcggaaggacagccggggaagggccaagcgatctggatctggagcaacaaacttctcactactcaaacaagcaggtgacgtggaggagaatcccgggccttctagaggccatatgaccgagtacaagcccacggtgcgcctcgccacccgcgacgacgtccccagggccgtacgcaccctcgccgccgcgttcgccgactaccccgccacgcgccacaccgtcgatccggaccgccacatcgagcgggtcaccgagctgcaagaactcttcctcacgcgcgtcgggctcgacatcggcaaggtgtgggtcgcggacgacggcgccgcggtggcggtctggaccacgccggagagcgtcgaagcgggggcggtgttcgccgagatcggcccgcgcatggccgagttgagcggttcccggctggccgcgcagcaacagatggaaggcctcctggcgccgcaccggcccaaggagcccgcgtggttcctggccaccgtcggcgtctcgcccgaccaccagggcaagggtctgggcagcgccgtcgtgctccccggagtggaggcggccgagcgcgccggggtgcccgccttcctggagacctccgcgccccgcaacctccccttctacgagcggctcggcttcaccgtcaccgccgacgtcgaggtgcccgaaggaccgcgcacctggtgcatgacccgcaagcccggtgcctga

SEQ ID NO: 5608 - DNA, 3801 bp, Artificial Sequence
  Synthetic Polynucloetide
atggccttaccagtgaccgccttgctcctgccgctggccttgctgctccacgccgccaggccggaggttcagctgcttgagtctggcggaggactggttcaacctggcggaagcctgagactgtcttgtgccgccagcggcttcacctttagcagctacgccatgagctgggtccgacaggctcctggcaaaggactggaatgggtgtccagcatcagcggcagcggcgactacatctactacgccgatagcgtgaagggcagattcaccatcagccgggacatcagcaagaacaccctgtacctccagatgaacagcctgagagccgaggacaccgccgtgtactactgtgccaaagaaggcaccggcgctaacagcagcctggccgattatagaggccagggcacactggtcaccgtgtctagtggcggaggaagcggcggaggatctgaagtgcaactggtggaatctggagggggaagcgtgcaggcaggcggatctctgagactgtcctgcaccacatctggcagagccctgaatatgtacgtgatgggatggtttcggcaggctcccggcaacgagcgggaatttgtggccgctacaagcagcagcggcggcagcacaagctaccccgattctgtgaagggcagattcacaatctcccgcgataatgccaagaatactgtgtacctgcagatgaatagtctgaagcctgaagatacagccgcctacagatgtgccgccagcccctacgtgtccacccccaccatgaacatcctggaagagtacagatactggggcctgggaacacaagtgacagtgtccagcggtaccggcggaggcggatctggcggcggaggtagcggtggcggaggatctgaattcgacatccagatgacacagagccctagcagcctgtctgccagcgtgggagacagagtgaccatcacatgcaaggccagcgaccacatcaacaactggctggcctggtatcagcagaagcctggacaggcccctaagctgctgatctacggcgctaccacactggaaacaggcgtgcccagcagattttctggcagcggctctggcaccgactacaccctgacaatatccagcctccagcctgaggacttcgccacctactactgtcagcagagctggaacaccccttggacattcggccagggcaccaagctggaaatcaagagactcgaggacctgaagaacgtgttcccacctgaggtggccgtgttcgagcctagcaaggccgagatcgcccacacccagaaagccaccctcgtgtgcctggctaccggcttctaccccgaccatgtggaactgtcttggtgggtcaacggcaaagaggtgcacagcggcgtgtgtaccgacccccagccactgaaagaacagcccgccctgaacgacagccggtactgcctgagcagcagactgagagtgtccgccaccttctggcagaacccccggaaccacttcagatgccaggtgcagttctacggcctgagcgagaacgacgagtggacccaggacagagccaagcccgtgacccagatcgtgtctgccgaagcctggggcagagccgattgcggcatcaccagcgccagctaccaccagggcgtgctgagcgccaccatcctgtacgagatcctgctgggcaaggccaccctgtacgccgtgctggtgtctgccctggtgctgatggctatggtcaagcggaaggacagccggggaagggccaagcgatctggatctggagcaacaaacttctcactactcaaacaagcaggtgacgtggaggagaatcccgggcctactagtatggactggatttggcgcatccttttccttgtcggcgctgctaccggcgcccattccgggccccaggttcagctgcaagagtctggcggaggacttgctcaagctggcggaagcctgagactgtcttgtgccgcctctggcagaaccttcagcatgggctggtttagacaggcccctggcaaagagagagagttcgtcgccgccatcacatacagcggcggcagcccttactacgcctcttctgtcagaggccggttcaccatcagccgggacaacgccaagaacaccgtgtacctccagatgaacagcctgaagccagaggacaccgccgtgtactactgtgccgccaatccaacctacggcagcgactggaatgccgagaattggggccagggcacccaagtgacagtgtctagtggatccggcggcggaggatctggcggaggcggatctgggggcggaggctctttcgaacaagttcagcttcaacagcctggcgctgagctggtcaaacctggcgcttctgtgaagatgagctgcaaagccagcggctacgccttcagcagctactggatcaactggatgaagcagaaacccggccagggactcgaatggatcggccaaatctatcccggcgacggcgacaccaactacaacggcaagttcaagggcagagccacactgaccgccgatacctctagcagcacagcctacatgcagctgagcagcctgaccagcgaagatagcgccgtgtacttctgtgcccggtccatcacaacagtcgtgggctgcgctatggactattggggccagggaacaagcgtgaccgtgtctagtacgcgtatccagaaccctgatcctgccgtgtaccagctgcgggatagcaagagcagcgacaagagcgtgtgtctgttcaccgacttcgacagccagaccaacgtgtcccagagcaaggactccgacgtgtacatcaccgataagtgcgtgctggacatgcggagcatggacttcaagagcaactccgccgtggcctggtccaacaagtccgatttcgcctgcgccaacgccttcaacaacagcattatccccgaggacacattcttcccaagcagcgacgtgccctgcgacgtgaagctggtggaaaagagcttcgagacagacaccaacctgaacttccagaacctgagcgtgatcggcttcagaatcctgctgctgaaagtggccggctttaacctgctgatgaccctgcggctgtggtccagccgcgccaagagaagcggatctggcgtgaagcagaccctgaatttcgacctgctgaagctggctggcgacgtggaatccaacccaggcccttctagaggccatatgaccgagtacaagcccacggtgcgcctcgccacccgcgacgacgtccccagggccgtacgcaccctcgccgccgcgttcgccgactaccccgccacgcgccacaccgtcgatccggaccgccacatcgagcgggtcaccgagctgcaagaactcttcctcacgcgcgtcgggctcgacatcggcaaggtgtgggtcgcggacgacggcgccgcggtggcggtctggaccacgccggagagcgtcgaagcgggggcggtgttcgccgagatcggcccgcgcatggccgagttgagcggttcccggctggccgcgcagcaacagatggaaggcctcctggcgccgcaccggcccaaggagcccgcgtggttcctggccaccgtcggcgtctcgcccgaccaccagggcaagggtctgggcagcgccgtcgtgctccccggagtggaggcggccgagcgcgccggggtgcccgccttcctggagacctccgcgccccgcaacctccccttctacgagcggctcggcttcaccgtcaccgccgacgtcgaggtgcccgaaggaccgcgcacctggtgcatgacccgcaagcccggtgcctga

SEQ ID NO: 5609 - DNA, 3801 bp, Artificial Sequence
  Synthetic Polynucloetide
atggccttaccagtgaccgccttgctcctgccgctggccttgctgctccacgccgccaggccggaggttcagctgcttgagtctggcggaggactggttcaacctggcggaagcctgagactgtcttgtgccgccagcggcttcacctttagcagctacgccatgagctgggtccgacaggctcctggcaaaggactggaatgggtgtccagcatcagcggcagcggcgactacatctactacgccgatagcgtgaagggcagattcaccatcagccgggacatcagcaagaacaccctgtacctccagatgaacagcctgagagccgaggacaccgccgtgtactactgtgccaaagaaggcaccggcgctaacagcagcctggccgattatagaggccagggcacactggtcaccgtgtctagtggcggaggaagcggcggaggatctgaagtgcaactggtggaatctggagggggaagcgtgcaggcaggcggatctctgagactgtcctgcaccacatctggcagagccctgaatatgtacgtgatgggatggtttcggcaggctcccggcaacgagcgggaatttgtggccgctacaagcagcagcggcggcagcacaagctaccccgattctgtgaagggcagattcacaatctcccgcgataatgccaagaatactgtgtacctgcagatgaatagtctgaagcctgaagatacagccgcctacagatgtgccgccagcccctacgtgtccacccccaccatgaacatcctggaagagtacagatactggggcctgggaacacaagtgacagtgtccagcggtaccggcggaggcggatctggcggcggaggtagcggtggcggaggatctgaattcgacatccagatgacacagagccctagcagcctgtctgccagcgtgggagacagagtgaccatcacatgcaaggccagcgaccacatcaacaactggctggcctggtatcagcagaagcctggacaggcccctaagctgctgatctacggcgctaccacactggaaacaggcgtgcccagcagattttctggcagcggctctggcaccgactacaccctgacaatatccagcctccagcctgaggacttcgccacctactactgtcagcagagctggaacaccccttggacattcggccagggcaccaagctggaaatcaagagactcgaggacctgaagaacgtgttcccacctgaggtggccgtgttcgagcctagcgaggccgagatcagccacacccagaaagccaccctcgtgtgcctggctaccggcttctaccccgaccatgtggaactgtcttggtgggtcaacggcaaagaggtgcacagcggcgtgtgtaccgacccccagccactgaaagaacagcccgccctgaacgacagccggtactgcctgagcagcagactgagagtgtccgccaccttctggcagaacccccggaaccacttcagatgccaggtgcagttctacggcctgagcgagaacgacgagtggacccaggacagagccaagcccgtgacccagatcgtgtctgccgaagcctggggcagagccgattgcggctttaccagcgagagctaccagcagggcgtgctgagcgccaccatcctgtacgagatcctgctgggcaaggccaccctgtacgccgtgctggtgtctgccctggtgctgatggctatggtcaagcggaaggacagccggggaagggccaagcgatctggatctggagcaacaaacttctcactactcaaacaagcaggtgacgtggaggagaatcccgggcctactagtatggactggatttggcgcatccttttccttgtcggcgctgctaccggcgcccattccgggccccaggttcagctgcaagagtctggcggaggacttgctcaagctggcggaagcctgagactgtcttgtgccgcctctggcagaaccttcagcatgggctggtttagacaggcccctggcaaagagagagagttcgtcgccgccatcacatacagcggcggcagcccttactacgcctcttctgtcagaggccggttcaccatcagccgggacaacgccaagaacaccgtgtacctccagatgaacagcctgaagccagaggacaccgccgtgtactactgtgccgccaatccaacctacggcagcgactggaatgccgagaattggggccagggcacccaagtgacagtgtctagtggatccggcggcggaggatctggcggaggcggatctgggggcggaggctctttcgaacaagttcagcttcaacagcctggcgctgagctggtcaaacctggcgcttctgtgaagatgagctgcaaagccagcggctacgccttcagcagctactggatcaactggatgaagcagaaacccggccagggactcgaatggatcggccaaatctatcccggcgacggcgacaccaactacaacggcaagttcaagggcagagccacactgaccgccgatacctctagcagcacagcctacatgcagctgagcagcctgaccagcgaagatagcgccgtgtacttctgtgcccggtccatcacaacagtcgtgggctgcgctatggactattggggccagggaacaagcgtgaccgtgtctagtacgcgtatccagaaccctgatcctgccgtgtaccagctgcgggatagcaagagcagcgacaagagcgtgtgtctgttcaccgacttcgacagccagaccaacgtgtcccagagcaaggactccgacgtgtacatcaccgataagtgcgtgctggacatgcggagcatggacttcaagagcaactccgccgtggcctggtccaacaagtccgatttcgcctgcgccaacgccttcaacaacagcattatccccgaggacacattcttcccaagccccgagagcagctgcgacgtgaagctggtggaaaagagcttcgagacagacaccaacctgaacttccagaacctgagcgtgatcggcttcagaatcctgctgctgaaagtggccggctttaacctgctgatgaccctgcggctgtggtccagccgcgccaagagaagcggatctggcgtgaagcagaccctgaatttcgacctgctgaagctggctggcgacgtggaatccaacccaggcccttctagaggccatatgaccgagtacaagcccacggtgcgcctcgccacccgcgacgacgtccccagggccgtacgcaccctcgccgccgcgttcgccgactaccccgccacgcgccacaccgtcgatccggaccgccacatcgagcgggtcaccgagctgcaagaactcttcctcacgcgcgtcgggctcgacatcggcaaggtgtgggtcgcggacgacggcgccgcggtggcggtctggaccacgccggagagcgtcgaagcgggggcggtgttcgccgagatcggcccgcgcatggccgagttgagcggttcccggctggccgcgcagcaacagatggaaggcctcctggcgccgcaccggcccaaggagcccgcgtggttcctggccaccgtcggcgtctcgcccgaccaccagggcaagggtctgggcagcgccgtcgtgctccccggagtggaggcggccgagcgcgccggggtgcccgccttcctggagacctccgcgccccgcaacctccccttctacgagcggctcggcttcaccgtcaccgccgacgtcgaggtgcccgaaggaccgcgcacctggtgcatgacccgcaagcccggtgcctga

SEQ ID NO: 5610 - DNA, 3099 bp, Artificial Sequence
  Synthetic Polynucloetide
atggccttaccagtgaccgccttgctcctgccgctggccttgctgctccacgccgccaggccggaggttcagctgcttgagtctggcggaggactggttcaacctggcggaagcctgagactgtcttgtgccgccagcggcttcacctttagcagctacgccatgagctgggtccgacaggctcctggcaaaggactggaatgggtgtccagcatcagcggcagcggcgactacatctactacgccgatagcgtgaagggcagattcaccatcagccgggacatcagcaagaacaccctgtacctccagatgaacagcctgagagccgaggacaccgccgtgtactactgtgccaaagaaggcaccggcgctaacagcagcctggccgattatagaggccagggcacactggtcaccgtgtctagtggcggaggaagcggcggaggatctgaagtgcaactggtggaatctggagggggaagcgtgcaggcaggcggatctctgagactgtcctgcaccacatctggcagagccctgaatatgtacgtgatgggatggtttcggcaggctcccggcaacgagcgggaatttgtggccgctacaagcagcagcggcggcagcacaagctaccccgattctgtgaagggcagattcacaatctcccgcgataatgccaagaatactgtgtacctgcagatgaatagtctgaagcctgaagatacagccgcctacagatgtgccgccagcccctacgtgtccacccccaccatgaacatcctggaagagtacagatactggggcctgggaacacaagtgacagtgtccagcggtaccggcggaggcggatctggcggcggaggtagcggtggcggaggatctgaattcgacatccagatgacacagagccctagcagcctgtctgccagcgtgggagacagagtgaccatcacatgcaaggccagcgaccacatcaacaactggctggcctggtatcagcagaagcctggacaggcccctaagctgctgatctacggcgctaccacactggaaacaggcgtgcccagcagattttctggcagcggctctggcaccgactacaccctgacaatatccagcctccagcctgaggacttcgccacctactactgtcagcagagctggaacaccccttggacattcggccagggcaccaagctggaaatcaagagactcgaggacctgaagaacgtgttcccacctgaggtggccgtgttcgagcctagcgaggccgagatcagccacacccagaaagccaccctcgtgtgcctggctaccggcttctaccccgaccatgtggaactgtcttggtgggtcaacggcaaagaggtgcacagcggcgtgtgtaccgacccccagccactgaaagaacagcccgccctgaacgacagccggtactgcctgagcagcagactgagagtgtccgccaccttctggcagaacccccggaaccacttcagatgccaggtgcagttctacggcctgagcgagaacgacgagtggacccaggacagagccaagcccgtgacccagatcgtgtctgccgaagcctggggcagagccgattgcggctttaccagcgagagctaccagcagggcgtgctgagcgccaccatcctgtacgagatcctgctgggcaaggccaccctgtacgccgtgctggtgtctgccctggtgctgatggctatggtcaagcggaaggacagccggggaagggccaagcgatctggatctggagcaacaaacttctcactactcaaacaagcaggtgacgtggaggagaatcccgggcctactagtatggactggatttggcgcatccttttccttgtcggcgctgctaccggcgcccattccgggccccaggttcagctgcaagagtctggcggaggacttgctcaagctggcggaagcctgagactgtcttgtgccgcctctggcagaaccttcagcatgggctggtttagacaggcccctggcaaagagagagagttcgtcgccgccatcacatacagcggcggcagcccttactacgcctcttctgtcagaggccggttcaccatcagccgggacaacgccaagaacaccgtgtacctccagatgaacagcctgaagccagaggacaccgccgtgtactactgtgccgccaatccaacctacggcagcgactggaatgccgagaattggggccagggcacccaagtgacagtgtctagtggatccggcggcggaggatctggcggaggcggatctgggggcggaggctctttcgaacaagttcagcttcaacagcctggcgctgagctggtcaaacctggcgcttctgtgaagatgagctgcaaagccagcggctacgccttcagcagctactggatcaactggatgaagcagaaacccggccagggactcgaatggatcggccaaatctatcccggcgacggcgacaccaactacaacggcaagttcaagggcagagccacactgaccgccgatacctctagcagcacagcctacatgcagctgagcagcctgaccagcgaagatagcgccgtgtacttctgtgcccggtccatcacaacagtcgtgggctgcgctatggactattggggccagggaacaagcgtgaccgtgtctagtacgcgtatccagaaccctgatcctgccgtgtaccagctgcgggatagcaagagcagcgacaagagcgtgtgtctgttcaccgacttcgacagccagaccaacgtgtcccagagcaaggactccgacgtgtacatcaccgataagtgcgtgctggacatgcggagcatggacttcaagagcaactccgccgtggcctggtccaacaagtccgatttcgcctgcgccaacgccttcaacaacagcattatccccgaggacacattcttcccaagccccgagagcagctgcgacgtgaagctggtggaaaagagcttcgagacagacaccaacctgaacttccagaacctgagcgtgatcggcttcagaatcctgctgctgaaagtggccggctttaacctgctgatgaccctgcggctgtggtccagc

SEQ ID NO: 5611 - DNA, 3774 bp, Artificial Sequence
  Synthetic Polynucloetide
atggccttaccagtgaccgccttgctcctgccgctggccttgctgctccacgccgccaggccggaggttcagctgcttgagtctggcggaggactggttcaacctggcggaagcctgagactgtcttgtgccgccagcggcttcacctttagcagctacgccatgagctgggtccgacaggctcctggcaaaggactggaatgggtgtccagcatcagcggcagcggcgactacatctactacgccgatagcgtgaagggcagattcaccatcagccgggacatcagcaagaacaccctgtacctccagatgaacagcctgagagccgaggacaccgccgtgtactactgtgccaaagaaggcaccggcgctaacagcagcctggccgattatagaggccagggcacactggtcaccgtgtctagtggcggaggaagcggcggaggatctgaagtgcaactggtggaatctggagggggaagcgtgcaggcaggcggatctctgagactgtcctgcaccacatctggcagagccctgaatatgtacgtgatgggatggtttcggcaggctcccggcaacgagcgggaatttgtggccgctacaagcagcagcggcggcagcacaagctaccccgattctgtgaagggcagattcacaatctcccgcgataatgccaagaatactgtgtacctgcagatgaatagtctgaagcctgaagatacagccgcctacagatgtgccgccagcccctacgtgtccacccccaccatgaacatcctggaagagtacagatactggggcctgggaacacaagtgacagtgtccagcggtaccggcggaggcggatctggcggcggaggtagcggtggcggaggatctgaattcgacatccagatgacacagagccctagcagcctgtctgccagcgtgggagacagagtgaccatcacatgcaaggccagcgaccacatcaacaactggctggcctggtatcagcagaagcctggacaggcccctaagctgctgatctacggcgctaccacactggaaacaggcgtgcccagcagattttctggcagcggctctggcaccgactacaccctgacaatatccagcctccagcctgaggacttcgccacctactactgtcagcagagctggaacaccccttggacattcggccagggcaccaagctggaaatcaagagactcgaggacctgaagaacgtgttcccacctgaggtggccgtgttcgagcctagcgaggccgagatcagccacacccagaaagccaccctcgtgtgcctggctaccggcttctaccccgaccatgtggaactgtcttggtgggtcaacggcaaagaggtgcacagcggcgtgtgtaccgacccccagccactgaaagaacagcccgccctgaacgacagccggtactgcctgagcagcagactgagagtgtccgccaccttctggcagaacccccggaaccacttcagatgccaggtgcagttctacggcctgagcgagaacgacgagtggacccaggacagagccaagcccgtgacccagatcgtgtctgccgaagcctggggcagagccgattgcggctttaccagcgagagctaccagcagggcgtgctgagcgccaccatcctgtacgagatcctgctgggcaaggccaccctgtacgccgtgctggtgtctgccctggtgctgatggctatggtcaagcggaaggacagccggggaagggccaagcgatctggatctggagcaacaaacttctcactactcaaacaagcaggtgacgtggaggagaatcccgggcctactagtatggactggatttggcgcatccttttccttgtcggcgctgctaccggcgcccattccgggccccaggttcagctgcaagagtctggcggaggacttgctcaagctggcggaagcctgagactgtcttgtgccgcctctggcagaaccttcagcatgggctggtttagacaggcccctggcaaagagagagagttcgtcgccgccatcacatacagcggcggcagcccttactacgcctcttctgtcagaggccggttcaccatcagccgggacaacgccaagaacaccgtgtacctccagatgaacagcctgaagccagaggacaccgccgtgtactactgtgccgccaatccaacctacggcagcgactggaatgccgagaattggggccagggcacccaagtgacagtgtctagtggatccggcggcggaggatctggcggaggcggatctgggggcggaggctctttcgaacaagttcagcttcaacagcctggcgctgagctggtcaaacctggcgcttctgtgaagatgagctgcaaagccagcggctacgccttcagcagctactggatcaactggatgaagcagaaacccggccagggactcgaatggatcggccaaatctatcccggcgacggcgacaccaactacaacggcaagttcaagggcagagccacactgaccgccgatacctctagcagcacagcctacatgcagctgagcagcctgaccagcgaagatagcgccgtgtacttctgtgcccggtccatcacaacagtcgtgggctgcgctatggactattggggccagggaacaagcgtgaccgtgtctagtacgcgtatccagaaccctgatcctgccgtgtaccagctgcgggatagcaagagcagcgacaagagcgtgtgtctgttcaccgacttcgacagccagaccaacgtgtcccagagcaaggactccgacgtgtacatcaccgataagtgcgtgctggacatgcggagcatggacttcaagagcaactccgccgtggcctggtccaacaagtccgatttcgcctgcgccaacgccttcaacaacagcattatccccgaggacacattcttcccaagccccgagagcagctgcgacgtgaagctggtggaaaagagcttcgagacagacaccaacctgaacttccagaacctgagcgtgatcggcttcagaatcctgctgctgaaagtggccggctttaacctgctgatgaccctgcggctgtggtccagccgcgccaagagaagcggatctggcgtgaagcagaccctgaatttcgacctgctgaagctggctggcgacgtggaatccaacccaggcccttctagaggcgggatccacaccatggctacctacgaggtgctgtgcgaggtggcaagaaagctgggcaccgacgacagagaagtggtgctgttcctgctgaacgtgttcatccctcagcctacactggcccagctgatcggtgcactgagagccctgaaagaggaaggccggctgacctttcctctgctggccgaatgcctgttcagagccggaagaagggatctgctgcgggacctgctgcatctggaccccagatttctggaaagacacctggccggcaccatgagctacttcagcccttaccagctgaccgtgctgcacgttgacggcgaactgtgcgccagagatattcggagcctgatcttcctgagcaaggacaccatcggcagccggtctacccctcagacatttctgcactgggtgtactgcatggaaaacctggacctgctcggccccacagatgtggatgccctgatgtccatgctgagaagcctgagcagagtggacctccagagacaggtgcagacactgatgggactgcacctgagcggacctagccacagccagcactacagacacacccct

SEQ ID NO: 5612 - DNA, 3111 bp, Artificial Sequence
  Synthetic Polynucloetide
atggccttaccagtgaccgccttgctcctgccgctggccttgctgctccacgccgccaggccggaggttcagctgcttgagtctggcggaggactggttcaacctggcggaagcctgagactgtcttgtgccgccagcggcttcacctttagcagctacgccatgagctgggtccgacaggctcctggcaaaggactggaatgggtgtccagcatcagcggcagcggcgactacatctactacgccgatagcgtgaagggcagattcaccatcagccgggacatcagcaagaacaccctgtacctccagatgaacagcctgagagccgaggacaccgccgtgtactactgtgccaaagaaggcaccggcgctaacagcagcctggccgattatagaggccagggcacactggtcaccgtgtctagtggcggaggaagcggcggaggatctgaagtgcaactggtggaatctggagggggaagcgtgcaggcaggcggatctctgagactgtcctgcaccacatctggcagagccctgaatatgtacgtgatgggatggtttcggcaggctcccggcaacgagcgggaatttgtggccgctacaagcagcagcggcggcagcacaagctaccccgattctgtgaagggcagattcacaatctcccgcgataatgccaagaatactgtgtacctgcagatgaatagtctgaagcctgaagatacagccgcctacagatgtgccgccagcccctacgtgtccacccccaccatgaacatcctggaagagtacagatactggggcctgggaacacaagtgacagtgtccagcggtaccggcggaggcggatctggcggcggaggtagcggtggcggaggatctgaattcgacatccagatgacacagagccctagcagcctgtctgccagcgtgggagacagagtgaccatcacatgcaaggccagcgaccacatcaacaactggctggcctggtatcagcagaagcctggacaggcccctaagctgctgatctacggcgctaccacactggaaacaggcgtgcccagcagattttctggcagcggctctggcaccgactacaccctgacaatatccagcctccagcctgaggacttcgccacctactactgtcagcagagctggaacaccccttggacattcggccagggcaccaagctggaaatcaagagactcgagatccagaaccctgatcctgccgtgtaccagctgcgggatagcaagagcagcgacaagagcgtgtgtctgttcaccgacttcgacagccagaccaacgtgtcccagagcaaggactccgacgtgtacatcaccgataagtgcgtgctggacatgcggagcatggacttcaagagcaactccgccgtggcctggtccaacaagtccgatttcgcctgcgccaacgccttcaacaacagcattatccccgaggacacattcttcccaagccccgagagcagctgcgacgtgaagctggtggaaaagagcttcgagacagacaccaacctgaacttccagaacctgagcgtgatcggcttcagaatcctgctgctgaaagtggccggctttaacctgctgatgaccctgcggctgtggtccagccgcgccaagagaagcggatctggcgtgaagcagaccctgaatttcgacctgctgaagctggctggcgacgtggaatccaacccaggccctactagtatggactggatttggcgcatccttttccttgtcggcgctgctaccggcgcccattccgggccccaggttcagctgcaagagtctggcggaggacttgctcaagctggcggaagcctgagactgtcttgtgccgcctctggcagaaccttcagcatgggctggtttagacaggcccctggcaaagagagagagttcgtcgccgccatcacatacagcggcggcagcccttactacgcctcttctgtcagaggccggttcaccatcagccgggacaacgccaagaacaccgtgtacctccagatgaacagcctgaagccagaggacaccgccgtgtactactgtgccgccaatccaacctacggcagcgactggaatgccgagaattggggccagggcacccaagtgacagtgtctagtggatccggcggcggaggatctggcggaggcggatctgggggcggaggctctttcgaacaagttcagcttcaacagcctggcgctgagctggtcaaacctggcgcttctgtgaagatgagctgcaaagccagcggctacgccttcagcagctactggatcaactggatgaagcagaaacccggccagggactcgaatggatcggccaaatctatcccggcgacggcgacaccaactacaacggcaagttcaagggcagagccacactgaccgccgatacctctagcagcacagcctacatgcagctgagcagcctgaccagcgaagatagcgccgtgtacttctgtgcccggtccatcacaacagtcgtgggctgcgctatggactattggggccagggaacaagcgtgaccgtgtctagtacgcgtgaggacctgaagaacgtgttcccacctgaggtggccgtgttcgagcctagcgaggccgagatcagccacacccagaaagccaccctcgtgtgcctggctaccggcttctaccccgaccatgtggaactgtcttggtgggtcaacggcaaagaggtgcacagcggcgtgtgtaccgacccccagccactgaaagaacagcccgccctgaacgacagccggtactgcctgagcagcagactgagagtgtccgccaccttctggcagaacccccggaaccacttcagatgccaggtgcagttctacggcctgagcgagaacgacgagtggacccaggacagagccaagcccgtgacccagatcgtgtctgccgaagcctggggcagagccgattgcggctttaccagcgagagctaccagcagggcgtgctgagcgccaccatcctgtacgagatcctgctgggcaaggccaccctgtacgccgtgctggtgtctgccctggtgctgatggctatggtcaagcggaaggacagccgggga

SEQ ID NO: 5613 - DNA, 3777 bp, Artificial Sequence
  Synthetic Polynucloetide
atggccttaccagtgaccgccttgctcctgccgctggccttgctgctccacgccgccaggccggaggttcagctgcttgagtctggcggaggactggttcaacctggcggaagcctgagactgtcttgtgccgccagcggcttcacctttagcagctacgccatgagctgggtccgacaggctcctggcaaaggactggaatgggtgtccagcatcagcggcagcggcgactacatctactacgccgatagcgtgaagggcagattcaccatcagccgggacatcagcaagaacaccctgtacctccagatgaacagcctgagagccgaggacaccgccgtgtactactgtgccaaagaaggcaccggcgctaacagcagcctggccgattatagaggccagggcacactggtcaccgtgtctagtggcggaggaagcggcggaggatctgaagtgcaactggtggaatctggagggggaagcgtgcaggcaggcggatctctgagactgtcctgcaccacatctggcagagccctgaatatgtacgtgatgggatggtttcggcaggctcccggcaacgagcgggaatttgtggccgctacaagcagcagcggcggcagcacaagctaccccgattctgtgaagggcagattcacaatctcccgcgataatgccaagaatactgtgtacctgcagatgaatagtctgaagcctgaagatacagccgcctacagatgtgccgccagcccctacgtgtccacccccaccatgaacatcctggaagagtacagatactggggcctgggaacacaagtgacagtgtccagcggtaccggcggaggcggatctggcggcggaggtagcggtggcggaggatctgaattcgacatccagatgacacagagccctagcagcctgtctgccagcgtgggagacagagtgaccatcacatgcaaggccagcgaccacatcaacaactggctggcctggtatcagcagaagcctggacaggcccctaagctgctgatctacggcgctaccacactggaaacaggcgtgcccagcagattttctggcagcggctctggcaccgactacaccctgacaatatccagcctccagcctgaggacttcgccacctactactgtcagcagagctggaacaccccttggacattcggccagggcaccaagctggaaatcaagagactcgagatccagaaccctgatcctgccgtgtaccagctgcgggatagcaagagcagcgacaagagcgtgtgtctgttcaccgacttcgacagccagaccaacgtgtcccagagcaaggactccgacgtgtacatcaccgataagtgcgtgctggacatgcggagcatggacttcaagagcaactccgccgtggcctggtccaacaagtccgatttcgcctgcgccaacgccttcaacaacagcattatccccgaggacacattcttcccaagccccgagagcagctgcgacgtgaagctggtggaaaagagcttcgagacagacaccaacctgaacttccagaacctgagcgtgatcggcttcagaatcctgctgctgaaagtggccggctttaacctgctgatgaccctgcggctgtggtccagccgcgccaagagaagcggatctggcgtgaagcagaccctgaatttcgacctgctgaagctggctggcgacgtggaatccaacccaggccctactagtatggactggatttggcgcatccttttccttgtcggcgctgctaccggcgcccattccgggccccaggttcagctgcaagagtctggcggaggacttgctcaagctggcggaagcctgagactgtcttgtgccgcctctggcagaaccttcagcatgggctggtttagacaggcccctggcaaagagagagagttcgtcgccgccatcacatacagcggcggcagcccttactacgcctcttctgtcagaggccggttcaccatcagccgggacaacgccaagaacaccgtgtacctccagatgaacagcctgaagccagaggacaccgccgtgtactactgtgccgccaatccaacctacggcagcgactggaatgccgagaattggggccagggcacccaagtgacagtgtctagtggatccggcggcggaggatctggcggaggcggatctgggggcggaggctctttcgaacaagttcagcttcaacagcctggcgctgagctggtcaaacctggcgcttctgtgaagatgagctgcaaagccagcggctacgccttcagcagctactggatcaactggatgaagcagaaacccggccagggactcgaatggatcggccaaatctatcccggcgacggcgacaccaactacaacggcaagttcaagggcagagccacactgaccgccgatacctctagcagcacagcctacatgcagctgagcagcctgaccagcgaagatagcgccgtgtacttctgtgcccggtccatcacaacagtcgtgggctgcgctatggactattggggccagggaacaagcgtgaccgtgtctagtacgcgtgaggacctgaagaacgtgttcccacctgaggtggccgtgttcgagcctagcgaggccgagatcagccacacccagaaagccaccctcgtgtgcctggctaccggcttctaccccgaccatgtggaactgtcttggtgggtcaacggcaaagaggtgcacagcggcgtgtgtaccgacccccagccactgaaagaacagcccgccctgaacgacagccggtactgcctgagcagcagactgagagtgtccgccaccttctggcagaacccccggaaccacttcagatgccaggtgcagttctacggcctgagcgagaacgacgagtggacccaggacagagccaagcccgtgacccagatcgtgtctgccgaagcctggggcagagccgattgcggctttaccagcgagagctaccagcagggcgtgctgagcgccaccatcctgtacgagatcctgctgggcaaggccaccctgtacgccgtgctggtgtctgccctggtgctgatggctatggtcaagcggaaggacagccggggaagggccaagcgatctggatctggagcaacaaacttctcactactcaaacaagcaggtgacgtggaggagaatcccgggccttctagaggcgggatccacaccatggctacctacgaggtgctgtgcgaggtggcaagaaagctgggcaccgacgacagagaagtggtgctgttcctgctgaacgtgttcatccctcagcctacactggcccagctgatcggtgcactgagagccctgaaagaggaaggccggctgacctttcctctgctggccgaatgcctgttcagagccggaagaagggatctgctgcgggacctgctgcatctggaccccagatttctggaaagacacctggccggcaccatgagctacttcagcccttaccagctgaccgtgctgcacgttgacggcgaactgtgcgccagagatattcggagcctgatcttcctgagcaaggacaccatcggcagccggtctacccctcagacatttctgcactgggtgtactgcatggaaaacctggacctgctcggccccacagatgtggatgccctgatgtccatgctgagaagcctgagcagagtggacctccagagacaggtgcagacactgatgggactgcacctgagcggacctagccacagccagcactacagacacacccct

SEQ ID NO: 5614 - DNA, 3801 bp, Artificial Sequence
  Synthetic Polynucloetide
atggccttaccagtgaccgccttgctcctgccgctggccttgctgctccacgccgccaggccggaggttcagctgcttgagtctggcggaggactggttcaacctggcggaagcctgagactgtcttgtgccgccagcggcttcacctttagcagctacgccatgagctgggtccgacaggctcctggcaaaggactggaatgggtgtccagcatcagcggcagcggcgactacatctactacgccgatagcgtgaagggcagattcaccatcagccgggacatcagcaagaacaccctgtacctccagatgaacagcctgagagccgaggacaccgccgtgtactactgtgccaaagaaggcaccggcgctaacagcagcctggccgattatagaggccagggcacactggtcaccgtgtctagtggcggaggaagcggcggaggatctgaagtgcaactggtggaatctggagggggaagcgtgcaggcaggcggatctctgagactgtcctgcaccacatctggcagagccctgaatatgtacgtgatgggatggtttcggcaggctcccggcaacgagcgggaatttgtggccgctacaagcagcagcggcggcagcacaagctaccccgattctgtgaagggcagattcacaatctcccgcgataatgccaagaatactgtgtacctgcagatgaatagtctgaagcctgaagatacagccgcctacagatgtgccgccagcccctacgtgtccacccccaccatgaacatcctggaagagtacagatactggggcctgggaacacaagtgacagtgtccagcggtaccggcggaggcggatctggcggcggaggtagcggtggcggaggatctgaattcgacatccagatgacacagagccctagcagcctgtctgccagcgtgggagacagagtgaccatcacatgcaaggccagcgaccacatcaacaactggctggcctggtatcagcagaagcctggacaggcccctaagctgctgatctacggcgctaccacactggaaacaggcgtgcccagcagattttctggcagcggctctggcaccgactacaccctgacaatatccagcctccagcctgaggacttcgccacctactactgtcagcagagctggaacaccccttggacattcggccagggcaccaagctggaaatcaagagactcgaggacctgaagaacgtgttcccacctgaggtggccgtgttcgagcctagcgaggccgagatcagccacacccagaaagccaccctcgtgtgcctggctaccggcttctaccccgaccatgtggaactgtcttggtgggtcaacggcaaagaggtgcacagcggcgtgtctaccgacccccagccactgaaagaacagcccgccctgaacgacagccggtactgcctgagcagcagactgagagtgtccgccaccttctggcagaacccccggaaccacttcagatgccaggtgcagttctacggcctgagcgagaacgacgagtggacccaggacagagccaagcccgtgacccagatcgtgtctgccgaagcctggggcagagccgattgcggctttaccagcgagagctaccagcagggcgtgctgagcgccaccatcctgtacgagatcctgctgggcaaggccaccctgtacgccgtgctggtgtctgccctggtgctgatggctatggtcaagcggaaggacagccggggaagggccaagcgatctggatctggagcaacaaacttctcactactcaaacaagcaggtgacgtggaggagaatcccgggcctactagtatggactggatttggcgcatccttttccttgtcggcgctgctaccggcgcccattccgggccccaggttcagctgcaagagtctggcggaggacttgctcaagctggcggaagcctgagactgtcttgtgccgcctctggcagaaccttcagcatgggctggtttagacaggcccctggcaaagagagagagttcgtcgccgccatcacatacagcggcggcagcccttactacgcctcttctgtcagaggccggttcaccatcagccgggacaacgccaagaacaccgtgtacctccagatgaacagcctgaagccagaggacaccgccgtgtactactgtgccgccaatccaacctacggcagcgactggaatgccgagaattggggccagggcacccaagtgacagtgtctagtggatccggcggcggaggatctggcggaggcggatctgggggcggaggctctttcgaacaagttcagcttcaacagcctggcgctgagctggtcaaacctggcgcttctgtgaagatgagctgcaaagccagcggctacgccttcagcagctactggatcaactggatgaagcagaaacccggccagggactcgaatggatcggccaaatctatcccggcgacggcgacaccaactacaacggcaagttcaagggcagagccacactgaccgccgatacctctagcagcacagcctacatgcagctgagcagcctgaccagcgaagatagcgccgtgtacttctgtgcccggtccatcacaacagtcgtgggctgcgctatggactattggggccagggaacaagcgtgaccgtgtctagtacgcgtatccagaaccctgatcctgccgtgtaccagctgcgggatagcaagagcagcgacaagagcgtgtgtctgttcaccgacttcgacagccagaccaacgtgtcccagagcaaggactccgacgtgtacatcaccgataagaccgtgctggacatgcggagcatggacttcaagagcaactccgccgtggcctggtccaacaagtccgatttcgcctgcgccaacgccttcaacaacagcattatccccgaggacacattcttcccaagccccgagagcagctgcgacgtgaagctggtggaaaagagcttcgagacagacaccaacctgaacttccagaacctgagcgtgatcggcttcagaatcctgctgctgaaagtggccggctttaacctgctgatgaccctgcggctgtggtccagccgcgccaagagaagcggatctggcgtgaagcagaccctgaatttcgacctgctgaagctggctggcgacgtggaatccaacccaggcccttctagaggccatatgaccgagtacaagcccacggtgcgcctcgccacccgcgacgacgtccccagggccgtacgcaccctcgccgccgcgttcgccgactaccccgccacgcgccacaccgtcgatccggaccgccacatcgagcgggtcaccgagctgcaagaactcttcctcacgcgcgtcgggctcgacatcggcaaggtgtgggtcgcggacgacggcgccgcggtggcggtctggaccacgccggagagcgtcgaagcgggggcggtgttcgccgagatcggcccgcgcatggccgagttgagcggttcccggctggccgcgcagcaacagatggaaggcctcctggcgccgcaccggcccaaggagcccgcgtggttcctggccaccgtcggcgtctcgcccgaccaccagggcaagggtctgggcagcgccgtcgtgctccccggagtggaggcggccgagcgcgccggggtgcccgccttcctggagacctccgcgccccgcaacctccccttctacgagcggctcggcttcaccgtcaccgccgacgtcgaggtgcccgaaggaccgcgcacctggtgcatgacccgcaagcccggtgcctga

SEQ ID NO: 5615 - DNA, 4047 bp, Artificial Sequence
  Synthetic Polynucloetide
atggccttaccagtgaccgccttgctcctgccgctggccttgctgctccacgccgccaggccggaggttcagctgcttgagtctggcggaggactggttcaacctggcggaagcctgagactgtcttgtgccgccagcggcttcacctttagcagctacgccatgagctgggtccgacaggctcctggcaaaggactggaatgggtgtccagcatcagcggcagcggcgactacatctactacgccgatagcgtgaagggcagattcaccatcagccgggacatcagcaagaacaccctgtacctccagatgaacagcctgagagccgaggacaccgccgtgtactactgtgccaaagaaggcaccggcgctaacagcagcctggccgattatagaggccagggcacactggtcaccgtgtctagtggcggaggaagcggcggaggatctgaagtgcaactggtggaatctggagggggaagcgtgcaggcaggcggatctctgagactgtcctgcaccacatctggcagagccctgaatatgtacgtgatgggatggtttcggcaggctcccggcaacgagcgggaatttgtggccgctacaagcagcagcggcggcagcacaagctaccccgattctgtgaagggcagattcacaatctcccgcgataatgccaagaatactgtgtacctgcagatgaatagtctgaagcctgaagatacagccgcctacagatgtgccgccagcccctacgtgtccacccccaccatgaacatcctggaagagtacagatactggggcctgggaacacaagtgacagtgtccagcggtaccggcggaggcggatctggcggcggaggtagcggtggcggaggatctgaattcgacatccagatgacacagagccctagcagcctgtctgccagcgtgggagacagagtgaccatcacatgcaaggccagcgaccacatcaacaactggctggcctggtatcagcagaagcctggacaggcccctaagctgctgatctacggcgctaccacactggaaacaggcgtgcccagcagattttctggcagcggctctggcaccgactacaccctgacaatatccagcctccagcctgaggacttcgccacctactactgtcagcagagctggaacaccccttggacattcggccagggcaccaagctggaaatcaagagactcgaggacctgaagaacgtgttcccacctgaggtggccgtgttcgagcctagcgaggccgagatcagccacacccagaaagccaccctcgtgtgcctggctaccggcttctaccccgaccatgtggaactgtcttggtgggtcaacggcaaagaggtgcacagcggcgtgtctaccgacccccagccactgaaagaacagcccgccctgaacgacagccggtactgcctgagcagcagactgagagtgtccgccaccttctggcagaacccccggaaccacttcagatgccaggtgcagttctacggcctgagcgagaacgacgagtggacccaggacagagccaagcccgtgacccagatcgtgtctgccgaagcctggggcagagccgattgcggctttaccagcgagagctaccagcagggcgtgctgagcgccaccatcctgtacgagatcctgctgggcaaggccaccctgtacgccgtgctggtgtctgccctggtgctgatggctatggtcaagcggaaggacagccggggaagggccaagcgatctggatctggagcaacaaacttctcactactcaaacaagcaggtgacgtggaggagaatcccgggcctactagtatggactggatttggcgcatccttttccttgtcggcgctgctaccggcgcccattccgggccccaggttcagctgcaagagtctggcggaggacttgctcaagctggcggaagcctgagactgtcttgtgccgcctctggcagaaccttcagcatgggctggtttagacaggcccctggcaaagagagagagttcgtcgccgccatcacatacagcggcggcagcccttactacgcctcttctgtcagaggccggttcaccatcagccgggacaacgccaagaacaccgtgtacctccagatgaacagcctgaagccagaggacaccgccgtgtactactgtgccgccaatccaacctacggcagcgactggaatgccgagaattggggccagggcacccaagtgacagtgtctagtggatccggcggcggaggatctggcggaggcggatctgggggcggaggctctttcgaacaagttcagcttcaacagcctggcgctgagctggtcaaacctggcgcttctgtgaagatgagctgcaaagccagcggctacgccttcagcagctactggatcaactggatgaagcagaaacccggccagggactcgaatggatcggccaaatctatcccggcgacggcgacaccaactacaacggcaagttcaagggcagagccacactgaccgccgatacctctagcagcacagcctacatgcagctgagcagcctgaccagcgaagatagcgccgtgtacttctgtgcccggtccatcacaacagtcgtgggctgcgctatggactattggggccagggaacaagcgtgaccgtgtctagtacgcgtgagcagaaactgatctcggaagaggatgggagcggcaccccattcccttctctggcccctcccatcatgctgctggtggacggcaagcagcagatggtggtcgtgtgcctggtgctggatgtggccccacctggactggacagccccatctggtttagcgccggcaatggctctgccctggacgcctttacctacggcccaagccctgccaccgatggcacctggacaaatctggcccacctgagcctgcccagcgaggaactggcttcttgggagcctctcgtgtgccacacaggacctggcgctgagggacacagcagatccacccagcctatgcacctgtctggcgaggccagcaccgccagaacctgtcctcaggaacctctgagaggcacccctggcggagcactgtggctgggagtgctgagactgctgctgttcaagctgctgctgtttgacctgctgctgacctgctcctgtctgtgcgatcctgccggccctctgccttctcctgccaccaccacaagactgagagccctgggcagccacagactgcaccctgccacagagacaggcggcagagaggccacaagcagccctagaccccagcccagagacagaagatggggcgataccccccctggcagaaagcctggatctccagtccgcgccaagagaagcggatctggcgtgaagcagaccctgaatttcgacctgctgaagctggctggcgacgtggaatccaacccaggcccttctagaggccatatgaccgagtacaagcccacggtgcgcctcgccacccgcgacgacgtccccagggccgtacgcaccctcgccgccgcgttcgccgactaccccgccacgcgccacaccgtcgatccggaccgccacatcgagcgggtcaccgagctgcaagaactcttcctcacgcgcgtcgggctcgacatcggcaaggtgtgggtcgcggacgacggcgccgcggtggcggtctggaccacgccggagagcgtcgaagcgggggcggtgttcgccgagatcggcccgcgcatggccgagttgagcggttcccggctggccgcgcagcaacagatggaaggcctcctggcgccgcaccggcccaaggagcccgcgtggttcctggccaccgtcggcgtctcgcccgaccaccagggcaagggtctgggcagcgccgtcgtgctccccggagtggaggcggccgagcgcgccggggtgcccgccttcctggagacctccgcgccccgcaacctccccttctacgagcggctcggcttcaccgtcaccgccgacgtcgaggtgcccgaaggaccgcgcacctggtgcatgacccgcaagcccggtgcctga

SEQ ID NO: 5616 - DNA, 3912 bp, Artificial Sequence
  Synthetic Polynucloetide
atggccttaccagtgaccgccttgctcctgccgctggccttgctgctccacgccgccaggccggaggttcagctgcttgagtctggcggaggactggttcaacctggcggaagcctgagactgtcttgtgccgccagcggcttcacctttagcagctacgccatgagctgggtccgacaggctcctggcaaaggactggaatgggtgtccagcatcagcggcagcggcgactacatctactacgccgatagcgtgaagggcagattcaccatcagccgggacatcagcaagaacaccctgtacctccagatgaacagcctgagagccgaggacaccgccgtgtactactgtgccaaagaaggcaccggcgctaacagcagcctggccgattatagaggccagggcacactggtcaccgtgtctagtggcggaggaagcggcggaggatctgaagtgcaactggtggaatctggagggggaagcgtgcaggcaggcggatctctgagactgtcctgcaccacatctggcagagccctgaatatgtacgtgatgggatggtttcggcaggctcccggcaacgagcgggaatttgtggccgctacaagcagcagcggcggcagcacaagctaccccgattctgtgaagggcagattcacaatctcccgcgataatgccaagaatactgtgtacctgcagatgaatagtctgaagcctgaagatacagccgcctacagatgtgccgccagcccctacgtgtccacccccaccatgaacatcctggaagagtacagatactggggcctgggaacacaagtgacagtgtccagcggtaccggcggaggcggatctggcggcggaggtagcggtggcggaggatctgaattcgacatccagatgacacagagccctagcagcctgtctgccagcgtgggagacagagtgaccatcacatgcaaggccagcgaccacatcaacaactggctggcctggtatcagcagaagcctggacaggcccctaagctgctgatctacggcgctaccacactggaaacaggcgtgcccagcagattttctggcagcggctctggcaccgactacaccctgacaatatccagcctccagcctgaggacttcgccacctactactgtcagcagagctggaacaccccttggacattcggccagggcaccaagctggaaatcaagagactcgaggggaaaccaattcccaaccctcttctgggactggattcaaccggcagcggcgacaagcagctggacgccgacgtgtcccccaagcctaccatcttcctgccctctatcgccgagacaaagctccagaaggccggcacctacctgtgcctgctggaaaagttcttcccagatgtgattaagatccactggcaggaaaagaagtccaacaccatcctgggcagccaggaaggcaacaccatgaagaccaacgacacctacatgaagttcagctggctgaccgtgcccgagaagtccctggacaaagaacacagatgcatcgtgcggcacgaaaacaacaagaacggcgtggaccaggaaatcatcttcccacccatcaagaccgatgtgattacaatggaccccaaggacaactgctccaaggacgccaacgataccctgctgctccagctgaccaacaccagcgcctactacatgtacttgttgctgctgctgaagtccgtggtgtacttcgccatcatcacatgctgcctgctgcggagaaccgccttctgctgcaacggcgagaagtctagggccaagcgatctggatctggagcaacaaacttctcactactcaaacaagcaggtgacgtggaggagaatcccgggcctactagtatggactggatttggcgcatccttttccttgtcggcgctgctaccggcgcccattccgggccccaggttcagctgcaagagtctggcggaggacttgctcaagctggcggaagcctgagactgtcttgtgccgcctctggcagaaccttcagcatgggctggtttagacaggcccctggcaaagagagagagttcgtcgccgccatcacatacagcggcggcagcccttactacgcctcttctgtcagaggccggttcaccatcagccgggacaacgccaagaacaccgtgtacctccagatgaacagcctgaagccagaggacaccgccgtgtactactgtgccgccaatccaacctacggcagcgactggaatgccgagaattggggccagggcacccaagtgacagtgtctagtggatccggcggcggaggatctggcggaggcggatctgggggcggaggctctttcgaacaagttcagcttcaacagcctggcgctgagctggtcaaacctggcgcttctgtgaagatgagctgcaaagccagcggctacgccttcagcagctactggatcaactggatgaagcagaaacccggccagggactcgaatggatcggccaaatctatcccggcgacggcgacaccaactacaacggcaagttcaagggcagagccacactgaccgccgatacctctagcagcacagcctacatgcagctgagcagcctgaccagcgaagatagcgccgtgtacttctgtgcccggtccatcacaacagtcgtgggctgcgctatggactattggggccagggaacaagcgtgaccgtgtctagtacgcgtgagcagaaactgatctcggaagaggatgggagcggcagccagcctcacaccaagcccagcgtgttcgtgatgaagaacggcaccaacgtggcctgcctcgtgaaagagttctaccccaaggacatcaggatcaacctggtgtccagcaagaagatcaccgagttcgaccccgccatcgtgatctcccccagcggcaagtacaacgccgtgaagctggggaagtacgaggacagcaacagcgtgacctgctccgtgcagcacgacaacaagaccgtgcacagcaccgactttgaagtgaaaaccgactccaccgaccacgtgaagcccaaagagacagagaacaccaagcagcccagcaagagctgccacaagcccaaggccatcgtgcacaccgagaaagtgaacatgatgagcctgaccgtgctgggcctgcggatgctgttcgccaaaaccgtggccgtgaacttcctgctgaccgccaagctgttcttcctccgcgccaagagaagcggatctggcgtgaagcagaccctgaatttcgacctgctgaagctggctggcgacgtggaatccaacccaggcccttctagaggccatatgaccgagtacaagcccacggtgcgcctcgccacccgcgacgacgtccccagggccgtacgcaccctcgccgccgcgttcgccgactaccccgccacgcgccacaccgtcgatccggaccgccacatcgagcgggtcaccgagctgcaagaactcttcctcacgcgcgtcgggctcgacatcggcaaggtgtgggtcgcggacgacggcgccgcggtggcggtctggaccacgccggagagcgtcgaagcgggggcggtgttcgccgagatcggcccgcgcatggccgagttgagcggttcccggctggccgcgcagcaacagatggaaggcctcctggcgccgcaccggcccaaggagcccgcgtggttcctggccaccgtcggcgtctcgcccgaccaccagggcaagggtctgggcagcgccgtcgtgctccccggagtggaggcggccgagcgcgccggggtgcccgccttcctggagacctccgcgccccgcaacctccccttctacgagcggctcggcttcaccgtcaccgccgacgtcgaggtgcccgaaggaccgcgcacctggtgcatgacccgcaagcccggtgcctga

SEQ ID NO: 5617 - DNA, 3123 bp, Artificial Sequence
  Synthetic Polynucloetide
atggccttaccagtgaccgccttgctcctgccgctggccttgctgctccacgccgccaggccggaggttcagctgcttgagtctggcggaggactggttcaacctggcggaagcctgagactgtcttgtgccgccagcggcttcacctttagcagctacgccatgagctgggtccgacaggctcctggcaaaggactggaatgggtgtccagcatcagcggcagcggcgactacatctactacgccgatagcgtgaagggcagattcaccatcagccgggacatcagcaagaacaccctgtacctccagatgaacagcctgagagccgaggacaccgccgtgtactactgtgccaaagaaggcaccggcgctaacagcagcctggccgattatagaggccagggcacactggtcaccgtgtctagtggcggaggaagcggcggaggatctgaagtgcaactggtggaatctggagggggaagcgtgcaggcaggcggatctctgagactgtcctgcaccacatctggcagagccctgaatatgtacgtgatgggatggtttcggcaggctcccggcaacgagcgggaatttgtggccgctacaagcagcagcggcggcagcacaagctaccccgattctgtgaagggcagattcacaatctcccgcgataatgccaagaatactgtgtacctgcagatgaatagtctgaagcctgaagatacagccgcctacagatgtgccgccagcccctacgtgtccacccccaccatgaacatcctggaagagtacagatactggggcctgggaacacaagtgacagtgtccagcggtaccggcggaggcggatctggcggcggaggtagcggtggcggaggatctgaattcgacatccagatgacacagagccctagcagcctgtctgccagcgtgggagacagagtgaccatcacatgcaaggccagcgaccacatcaacaactggctggcctggtatcagcagaagcctggacaggcccctaagctgctgatctacggcgctaccacactggaaacaggcgtgcccagcagattttctggcagcggctctggcaccgactacaccctgacaatatccagcctccagcctgaggacttcgccacctactactgtcagcagagctggaacaccccttggacattcggccagggcaccaagctggaaatcaagagactcgagagccagcctcacaccaagcccagcgtgttcgtgatgaagaacggcaccaacgtggcctgcctcgtgaaagagttctaccccaaggacatcaggatcaacctggtgtccagcaagaagatcaccgagttcgaccccgccatcgtgatctcccccagcggcaagtacaacgccgtgaagctggggaagtacgaggacagcaacagcgtgacctgctccgtgcagcacgacaacaagaccgtgcacagcaccgactttgaagtgaaaaccgactccaccgaccacgtgaagcccaaagagacagagaacaccaagcagcccagcaagagctgccacaagcccaaggccatcgtgcacaccgagaaagtgaacatgatgagcctgaccgtgctgggcctgcggatgctgttcgccaaaaccgtggccgtgaacttcctgctgaccgccaagctgttcttcctcagggccaagcgatctggatctggagcaacaaacttctcactactcaaacaagcaggtgacgtggaggagaatcccgggcctactagtatggactggatttggcgcatccttttccttgtcggcgctgctaccggcgcccattccgggccccaggttcagctgcaagagtctggcggaggacttgctcaagctggcggaagcctgagactgtcttgtgccgcctctggcagaaccttcagcatgggctggtttagacaggcccctggcaaagagagagagttcgtcgccgccatcacatacagcggcggcagcccttactacgcctcttctgtcagaggccggttcaccatcagccgggacaacgccaagaacaccgtgtacctccagatgaacagcctgaagccagaggacaccgccgtgtactactgtgccgccaatccaacctacggcagcgactggaatgccgagaattggggccagggcacccaagtgacagtgtctagtggatccggcggcggaggatctggcggaggcggatctgggggcggaggctctttcgaacaagttcagcttcaacagcctggcgctgagctggtcaaacctggcgcttctgtgaagatgagctgcaaagccagcggctacgccttcagcagctactggatcaactggatgaagcagaaacccggccagggactcgaatggatcggccaaatctatcccggcgacggcgacaccaactacaacggcaagttcaagggcagagccacactgaccgccgatacctctagcagcacagcctacatgcagctgagcagcctgaccagcgaagatagcgccgtgtacttctgtgcccggtccatcacaacagtcgtgggctgcgctatggactattggggccagggaacaagcgtgaccgtgtctagtacgcgtgacaagcagctggacgccgacgtgtcccccaagcctaccatcttcctgccctctatcgccgagacaaagctccagaaggccggcacctacctgtgcctgctggaaaagttcttcccagatgtgattaagatccactggcaggaaaagaagtccaacaccatcctgggcagccaggaaggcaacaccatgaagaccaacgacacctacatgaagttcagctggctgaccgtgcccgagaagtccctggacaaagaacacagatgcatcgtgcggcacgaaaacaacaagaacggcgtggaccaggaaatcatcttcccacccatcaagaccgatgtgattacaatggaccccaaggacaactgctccaaggacgccaacgataccctgctgctccagctgaccaacaccagcgcctactacatgtacttgttgctgctgctgaagtccgtggtgtacttcgccatcatcacatgctgcctgctgcggagaaccgccttctgctgcaacggcgagaagtct

SEQ ID NO: 5618 - DNA, 4332 bp, Artificial Sequence
  Synthetic Polynucloetide
atggccttaccagtgaccgccttgctcctgccgctggccttgctgctccacgccgccaggccggaggttcagctgcttgagtctggcggaggactggttcaacctggcggaagcctgagactgtcttgtgccgccagcggcttcacctttagcagctacgccatgagctgggtccgacaggctcctggcaaaggactggaatgggtgtccagcatcagcggcagcggcgactacatctactacgccgatagcgtgaagggcagattcaccatcagccgggacatcagcaagaacaccctgtacctccagatgaacagcctgagagccgaggacaccgccgtgtactactgtgccaaagaaggcaccggcgctaacagcagcctggccgattatagaggccagggcacactggtcaccgtgtctagtggcggaggaagcggcggaggatctgaagtgcaactggtggaatctggagggggaagcgtgcaggcaggcggatctctgagactgtcctgcaccacatctggcagagccctgaatatgtacgtgatgggatggtttcggcaggctcccggcaacgagcgggaatttgtggccgctacaagcagcagcggcggcagcacaagctaccccgattctgtgaagggcagattcacaatctcccgcgataatgccaagaatactgtgtacctgcagatgaatagtctgaagcctgaagatacagccgcctacagatgtgccgccagcccctacgtgtccacccccaccatgaacatcctggaagagtacagatactggggcctgggaacacaagtgacagtgtccagcggtaccggcggaggcggatctggcggcggaggtagcggtggcggaggatctgaattcgacatccagatgacacagagccctagcagcctgtctgccagcgtgggagacagagtgaccatcacatgcaaggccagcgaccacatcaacaactggctggcctggtatcagcagaagcctggacaggcccctaagctgctgatctacggcgctaccacactggaaacaggcgtgcccagcagattttctggcagcggctctggcaccgactacaccctgacaatatccagcctccagcctgaggacttcgccacctactactgtcagcagagctggaacaccccttggacattcggccagggcaccaagctggaaatcaagagaggacagcctaaggccaatcctaccgtgacactgttccctccaagcagcgaagaactccaggccaacaaggccacacttgtgtgcctgatctccgacttctaccctggggctgtgacagtggcttggaaggccgatggatctcctgtgaaagccggcgtggaaaccaccaagccatccaagcagagcaacaacaaatacgccgccagctcctacctgagcctgacacctgagcagtggaagtcccacagatcctacagctgccaagtgacccacgaaggcagcaccgtggaaaagacagtggcccctacagagtgcagcggatcccagagcttcggcctgctggaccccaagctgtgctacctgctggatggcatcctgttcatctacggcgtgatcctgaccgccctgttcctgagagtgaagttcagcagaagcgccgacgcccctgcctaccagcagggacagaaccaactgtacaacgagctgaacctgggcagacgggaagagtacgacgtgctggacaagcggagaggcagggaccctgagatgggcggaaagccccagcggagaaagaacccccaggaaggactgtataacgaactccagaaagacaagatggccgaagcctacagcgagatcggcatgaagggcgagcggagaagaggcaagggccacgatggcctgtaccagggcctgagcaccgccaccaaggacacctatgacgccctgcacatgcaggccctgcctccaagaagggccaagcgatctggatctggagcaacaaacttctcactactcaaacaagcaggtgacgtggaggagaatcccgggcctactagtatggactggatttggcgcatccttttccttgtcggcgctgctaccggcgcccattccgggccccaggttcagctgcaagagtctggcggaggacttgctcaagctggcggaagcctgagactgtcttgtgccgcctctggcagaaccttcagcatgggctggtttagacaggcccctggcaaagagagagagttcgtcgccgccatcacatacagcggcggcagcccttactacgcctcttctgtcagaggccggttcaccatcagccgggacaacgccaagaacaccgtgtacctccagatgaacagcctgaagccagaggacaccgccgtgtactactgtgccgccaatccaacctacggcagcgactggaatgccgagaattggggccagggcacccaagtgacagtgtctagtggatccggcggcggaggatctggcggaggcggatctgggggcggaggctctttcgaacaagttcagcttcaacagcctggcgctgagctggtcaaacctggcgcttctgtgaagatgagctgcaaagccagcggctacgccttcagcagctactggatcaactggatgaagcagaaacccggccagggactcgaatggatcggccaaatctatcccggcgacggcgacaccaactacaacggcaagttcaagggcagagccacactgaccgccgatacctctagcagcacagcctacatgcagctgagcagcctgaccagcgaagatagcgccgtgtacttctgtgcccggtccatcacaacagtcgtgggctgcgctatggactattggggccagggaacaagcgtgaccgtgtctagtgcctctacaaagggaccctccgtgtttcctctggctcccagcagcaagtctacaagcggaggaacagccgctctgggctgcctggtcaaggattactttcccgagcctgtgaccgtgtcctggaatagcggagcactgacaagcggcgtgcacacctttccagccgtgctgcaaagcagcggcctgtactctctgagcagcgtggtcacagtgcctagctctagcctgggcacccagacctacatctgcaatgtgaaccacaagcctagcaacaccaaggtggacaagagagtggaacccaagagctgtggtacccagagttttgggttgttggaccctaaattgtgctatctgttggacggaatcctgttcatttacggagtgatcctgaccgcattgttcctgcgggttaagttttccagatccgcagacgcacccgcttaccaacaagggcagaaccaactctacaatgaacttaatttggggcggagggaagagtacgacgttctggacaaaaggaggggacgagatcccgagatgggcggaaagcctcagcgaaggaagaatccgcaagaggggctttataacgaactccagaaagataaaatggcagaagcctatagtgagattgggatgaagggagaaaggaggaggggtaaaggtcacgatgggttgtaccaaggattgagcacagccactaaagatacctatgatgcgctccacatgcaggccctgccgccaagacgcgccaagagaagcggatctggcgtgaagcagaccctgaatttcgacctgctgaagctggctggcgacgtggaatccaacccaggcccttctagaggccatatgaccgagtacaagcccacggtgcgcctcgccacccgcgacgacgtccccagggccgtacgcaccctcgccgccgcgttcgccgactaccccgccacgcgccacaccgtcgatccggaccgccacatcgagcgggtcaccgagctgcaagaactcttcctcacgcgcgtcgggctcgacatcggcaaggtgtgggtcgcggacgacggcgccgcggtggcggtctggaccacgccggagagcgtcgaagcgggggcggtgttcgccgagatcggcccgcgcatggccgagttgagcggttcccggctggccgcgcagcaacagatggaaggcctcctggcgccgcaccggcccaaggagcccgcgtggttcctggccaccgtcggcgtctcgcccgaccaccagggcaagggtctgggcagcgccgtcgtgctccccggagtggaggcggccgagcgcgccggggtgcccgccttcctggagacctccgcgccccgcaacctccccttctacgagcggctcggcttcaccgtcaccgccgacgtcgaggtgcccgaaggaccgcgcacctggtgcatgacccgcaagcccggtgcctga

SEQ ID NO: 5619 - DNA, 3687 bp, Artificial Sequence
  Synthetic Polynucloetide
atggccttaccagtgaccgccttgctcctgccgctggccttgctgctccacgccgccaggccggaggttcagctgcttgagtctggcggaggactggttcaacctggcggaagcctgagactgtcttgtgccgccagcggcttcacctttagcagctacgccatgagctgggtccgacaggctcctggcaaaggactggaatgggtgtccagcatcagcggcagcggcgactacatctactacgccgatagcgtgaagggcagattcaccatcagccgggacatcagcaagaacaccctgtacctccagatgaacagcctgagagccgaggacaccgccgtgtactactgtgccaaagaaggcaccggcgctaacagcagcctggccgattatagaggccagggcacactggtcaccgtgtctagtggcggaggaagcggcggaggatctgaagtgcaactggtggaatctggagggggaagcgtgcaggcaggcggatctctgagactgtcctgcaccacatctggcagagccctgaatatgtacgtgatgggatggtttcggcaggctcccggcaacgagcgggaatttgtggccgctacaagcagcagcggcggcagcacaagctaccccgattctgtgaagggcagattcacaatctcccgcgataatgccaagaatactgtgtacctgcagatgaatagtctgaagcctgaagatacagccgcctacagatgtgccgccagcccctacgtgtccacccccaccatgaacatcctggaagagtacagatactggggcctgggaacacaagtgacagtgtccagcggtaccggcggaggcggatctggcggcggaggtagcggtggcggaggatctgaattcgacatccagatgacacagagccctagcagcctgtctgccagcgtgggagacagagtgaccatcacatgcaaggccagcgaccacatcaacaactggctggcctggtatcagcagaagcctggacaggcccctaagctgctgatctacggcgctaccacactggaaacaggcgtgcccagcagattttctggcagcggctctggcaccgactacaccctgacaatatccagcctccagcctgaggacttcgccacctactactgtcagcagagctggaacaccccttggacattcggccagggcaccaagctggaaatcaagagactcgaggacctgaagaacgtgttcccacctgaggtggccgtgttcgagcctagcgaggccgagatcagccacacccagaaagccaccctcgtgtgcctggctaccggcttctaccccgaccatgtggaactgtcttggtgggtcaacggcaaagaggtgcacagcggcgtgtctaccgacccccagccactgaaagaacagcccgccctgaacgacagccggtactgcctgagcagcagactgagagtgtccgccaccttctggcagaacccccggaaccacttcagatgccaggtgcagttctacggcctgagcgagaacgacgagtggacccaggacagagccaagcccgtgacccagatcgtgtctgccgaagcctggggcagagccgattgcggatcccagagcttcggcctgctggaccccaagctgtgctacctgctggatggcatcctgttcatctacggcgtgatcctgaccgccctgttcctgagagtgaagttcagcagaagcgccgacgcccctgcctaccagcagggacagaaccaactgtacaacgagctgaacctgggcagacgggaagagtacgacgtgctggacaagcggagaggcagggaccctgagatgggcggaaagccccagcggagaaagaacccccaggaaggactgtataacgaactccagaaagacaagatggccgaagcctacagcgagatcggcatgaagggcgagcggagaagaggcaagggccacgatggcctgtaccagggcctgagcaccgccaccaaggacacctatgacgccctgcacatgcaggccctgcctccaagaagggccaagcgatctggatctggagcaacaaacttctcactactcaaacaagcaggtgacgtggaggagaatcccgggcctactagtatggactggatttggcgcatccttttccttgtcggcgctgctaccggcgcccattccgggccccaggttcagctgcaagagtctggcggaggacttgctcaagctggcggaagcctgagactgtcttgtgccgcctctggcagaaccttcagcatgggctggtttagacaggcccctggcaaagagagagagttcgtcgccgccatcacatacagcggcggcagcccttactacgcctcttctgtcagaggccggttcaccatcagccgggacaacgccaagaacaccgtgtacctccagatgaacagcctgaagccagaggacaccgccgtgtactactgtgccgccaatccaacctacggcagcgactggaatgccgagaattggggccagggcacccaagtgacagtgtctagtggatccggcggcggaggatctggcggaggcggatctgggggcggaggctctttcgaacaagttcagcttcaacagcctggcgctgagctggtcaaacctggcgcttctgtgaagatgagctgcaaagccagcggctacgccttcagcagctactggatcaactggatgaagcagaaacccggccagggactcgaatggatcggccaaatctatcccggcgacggcgacaccaactacaacggcaagttcaagggcagagccacactgaccgccgatacctctagcagcacagcctacatgcagctgagcagcctgaccagcgaagatagcgccgtgtacttctgtgcccggtccatcacaacagtcgtgggctgcgctatggactattggggccagggaacaagcgtgaccgtgtctagtacgcgtatccagaaccctgatcctgccgtgtaccagctgcgggatagcaagagcagcgacaagagcgtgtgtctgttcaccgacttcgacagccagaccaacgtgtcccagagcaaggactccgacgtgtacatcaccgataagaccgtgctggacatgcggagcatggacttcaagagcaactccgccgtggcctggtccaacaagtccgatttcgcctgcgccaacgccttcaacaacagcattatccccgaggacacattcttcccaagccccgagagcagctgcggtacccagagttttgggttgttggaccctaaattgtgctatctgttggacggaatcctgttcatttacggagtgatcctgaccgcattgttcctgcgggttaagttttccagatccgcagacgcacccgcttaccaacaagggcagaaccaactctacaatgaacttaatttggggcggagggaagagtacgacgttctggacaaaaggaggggacgagatcccgagatgggcggaaagcctcagcgaaggaagaatccgcaagaggggctttataacgaactccagaaagataaaatggcagaagcctatagtgagattgggatgaagggagaaaggaggaggggtaaaggtcacgatgggttgtaccaaggattgagcacagccactaaagatacctatgatgcgctccacatgcaggccctgccgccaaga

SEQ ID NO: 5620 - DNA, 3687 bp, Artificial Sequence
  Synthetic Polynucloetide
atggccttaccagtgaccgccttgctcctgccgctggccttgctgctccacgccgccaggccggaggttcagctgcttgagtctggcggaggactggttcaacctggcggaagcctgagactgtcttgtgccgccagcggcttcacctttagcagctacgccatgagctgggtccgacaggctcctggcaaaggactggaatgggtgtccagcatcagcggcagcggcgactacatctactacgccgatagcgtgaagggcagattcaccatcagccgggacatcagcaagaacaccctgtacctccagatgaacagcctgagagccgaggacaccgccgtgtactactgtgccaaagaaggcaccggcgctaacagcagcctggccgattatagaggccagggcacactggtcaccgtgtctagtggcggaggaagcggcggaggatctgaagtgcaactggtggaatctggagggggaagcgtgcaggcaggcggatctctgagactgtcctgcaccacatctggcagagccctgaatatgtacgtgatgggatggtttcggcaggctcccggcaacgagcgggaatttgtggccgctacaagcagcagcggcggcagcacaagctaccccgattctgtgaagggcagattcacaatctcccgcgataatgccaagaatactgtgtacctgcagatgaatagtctgaagcctgaagatacagccgcctacagatgtgccgccagcccctacgtgtccacccccaccatgaacatcctggaagagtacagatactggggcctgggaacacaagtgacagtgtccagcggtaccggcggaggcggatctggcggcggaggtagcggtggcggaggatctgaattcgacatccagatgacacagagccctagcagcctgtctgccagcgtgggagacagagtgaccatcacatgcaaggccagcgaccacatcaacaactggctggcctggtatcagcagaagcctggacaggcccctaagctgctgatctacggcgctaccacactggaaacaggcgtgcccagcagattttctggcagcggctctggcaccgactacaccctgacaatatccagcctccagcctgaggacttcgccacctactactgtcagcagagctggaacaccccttggacattcggccagggcaccaagctggaaatcaagagactcgaggacctgaagaacgtgttcccacctgaggtggccgtgttcgagcctagcaaggccgagatcgcccacacccagaaagccaccctcgtgtgcctggctaccggcttctaccccgaccatgtggaactgtcttggtgggtcaacggcaaagaggtgcacagcggcgtgtgtaccgacccccagccactgaaagaacagcccgccctgaacgacagccggtactgcctgagcagcagactgagagtgtccgccaccttctggcagaacccccggaaccacttcagatgccaggtgcagttctacggcctgagcgagaacgacgagtggacccaggacagagccaagcccgtgacccagatcgtgtctgccgaagcctggggcagagccgattgcggatcccagagcttcggcctgctggaccccaagctgtgctacctgctggatggcatcctgttcatctacggcgtgatcctgaccgccctgttcctgagagtgaagttcagcagaagcgccgacgcccctgcctaccagcagggacagaaccaactgtacaacgagctgaacctgggcagacgggaagagtacgacgtgctggacaagcggagaggcagggaccctgagatgggcggaaagccccagcggagaaagaacccccaggaaggactgtataacgaactccagaaagacaagatggccgaagcctacagcgagatcggcatgaagggcgagcggagaagaggcaagggccacgatggcctgtaccagggcctgagcaccgccaccaaggacacctatgacgccctgcacatgcaggccctgcctccaagaagggccaagcgatctggatctggagcaacaaacttctcactactcaaacaagcaggtgacgtggaggagaatcccgggcctactagtatggactggatttggcgcatccttttccttgtcggcgctgctaccggcgcccattccgggccccaggttcagctgcaagagtctggcggaggacttgctcaagctggcggaagcctgagactgtcttgtgccgcctctggcagaaccttcagcatgggctggtttagacaggcccctggcaaagagagagagttcgtcgccgccatcacatacagcggcggcagcccttactacgcctcttctgtcagaggccggttcaccatcagccgggacaacgccaagaacaccgtgtacctccagatgaacagcctgaagccagaggacaccgccgtgtactactgtgccgccaatccaacctacggcagcgactggaatgccgagaattggggccagggcacccaagtgacagtgtctagtggatccggcggcggaggatctggcggaggcggatctgggggcggaggctctttcgaacaagttcagcttcaacagcctggcgctgagctggtcaaacctggcgcttctgtgaagatgagctgcaaagccagcggctacgccttcagcagctactggatcaactggatgaagcagaaacccggccagggactcgaatggatcggccaaatctatcccggcgacggcgacaccaactacaacggcaagttcaagggcagagccacactgaccgccgatacctctagcagcacagcctacatgcagctgagcagcctgaccagcgaagatagcgccgtgtacttctgtgcccggtccatcacaacagtcgtgggctgcgctatggactattggggccagggaacaagcgtgaccgtgtctagtacgcgtatccagaaccctgatcctgccgtgtaccagctgcgggatagcaagagcagcgacaagagcgtgtgtctgttcaccgacttcgacagccagaccaacgtgtcccagagcaaggactccgacgtgtacatcaccgataagtgcgtgctggacatgcggagcatggacttcaagagcaactccgccgtggcctggtccaacaagtccgatttcgcctgcgccaacgccttcaacaacagcattatccccgaggacacattcttcccaagcagcgacgtgccctgcggtacccagagttttgggttgttggaccctaaattgtgctatctgttggacggaatcctgttcatttacggagtgatcctgaccgcattgttcctgcgggttaagttttccagatccgcagacgcacccgcttaccaacaagggcagaaccaactctacaatgaacttaatttggggcggagggaagagtacgacgttctggacaaaaggaggggacgagatcccgagatgggcggaaagcctcagcgaaggaagaatccgcaagaggggctttataacgaactccagaaagataaaatggcagaagcctatagtgagattgggatgaagggagaaaggaggaggggtaaaggtcacgatgggttgtaccaaggattgagcacagccactaaagatacctatgatgcgctccacatgcaggccctgccgccaaga

SEQ ID NO: 5621 - DNA, 3900 bp, Artificial Sequence
  Synthetic Polynucloetide
atggccttaccagtgaccgccttgctcctgccgctggccttgctgctccacgccgccaggccggaggttcagctgcttgagtctggcggaggactggttcaacctggcggaagcctgagactgtcttgtgccgccagcggcttcacctttagcagctacgccatgagctgggtccgacaggctcctggcaaaggactggaatgggtgtccagcatcagcggcagcggcgactacatctactacgccgatagcgtgaagggcagattcaccatcagccgggacatcagcaagaacaccctgtacctccagatgaacagcctgagagccgaggacaccgccgtgtactactgtgccaaagaaggcaccggcgctaacagcagcctggccgattatagaggccagggcacactggtcaccgtgtctagtggcggaggaagcggcggaggatctgaagtgcaactggtggaatctggagggggaagcgtgcaggcaggcggatctctgagactgtcctgcaccacatctggcagagccctgaatatgtacgtgatgggatggtttcggcaggctcccggcaacgagcgggaatttgtggccgctacaagcagcagcggcggcagcacaagctaccccgattctgtgaagggcagattcacaatctcccgcgataatgccaagaatactgtgtacctgcagatgaatagtctgaagcctgaagatacagccgcctacagatgtgccgccagcccctacgtgtccacccccaccatgaacatcctggaagagtacagatactggggcctgggaacacaagtgacagtgtccagcggtaccggcggaggcggatctggcggcggaggtagcggtggcggaggatctgaattcgacatccagatgacacagagccctagcagcctgtctgccagcgtgggagacagagtgaccatcacatgcaaggccagcgaccacatcaacaactggctggcctggtatcagcagaagcctggacaggcccctaagctgctgatctacggcgctaccacactggaaacaggcgtgcccagcagattttctggcagcggctctggcaccgactacaccctgacaatatccagcctccagcctgaggacttcgccacctactactgtcagcagagctggaacaccccttggacattcggccagggcaccaagctggaaatcaagagactcgaggggaaaccaattcccaaccctcttctgggactggattcaaccggcagcggcgaggacctgaagaacgtgttcccacctgaggtggccgtgttcgagcctagcgaggccgagatcagccacacccagaaagccaccctcgtgtgcctggctaccggcttctaccccgaccatgtggaactgtcttggtgggtcaacggcaaagaggtgcacagcggcgtgtctaccgacccccagccactgaaagaacagcccgccctgaacgacagccggtactgcctgagcagcagactgagagtgtccgccaccttctggcagaacccccggaaccacttcagatgccaggtgcagttctacggcctgagcgagaacgacgagtggacccaggacagagccaagcccgtgacccagatcgtgtctgccgaagcctggggcagagccgattgcggatcccagagcttcggcctgctggaccccaagctgtgctacctgctggatggcatcctgttcatctacggcgtgatcctgaccgccctgttcctgagagtgaagttcagcagaagcgccgacgcccctgcctaccagcagggacagaaccaactgtacaacgagctgaacctgggcagacgggaagagtacgacgtgctggacaagcggagaggcagggaccctgagatgggcggaaagccccagcggagaaagaacccccaggaaggactgtataacgaactccagaaagacaagatggccgaagcctacagcgagatcggcatgaagggcgagcggagaagaggcaagggccacgatggcctgtaccagggcctgagcaccgccaccaaggacacctatgacgccctgcacatgcaggccctgcctccaagaagggccaagcgatctggatctggagcaacaaacttctcactactcaaacaagcaggtgacgtggaggagaatcccgggcctactagtatggactggatttggcgcatccttttccttgtcggcgctgctaccggcgcccattccgggccccaggttcagctgcaagagtctggcggaggacttgctcaagctggcggaagcctgagactgtcttgtgccgcctctggcagaaccttcagcatgggctggtttagacaggcccctggcaaagagagagagttcgtcgccgccatcacatacagcggcggcagcccttactacgcctcttctgtcagaggccggttcaccatcagccgggacaacgccaagaacaccgtgtacctccagatgaacagcctgaagccagaggacaccgccgtgtactactgtgccgccaatccaacctacggcagcgactggaatgccgagaattggggccagggcacccaagtgacagtgtctagtggatccggcggcggaggatctggcggaggcggatctgggggcggaggctctttcgaacaagttcagcttcaacagcctggcgctgagctggtcaaacctggcgcttctgtgaagatgagctgcaaagccagcggctacgccttcagcagctactggatcaactggatgaagcagaaacccggccagggactcgaatggatcggccaaatctatcccggcgacggcgacaccaactacaacggcaagttcaagggcagagccacactgaccgccgatacctctagcagcacagcctacatgcagctgagcagcctgaccagcgaagatagcgccgtgtacttctgtgcccggtccatcacaacagtcgtgggctgcgctatggactattggggccagggaacaagcgtgaccgtgtctagtacgcgtgagcagaaactgatctcggaagaggatgggagcggcatccagaaccctgatcctgccgtgtaccagctgcgggatagcaagagcagcgacaagagcgtgtgtctgttcaccgacttcgacagccagaccaacgtgtcccagagcaaggactccgacgtgtacatcaccgataagaccgtgctggacatgcggagcatggacttcaagagcaactccgccgtggcctggtccaacaagtccgatttcgcctgcgccaacgccttcaacaacagcattatccccgaggacacattcttcccaagccccgagagcagctgcggtacccagagttttgggttgttggaccctaaattgtgctatctgttggacggaatcctgttcatttacggagtgatcctgaccgcattgttcctgaggagcaagcggtcacggctgctccacagcgattacatgaatatgacaccacgaagaccgggtcctactcgcaaacactaccaaccctacgcacctccccgcgactttgcagcgtaccgatctcgggttaagttttccagatccgcagacgcacccgcttaccaacaagggcagaaccaactctacaatgaacttaatttggggcggagggaagagtacgacgttctggacaaaaggaggggacgagatcccgagatgggcggaaagcctcagcgaaggaagaatccgcaagaggggctttataacgaactccagaaagataaaatggcagaagcctatagtgagattgggatgaagggagaaaggaggaggggtaaaggtcacgatgggttgtaccaaggattgagcacagccactaaagatacctatgatgcgctccacatgcaggccctgccgccaaga

SEQ ID NO: 5622 - DNA, 4023 bp, Artificial Sequence
  Synthetic Polynucloetide
atggccttaccagtgaccgccttgctcctgccgctggccttgctgctccacgccgccaggccggaggttcagctgcttgagtctggcggaggactggttcaacctggcggaagcctgagactgtcttgtgccgccagcggcttcacctttagcagctacgccatgagctgggtccgacaggctcctggcaaaggactggaatgggtgtccagcatcagcggcagcggcgactacatctactacgccgatagcgtgaagggcagattcaccatcagccgggacatcagcaagaacaccctgtacctccagatgaacagcctgagagccgaggacaccgccgtgtactactgtgccaaagaaggcaccggcgctaacagcagcctggccgattatagaggccagggcacactggtcaccgtgtctagtggcggaggaagcggcggaggatctgaagtgcaactggtggaatctggagggggaagcgtgcaggcaggcggatctctgagactgtcctgcaccacatctggcagagccctgaatatgtacgtgatgggatggtttcggcaggctcccggcaacgagcgggaatttgtggccgctacaagcagcagcggcggcagcacaagctaccccgattctgtgaagggcagattcacaatctcccgcgataatgccaagaatactgtgtacctgcagatgaatagtctgaagcctgaagatacagccgcctacagatgtgccgccagcccctacgtgtccacccccaccatgaacatcctggaagagtacagatactggggcctgggaacacaagtgacagtgtccagcggtaccggcggaggcggatctggcggcggaggtagcggtggcggaggatctgaattcgacatccagatgacacagagccctagcagcctgtctgccagcgtgggagacagagtgaccatcacatgcaaggccagcgaccacatcaacaactggctggcctggtatcagcagaagcctggacaggcccctaagctgctgatctacggcgctaccacactggaaacaggcgtgcccagcagattttctggcagcggctctggcaccgactacaccctgacaatatccagcctccagcctgaggacttcgccacctactactgtcagcagagctggaacaccccttggacattcggccagggcaccaagctggaaatcaagagactcgaggggaaaccaattcccaaccctcttctgggactggattcaaccggcagcggcgaggacctgaagaacgtgttcccacctgaggtggccgtgttcgagcctagcgaggccgagatcagccacacccagaaagccaccctcgtgtgcctggctaccggcttctaccccgaccatgtggaactgtcttggtgggtcaacggcaaagaggtgcacagcggcgtgtctaccgacccccagccactgaaagaacagcccgccctgaacgacagccggtactgcctgagcagcagactgagagtgtccgccaccttctggcagaacccccggaaccacttcagatgccaggtgcagttctacggcctgagcgagaacgacgagtggacccaggacagagccaagcccgtgacccagatcgtgtctgccgaagcctggggcagagccgattgcggatcccagagcttcggcctgctggaccccaagctgtgctacctgctggatggcatcctgttcatctacggcgtgatcctgaccgccctgttcctgaggagtaagaggagcaggctcctgcacagtgactacatgaacatgactccacgccgccccggacccacccgcaagcattaccagccctatgccccaccacgcgacttcgcagcctatcgctccagagtgaagttcagcagaagcgccgacgcccctgcctaccagcagggacagaaccaactgtacaacgagctgaacctgggcagacgggaagagtacgacgtgctggacaagcggagaggcagggaccctgagatgggcggaaagccccagcggagaaagaacccccaggaaggactgtataacgaactccagaaagacaagatggccgaagcctacagcgagatcggcatgaagggcgagcggagaagaggcaagggccacgatggcctgtaccagggcctgagcaccgccaccaaggacacctatgacgccctgcacatgcaggccctgcctccaagaagggccaagcgatctggatctggagcaacaaacttctcactactcaaacaagcaggtgacgtggaggagaatcccgggcctactagtatggactggatttggcgcatccttttccttgtcggcgctgctaccggcgcccattccgggccccaggttcagctgcaagagtctggcggaggacttgctcaagctggcggaagcctgagactgtcttgtgccgcctctggcagaaccttcagcatgggctggtttagacaggcccctggcaaagagagagagttcgtcgccgccatcacatacagcggcggcagcccttactacgcctcttctgtcagaggccggttcaccatcagccgggacaacgccaagaacaccgtgtacctccagatgaacagcctgaagccagaggacaccgccgtgtactactgtgccgccaatccaacctacggcagcgactggaatgccgagaattggggccagggcacccaagtgacagtgtctagtggatccggcggcggaggatctggcggaggcggatctgggggcggaggctctttcgaacaagttcagcttcaacagcctggcgctgagctggtcaaacctggcgcttctgtgaagatgagctgcaaagccagcggctacgccttcagcagctactggatcaactggatgaagcagaaacccggccagggactcgaatggatcggccaaatctatcccggcgacggcgacaccaactacaacggcaagttcaagggcagagccacactgaccgccgatacctctagcagcacagcctacatgcagctgagcagcctgaccagcgaagatagcgccgtgtacttctgtgcccggtccatcacaacagtcgtgggctgcgctatggactattggggccagggaacaagcgtgaccgtgtctagtacgcgtgagcagaaactgatctcggaagaggatgggagcggcatccagaaccctgatcctgccgtgtaccagctgcgggatagcaagagcagcgacaagagcgtgtgtctgttcaccgacttcgacagccagaccaacgtgtcccagagcaaggactccgacgtgtacatcaccgataagaccgtgctggacatgcggagcatggacttcaagagcaactccgccgtggcctggtccaacaagtccgatttcgcctgcgccaacgccttcaacaacagcattatccccgaggacacattcttcccaagccccgagagcagctgcggtacccagagttttgggttgttggaccctaaattgtgctatctgttggacggaatcctgttcatttacggagtgatcctgaccgcattgttcctgaggagcaagcggtcacggctgctccacagcgattacatgaatatgacaccacgaagaccgggtcctactcgcaaacactaccaaccctacgcacctccccgcgactttgcagcgtaccgatctcgggttaagttttccagatccgcagacgcacccgcttaccaacaagggcagaaccaactctacaatgaacttaatttggggcggagggaagagtacgacgttctggacaaaaggaggggacgagatcccgagatgggcggaaagcctcagcgaaggaagaatccgcaagaggggctttataacgaactccagaaagataaaatggcagaagcctatagtgagattgggatgaagggagaaaggaggaggggtaaaggtcacgatgggttgtaccaaggattgagcacagccactaaagatacctatgatgcgctccacatgcaggccctgccgccaaga

SEQ ID NO: 5623 - DNA, 3906 bp, Artificial Sequence
  Synthetic Polynucloetide
atggccttaccagtgaccgccttgctcctgccgctggccttgctgctccacgccgccaggccggaggttcagctgcttgagtctggcggaggactggttcaacctggcggaagcctgagactgtcttgtgccgccagcggcttcacctttagcagctacgccatgagctgggtccgacaggctcctggcaaaggactggaatgggtgtccagcatcagcggcagcggcgactacatctactacgccgatagcgtgaagggcagattcaccatcagccgggacatcagcaagaacaccctgtacctccagatgaacagcctgagagccgaggacaccgccgtgtactactgtgccaaagaaggcaccggcgctaacagcagcctggccgattatagaggccagggcacactggtcaccgtgtctagtggcggaggaagcggcggaggatctgaagtgcaactggtggaatctggagggggaagcgtgcaggcaggcggatctctgagactgtcctgcaccacatctggcagagccctgaatatgtacgtgatgggatggtttcggcaggctcccggcaacgagcgggaatttgtggccgctacaagcagcagcggcggcagcacaagctaccccgattctgtgaagggcagattcacaatctcccgcgataatgccaagaatactgtgtacctgcagatgaatagtctgaagcctgaagatacagccgcctacagatgtgccgccagcccctacgtgtccacccccaccatgaacatcctggaagagtacagatactggggcctgggaacacaagtgacagtgtccagcggtaccggcggaggcggatctggcggcggaggtagcggtggcggaggatctgaattcgacatccagatgacacagagccctagcagcctgtctgccagcgtgggagacagagtgaccatcacatgcaaggccagcgaccacatcaacaactggctggcctggtatcagcagaagcctggacaggcccctaagctgctgatctacggcgctaccacactggaaacaggcgtgcccagcagattttctggcagcggctctggcaccgactacaccctgacaatatccagcctccagcctgaggacttcgccacctactactgtcagcagagctggaacaccccttggacattcggccagggcaccaagctggaaatcaagagactcgaggggaaaccaattcccaaccctcttctgggactggattcaaccggcagcggcgaggacctgaagaacgtgttcccacctgaggtggccgtgttcgagcctagcgaggccgagatcagccacacccagaaagccaccctcgtgtgcctggctaccggcttctaccccgaccatgtggaactgtcttggtgggtcaacggcaaagaggtgcacagcggcgtgtctaccgacccccagccactgaaagaacagcccgccctgaacgacagccggtactgcctgagcagcagactgagagtgtccgccaccttctggcagaacccccggaaccacttcagatgccaggtgcagttctacggcctgagcgagaacgacgagtggacccaggacagagccaagcccgtgacccagatcgtgtctgccgaagcctggggcagagccgattgcggatcccagagcttcggcctgctggaccccaagctgtgctacctgctggatggcatcctgttcatctacggcgtgatcctgaccgccctgttcctgagagtgaagttcagcagaagcgccgacgcccctgcctaccagcagggacagaaccaactgtacaacgagctgaacctgggcagacgggaagagtacgacgtgctggacaagcggagaggcagggaccctgagatgggcggaaagccccagcggagaaagaacccccaggaaggactgtataacgaactccagaaagacaagatggccgaagcctacagcgagatcggcatgaagggcgagcggagaagaggcaagggccacgatggcctgtaccagggcctgagcaccgccaccaaggacacctatgacgccctgcacatgcaggccctgcctccaagaagggccaagcgatctggatctggagcaacaaacttctcactactcaaacaagcaggtgacgtggaggagaatcccgggcctactagtatggactggatttggcgcatccttttccttgtcggcgctgctaccggcgcccattccgggccccaggttcagctgcaagagtctggcggaggacttgctcaagctggcggaagcctgagactgtcttgtgccgcctctggcagaaccttcagcatgggctggtttagacaggcccctggcaaagagagagagttcgtcgccgccatcacatacagcggcggcagcccttactacgcctcttctgtcagaggccggttcaccatcagccgggacaacgccaagaacaccgtgtacctccagatgaacagcctgaagccagaggacaccgccgtgtactactgtgccgccaatccaacctacggcagcgactggaatgccgagaattggggccagggcacccaagtgacagtgtctagtggatccggcggcggaggatctggcggaggcggatctgggggcggaggctctttcgaacaagttcagcttcaacagcctggcgctgagctggtcaaacctggcgcttctgtgaagatgagctgcaaagccagcggctacgccttcagcagctactggatcaactggatgaagcagaaacccggccagggactcgaatggatcggccaaatctatcccggcgacggcgacaccaactacaacggcaagttcaagggcagagccacactgaccgccgatacctctagcagcacagcctacatgcagctgagcagcctgaccagcgaagatagcgccgtgtacttctgtgcccggtccatcacaacagtcgtgggctgcgctatggactattggggccagggaacaagcgtgaccgtgtctagtacgcgtgagcagaaactgatctcggaagaggatctggggagcggcatccagaaccctgatcctgccgtgtaccagctgcgggatagcaagagcagcgacaagagcgtgtgtctgttcaccgacttcgacagccagaccaacgtgtcccagagcaaggactccgacgtgtacatcaccgataagaccgtgctggacatgcggagcatggacttcaagagcaactccgccgtggcctggtccaacaagtccgatttcgcctgcgccaacgccttcaacaacagcattatccccgaggacacattcttcccaagccccgagagcagctgcggtacccagagttttgggttgttggaccctaaattgtgctatctgttggacggaatcctgttcatttacggagtgatcctgaccgcattgttcctgaagagaggccggaagaagctgctgtacatcttcaagcagcctttcatgcggcccgtgcagaccacccaggaagaggacggctgctcctgccggttccccgaggaagaagaaggcggctgcgagctgcgggttaagttttccagatccgcagacgcacccgcttaccaacaagggcagaaccaactctacaatgaacttaatttggggcggagggaagagtacgacgttctggacaaaaggaggggacgagatcccgagatgggcggaaagcctcagcgaaggaagaatccgcaagaggggctttataacgaactccagaaagataaaatggcagaagcctatagtgagattgggatgaagggagaaaggaggaggggtaaaggtcacgatgggttgtaccaaggattgagcacagccactaaagatacctatgatgcgctccacatgcaggccctgccgccaaga

SEQ ID NO: 5624 - DNA, 4032 bp, Artificial Sequence
  Synthetic Polynucloetide
atggccttaccagtgaccgccttgctcctgccgctggccttgctgctccacgccgccaggccggaggttcagctgcttgagtctggcggaggactggttcaacctggcggaagcctgagactgtcttgtgccgccagcggcttcacctttagcagctacgccatgagctgggtccgacaggctcctggcaaaggactggaatgggtgtccagcatcagcggcagcggcgactacatctactacgccgatagcgtgaagggcagattcaccatcagccgggacatcagcaagaacaccctgtacctccagatgaacagcctgagagccgaggacaccgccgtgtactactgtgccaaagaaggcaccggcgctaacagcagcctggccgattatagaggccagggcacactggtcaccgtgtctagtggcggaggaagcggcggaggatctgaagtgcaactggtggaatctggagggggaagcgtgcaggcaggcggatctctgagactgtcctgcaccacatctggcagagccctgaatatgtacgtgatgggatggtttcggcaggctcccggcaacgagcgggaatttgtggccgctacaagcagcagcggcggcagcacaagctaccccgattctgtgaagggcagattcacaatctcccgcgataatgccaagaatactgtgtacctgcagatgaatagtctgaagcctgaagatacagccgcctacagatgtgccgccagcccctacgtgtccacccccaccatgaacatcctggaagagtacagatactggggcctgggaacacaagtgacagtgtccagcggtaccggcggaggcggatctggcggcggaggtagcggtggcggaggatctgaattcgacatccagatgacacagagccctagcagcctgtctgccagcgtgggagacagagtgaccatcacatgcaaggccagcgaccacatcaacaactggctggcctggtatcagcagaagcctggacaggcccctaagctgctgatctacggcgctaccacactggaaacaggcgtgcccagcagattttctggcagcggctctggcaccgactacaccctgacaatatccagcctccagcctgaggacttcgccacctactactgtcagcagagctggaacaccccttggacattcggccagggcaccaagctggaaatcaagagactcgaggggaaaccaattcccaaccctcttctgggactggattcaaccggcagcggcgaggacctgaagaacgtgttcccacctgaggtggccgtgttcgagcctagcgaggccgagatcagccacacccagaaagccaccctcgtgtgcctggctaccggcttctaccccgaccatgtggaactgtcttggtgggtcaacggcaaagaggtgcacagcggcgtgtctaccgacccccagccactgaaagaacagcccgccctgaacgacagccggtactgcctgagcagcagactgagagtgtccgccaccttctggcagaacccccggaaccacttcagatgccaggtgcagttctacggcctgagcgagaacgacgagtggacccaggacagagccaagcccgtgacccagatcgtgtctgccgaagcctggggcagagccgattgcggatcccagagcttcggcctgctggaccccaagctgtgctacctgctggatggcatcctgttcatctacggcgtgatcctgaccgccctgttcctgaaacggggcagaaagaaactcctgtatatattcaaacaaccatttatgagaccagtacaaactactcaagaggaagatggctgtagctgccgatttccagaagaagaagaaggaggatgtgaactgagagtgaagttcagcagaagcgccgacgcccctgcctaccagcagggacagaaccaactgtacaacgagctgaacctgggcagacgggaagagtacgacgtgctggacaagcggagaggcagggaccctgagatgggcggaaagccccagcggagaaagaacccccaggaaggactgtataacgaactccagaaagacaagatggccgaagcctacagcgagatcggcatgaagggcgagcggagaagaggcaagggccacgatggcctgtaccagggcctgagcaccgccaccaaggacacctatgacgccctgcacatgcaggccctgcctccaagaagggccaagcgatctggatctggagcaacaaacttctcactactcaaacaagcaggtgacgtggaggagaatcccgggcctactagtatggactggatttggcgcatccttttccttgtcggcgctgctaccggcgcccattccgggccccaggttcagctgcaagagtctggcggaggacttgctcaagctggcggaagcctgagactgtcttgtgccgcctctggcagaaccttcagcatgggctggtttagacaggcccctggcaaagagagagagttcgtcgccgccatcacatacagcggcggcagcccttactacgcctcttctgtcagaggccggttcaccatcagccgggacaacgccaagaacaccgtgtacctccagatgaacagcctgaagccagaggacaccgccgtgtactactgtgccgccaatccaacctacggcagcgactggaatgccgagaattggggccagggcacccaagtgacagtgtctagtggatccggcggcggaggatctggcggaggcggatctgggggcggaggctctttcgaacaagttcagcttcaacagcctggcgctgagctggtcaaacctggcgcttctgtgaagatgagctgcaaagccagcggctacgccttcagcagctactggatcaactggatgaagcagaaacccggccagggactcgaatggatcggccaaatctatcccggcgacggcgacaccaactacaacggcaagttcaagggcagagccacactgaccgccgatacctctagcagcacagcctacatgcagctgagcagcctgaccagcgaagatagcgccgtgtacttctgtgcccggtccatcacaacagtcgtgggctgcgctatggactattggggccagggaacaagcgtgaccgtgtctagtacgcgtgagcagaaactgatctcggaagaggatctggggagcggcatccagaaccctgatcctgccgtgtaccagctgcgggatagcaagagcagcgacaagagcgtgtgtctgttcaccgacttcgacagccagaccaacgtgtcccagagcaaggactccgacgtgtacatcaccgataagaccgtgctggacatgcggagcatggacttcaagagcaactccgccgtggcctggtccaacaagtccgatttcgcctgcgccaacgccttcaacaacagcattatccccgaggacacattcttcccaagccccgagagcagctgcggtacccagagttttgggttgttggaccctaaattgtgctatctgttggacggaatcctgttcatttacggagtgatcctgaccgcattgttcctgaagagaggccggaagaagctgctgtacatcttcaagcagcctttcatgcggcccgtgcagaccacccaggaagaggacggctgctcctgccggttccccgaggaagaagaaggcggctgcgagctgcgggttaagttttccagatccgcagacgcacccgcttaccaacaagggcagaaccaactctacaatgaacttaatttggggcggagggaagagtacgacgttctggacaaaaggaggggacgagatcccgagatgggcggaaagcctcagcgaaggaagaatccgcaagaggggctttataacgaactccagaaagataaaatggcagaagcctatagtgagattgggatgaagggagaaaggaggaggggtaaaggtcacgatgggttgtaccaaggattgagcacagccactaaagatacctatgatgcgctccacatgcaggccctgccgccaaga

SEQ ID NO: 5625 - DNA, 3705 bp, Artificial Sequence
  Synthetic Polynucloetide
atggccttaccagtgaccgccttgctcctgccgctggccttgctgctccacgccgccaggccggaggttcagctgcttgagtctggcggaggactggttcaacctggcggaagcctgagactgtcttgtgccgccagcggcttcacctttagcagctacgccatgagctgggtccgacaggctcctggcaaaggactggaatgggtgtccagcatcagcggcagcggcgactacatctactacgccgatagcgtgaagggcagattcaccatcagccgggacatcagcaagaacaccctgtacctccagatgaacagcctgagagccgaggacaccgccgtgtactactgtgccaaagaaggcaccggcgctaacagcagcctggccgattatagaggccagggcacactggtcaccgtgtctagtggcggaggaagcggcggaggatctgaagtgcaactggtggaatctggagggggaagcgtgcaggcaggcggatctctgagactgtcctgcaccacatctggcagagccctgaatatgtacgtgatgggatggtttcggcaggctcccggcaacgagcgggaatttgtggccgctacaagcagcagcggcggcagcacaagctaccccgattctgtgaagggcagattcacaatctcccgcgataatgccaagaatactgtgtacctgcagatgaatagtctgaagcctgaagatacagccgcctacagatgtgccgccagcccctacgtgtccacccccaccatgaacatcctggaagagtacagatactggggcctgggaacacaagtgacagtgtccagcggtaccggcggaggcggatctggcggcggaggtagcggtggcggaggatctgaattcgacatccagatgacacagagccctagcagcctgtctgccagcgtgggagacagagtgaccatcacatgcaaggccagcgaccacatcaacaactggctggcctggtatcagcagaagcctggacaggcccctaagctgctgatctacggcgctaccacactggaaacaggcgtgcccagcagattttctggcagcggctctggcaccgactacaccctgacaatatccagcctccagcctgaggacttcgccacctactactgtcagcagagctggaacaccccttggacattcggccagggcaccaagctggaaatcaagagactcgagcagagcttcggcctgctggaccccaagctgtgctacctgctggatggcatcctgttcatctacggcgtgatcctgaccgccctgttcctgagagtgaagttcagcagaagcgccgacgcccctgcctaccagcagggacagaaccaactgtacaacgagctgaacctgggcagacgggaagagtacgacgtgctggacaagcggagaggcagggaccctgagatgggcggaaagccccagcggagaaagaacccccaggaaggactgtataacgaactccagaaagacaagatggccgaagcctacagcgagatcggcatgaagggcgagcggagaagaggcaagggccacgatggcctgtaccagggcctgagcaccgccaccaaggacacctatgacgccctgcacatgcaggccctgcctccaagaagggccaagcgatctggatctggagcaacaaacttctcactactcaaacaagcaggtgacgtggaggagaatcccgggcctactagtatggactggatttggcgcatccttttccttgtcggcgctgctaccggcgcccattccgggccccaggttcagctgcaagagtctggcggaggacttgctcaagctggcggaagcctgagactgtcttgtgccgcctctggcagaaccttcagcatgggctggtttagacaggcccctggcaaagagagagagttcgtcgccgccatcacatacagcggcggcagcccttactacgcctcttctgtcagaggccggttcaccatcagccgggacaacgccaagaacaccgtgtacctccagatgaacagcctgaagccagaggacaccgccgtgtactactgtgccgccaatccaacctacggcagcgactggaatgccgagaattggggccagggcacccaagtgacagtgtctagtggatccggcggcggaggatctggcggaggcggatctgggggcggaggctctttcgaacaagttcagcttcaacagcctggcgctgagctggtcaaacctggcgcttctgtgaagatgagctgcaaagccagcggctacgccttcagcagctactggatcaactggatgaagcagaaacccggccagggactcgaatggatcggccaaatctatcccggcgacggcgacaccaactacaacggcaagttcaagggcagagccacactgaccgccgatacctctagcagcacagcctacatgcagctgagcagcctgaccagcgaagatagcgccgtgtacttctgtgcccggtccatcacaacagtcgtgggctgcgctatggactattggggccagggaacaagcgtgaccgtgtctagtacgcgtcagagttttgggttgttggaccctaaattgtgctatctgttggacggaatcctgttcatttacggagtgatcctgaccgcattgttcctgcgggttaagttttccagatccgcagacgcacccgcttaccaacaagggcagaaccaactctacaatgaacttaatttggggcggagggaagagtacgacgttctggacaaaaggaggggacgagatcccgagatgggcggaaagcctcagcgaaggaagaatccgcaagaggggctttataacgaactccagaaagataaaatggcagaagcctatagtgagattgggatgaagggagaaaggaggaggggtaaaggtcacgatgggttgtaccaaggattgagcacagccactaaagatacctatgatgcgctccacatgcaggccctgccgccaagacgcgccaagagaagcggatctggcgtgaagcagaccctgaatttcgacctgctgaagctggctggcgacgtggaatccaacccaggcccttctagaggccatatgaccgagtacaagcccacggtgcgcctcgccacccgcgacgacgtccccagggccgtacgcaccctcgccgccgcgttcgccgactaccccgccacgcgccacaccgtcgatccggaccgccacatcgagcgggtcaccgagctgcaagaactcttcctcacgcgcgtcgggctcgacatcggcaaggtgtgggtcgcggacgacggcgccgcggtggcggtctggaccacgccggagagcgtcgaagcgggggcggtgttcgccgagatcggcccgcgcatggccgagttgagcggttcccggctggccgcgcagcaacagatggaaggcctcctggcgccgcaccggcccaaggagcccgcgtggttcctggccaccgtcggcgtctcgcccgaccaccagggcaagggtctgggcagcgccgtcgtgctccccggagtggaggcggccgagcgcgccggggtgcccgccttcctggagacctccgcgccccgcaacctccccttctacgagcggctcggcttcaccgtcaccgccgacgtcgaggtgcccgaaggaccgcgcacctggtgcatgacccgcaagcccggtgcctga

SEQ ID NO: 5626 - DNA, 3177 bp, Artificial Sequence
  Synthetic Polynucloetide
atggccttaccagtgaccgccttgctcctgccgctggccttgctgctccacgccgccaggccggaggttcagctgcttgagtctggcggaggactggttcaacctggcggaagcctgagactgtcttgtgccgccagcggcttcacctttagcagctacgccatgagctgggtccgacaggctcctggcaaaggactggaatgggtgtccagcatcagcggcagcggcgactacatctactacgccgatagcgtgaagggcagattcaccatcagccgggacatcagcaagaacaccctgtacctccagatgaacagcctgagagccgaggacaccgccgtgtactactgtgccaaagaaggcaccggcgctaacagcagcctggccgattatagaggccagggcacactggtcaccgtgtctagtggcggaggaagcggcggaggatctgaagtgcaactggtggaatctggagggggaagcgtgcaggcaggcggatctctgagactgtcctgcaccacatctggcagagccctgaatatgtacgtgatgggatggtttcggcaggctcccggcaacgagcgggaatttgtggccgctacaagcagcagcggcggcagcacaagctaccccgattctgtgaagggcagattcacaatctcccgcgataatgccaagaatactgtgtacctgcagatgaatagtctgaagcctgaagatacagccgcctacagatgtgccgccagcccctacgtgtccacccccaccatgaacatcctggaagagtacagatactggggcctgggaacacaagtgacagtgtccagcggtaccggcggaggcggatctggcggcggaggtagcggtggcggaggatctgaattcgacatccagatgacacagagccctagcagcctgtctgccagcgtgggagacagagtgaccatcacatgcaaggccagcgaccacatcaacaactggctggcctggtatcagcagaagcctggacaggcccctaagctgctgatctacggcgctaccacactggaaacaggcgtgcccagcagattttctggcagcggctctggcaccgactacaccctgacaatatccagcctccagcctgaggacttcgccacctactactgtcagcagagctggaacaccccttggacattcggccagggcaccaagctggaaatcaagagactcgagggacagcctaaggccaatcctaccgtgacactgttccctccaagcagcgaagaactccaggccaacaaggccacacttgtgtgcctgatctccgacttctaccctggggctgtgacagtggcttggaaggccgatggatctcctgtgaaagccggcgtggaaaccaccaagccatccaagcagagcaacaacaaatacgccgccagctcctacctgagcctgacacctgagcagtggaagtcccacagatcctacagctgccaagtgacccacgaaggcagcaccgtggaaaagacagtggcccctacagagtgcagccccatcaagaccgatgtgattacaatggaccccaaggacaactgctccaaggacgccaacgataccctgctgctccagctgaccaacaccagcgcctactacatgtacttgttgctgctgctgaagtccgtggtgtacttcgccatcatcacatgctgcctgctgcggagaaccgccttctgctgcaacggcgagaagtctagggccaagcgatctggatctggagcaacaaacttctcactactcaaacaagcaggtgacgtggaggagaatcccgggcctactagtatggactggatttggcgcatccttttccttgtcggcgctgctaccggcgcccattccgggccccaggttcagctgcaagagtctggcggaggacttgctcaagctggcggaagcctgagactgtcttgtgccgcctctggcagaaccttcagcatgggctggtttagacaggcccctggcaaagagagagagttcgtcgccgccatcacatacagcggcggcagcccttactacgcctcttctgtcagaggccggttcaccatcagccgggacaacgccaagaacaccgtgtacctccagatgaacagcctgaagccagaggacaccgccgtgtactactgtgccgccaatccaacctacggcagcgactggaatgccgagaattggggccagggcacccaagtgacagtgtctagtggatccggcggcggaggatctggcggaggcggatctgggggcggaggctctttcgaacaagttcagcttcaacagcctggcgctgagctggtcaaacctggcgcttctgtgaagatgagctgcaaagccagcggctacgccttcagcagctactggatcaactggatgaagcagaaacccggccagggactcgaatggatcggccaaatctatcccggcgacggcgacaccaactacaacggcaagttcaagggcagagccacactgaccgccgatacctctagcagcacagcctacatgcagctgagcagcctgaccagcgaagatagcgccgtgtacttctgtgcccggtccatcacaacagtcgtgggctgcgctatggactattggggccagggaacaagcgtgaccgtgtctagtacgcgtgcctctacaaagggaccctccgtgtttcctctggctcccagcagcaagtctacaagcggaggaacagccgctctgggctgcctggtcaaggattactttcccgagcctgtgaccgtgtcctggaatagcggagcactgacaagcggcgtgcacacctttccagccgtgctgcaaagcagcggcctgtactctctgagcagcgtggtcacagtgcctagctctagcctgggcacccagacctacatctgcaatgtgaaccacaagcctagcaacaccaaggtggacaagagagtggaacccaagagctgtgaagtgaaaaccgactccaccgaccacgtgaagcccaaagagacagagaacaccaagcagcccagcaagagctgccacaagcccaaggccatcgtgcacaccgagaaagtgaacatgatgagcctgaccgtgctgggcctgcggatgctgttcgccaaaaccgtggccgtgaacttcctgctgaccgccaagctgttcttcctc

SEQ ID NO: 5627 - DNA, 3111 bp, Artificial Sequence
  Synthetic Polynucloetide
atggccttaccagtgaccgccttgctcctgccgctggccttgctgctccacgccgccaggccggaggttcagctgcttgagtctggcggaggactggttcaacctggcggaagcctgagactgtcttgtgccgccagcggcttcacctttagcagctacgccatgagctgggtccgacaggctcctggcaaaggactggaatgggtgtccagcatcagcggcagcggcgactacatctactacgccgatagcgtgaagggcagattcaccatcagccgggacatcagcaagaacaccctgtacctccagatgaacagcctgagagccgaggacaccgccgtgtactactgtgccaaagaaggcaccggcgctaacagcagcctggccgattatagaggccagggcacactggtcaccgtgtctagtggcggaggaagcggcggaggatctgaagtgcaactggtggaatctggagggggaagcgtgcaggcaggcggatctctgagactgtcctgcaccacatctggcagagccctgaatatgtacgtgatgggatggtttcggcaggctcccggcaacgagcgggaatttgtggccgctacaagcagcagcggcggcagcacaagctaccccgattctgtgaagggcagattcacaatctcccgcgataatgccaagaatactgtgtacctgcagatgaatagtctgaagcctgaagatacagccgcctacagatgtgccgccagcccctacgtgtccacccccaccatgaacatcctggaagagtacagatactggggcctgggaacacaagtgacagtgtccagcggtaccggcggaggcggatctggcggcggaggtagcggtggcggaggatctgaattcgacatccagatgacacagagccctagcagcctgtctgccagcgtgggagacagagtgaccatcacatgcaaggccagcgaccacatcaacaactggctggcctggtatcagcagaagcctggacaggcccctaagctgctgatctacggcgctaccacactggaaacaggcgtgcccagcagattttctggcagcggctctggcaccgactacaccctgacaatatccagcctccagcctgaggacttcgccacctactactgtcagcagagctggaacaccccttggacattcggccagggcaccaagctggaaatcaagagactcgagggacagcctaaggccaatcctaccgtgacactgttccctccaagcagcgaagaactccaggccaacaaggccacacttgtgtgcctgatctccgacttctaccctggggctgtgacagtggcttggaaggccgatggatctcctgtgaaagccggcgtggaaaccaccaagccatccaagcagagcaacaacaaatacgccgccagctcctacctgagcctgacacctgagcagtggaagtcccacagatcctacagctgccaagtgacccacgaaggcagcaccgtggaaaagacagtggcccctacagagtgcagcggcagagccgattgcggcatcaccagcgccagctaccaccagggcgtgctgagcgccaccatcctgtacgagatcctgctgggcaaggccaccctgtacgccgtgctggtgtctgccctggtgctgatggctatggtcaagcggaaggacagccggggaagggccaagcgatctggatctggagcaacaaacttctcactactcaaacaagcaggtgacgtggaggagaatcccgggcctactagtatggactggatttggcgcatccttttccttgtcggcgctgctaccggcgcccattccgggccccaggttcagctgcaagagtctggcggaggacttgctcaagctggcggaagcctgagactgtcttgtgccgcctctggcagaaccttcagcatgggctggtttagacaggcccctggcaaagagagagagttcgtcgccgccatcacatacagcggcggcagcccttactacgcctcttctgtcagaggccggttcaccatcagccgggacaacgccaagaacaccgtgtacctccagatgaacagcctgaagccagaggacaccgccgtgtactactgtgccgccaatccaacctacggcagcgactggaatgccgagaattggggccagggcacccaagtgacagtgtctagtggatccggcggcggaggatctggcggaggcggatctgggggcggaggctctttcgaacaagttcagcttcaacagcctggcgctgagctggtcaaacctggcgcttctgtgaagatgagctgcaaagccagcggctacgccttcagcagctactggatcaactggatgaagcagaaacccggccagggactcgaatggatcggccaaatctatcccggcgacggcgacaccaactacaacggcaagttcaagggcagagccacactgaccgccgatacctctagcagcacagcctacatgcagctgagcagcctgaccagcgaagatagcgccgtgtacttctgtgcccggtccatcacaacagtcgtgggctgcgctatggactattggggccagggaacaagcgtgaccgtgtctagtacgcgtgcctctacaaagggaccctccgtgtttcctctggctcccagcagcaagtctacaagcggaggaacagccgctctgggctgcctggtcaaggattactttcccgagcctgtgaccgtgtcctggaatagcggagcactgacaagcggcgtgcacacctttccagccgtgctgcaaagcagcggcctgtactctctgagcagcgtggtcacagtgcctagctctagcctgggcacccagacctacatctgcaatgtgaaccacaagcctagcaacaccaaggtggacaagagagtggaacccaagagctgtatccccgaggacacattcttcccaagcagcgacgtgccctgcgacgtgaagctggtggaaaagagcttcgagacagacaccaacctgaacttccagaacctgagcgtgatcggcttcagaatcctgctgctgaaagtggccggctttaacctgctgatgaccctgcggctgtggtccagc

SEQ ID NO: 5628 - DNA, 3111 bp, Artificial Sequence
  Synthetic Polynucloetide
atggccttaccagtgaccgccttgctcctgccgctggccttgctgctccacgccgccaggccggaggttcagctgcttgagtctggcggaggactggttcaacctggcggaagcctgagactgtcttgtgccgccagcggcttcacctttagcagctacgccatgagctgggtccgacaggctcctggcaaaggactggaatgggtgtccagcatcagcggcagcggcgactacatctactacgccgatagcgtgaagggcagattcaccatcagccgggacatcagcaagaacaccctgtacctccagatgaacagcctgagagccgaggacaccgccgtgtactactgtgccaaagaaggcaccggcgctaacagcagcctggccgattatagaggccagggcacactggtcaccgtgtctagtggcggaggaagcggcggaggatctgaagtgcaactggtggaatctggagggggaagcgtgcaggcaggcggatctctgagactgtcctgcaccacatctggcagagccctgaatatgtacgtgatgggatggtttcggcaggctcccggcaacgagcgggaatttgtggccgctacaagcagcagcggcggcagcacaagctaccccgattctgtgaagggcagattcacaatctcccgcgataatgccaagaatactgtgtacctgcagatgaatagtctgaagcctgaagatacagccgcctacagatgtgccgccagcccctacgtgtccacccccaccatgaacatcctggaagagtacagatactggggcctgggaacacaagtgacagtgtccagcggtaccggcggaggcggatctggcggcggaggtagcggtggcggaggatctgaattcgacatccagatgacacagagccctagcagcctgtctgccagcgtgggagacagagtgaccatcacatgcaaggccagcgaccacatcaacaactggctggcctggtatcagcagaagcctggacaggcccctaagctgctgatctacggcgctaccacactggaaacaggcgtgcccagcagattttctggcagcggctctggcaccgactacaccctgacaatatccagcctccagcctgaggacttcgccacctactactgtcagcagagctggaacaccccttggacattcggccagggcaccaagctggaaatcaagagactcgagggacagcctaaggccaatcctaccgtgacactgttccctccaagcagcgaagaactccaggccaacaaggccacacttgtgtgcctgatctccgacttctaccctggggctgtgacagtggcttggaaggccgatggatctcctgtgaaagccggcgtggaaaccaccaagccatccaagcagagcaacaacaaatacgccgccagctcctacctgagcctgacacctgagcagtggaagtcccacagatcctacagctgccaagtgacccacgaaggcagcaccgtggaaaagacagtggcccctacagagtgcagcggcagagccgattgcggctttaccagcgagagctaccagcagggcgtgctgagcgccaccatcctgtacgagatcctgctgggcaaggccaccctgtacgccgtgctggtgtctgccctggtgctgatggctatggtcaagcggaaggacagccggggaagggccaagcgatctggatctggagcaacaaacttctcactactcaaacaagcaggtgacgtggaggagaatcccgggcctactagtatggactggatttggcgcatccttttccttgtcggcgctgctaccggcgcccattccgggccccaggttcagctgcaagagtctggcggaggacttgctcaagctggcggaagcctgagactgtcttgtgccgcctctggcagaaccttcagcatgggctggtttagacaggcccctggcaaagagagagagttcgtcgccgccatcacatacagcggcggcagcccttactacgcctcttctgtcagaggccggttcaccatcagccgggacaacgccaagaacaccgtgtacctccagatgaacagcctgaagccagaggacaccgccgtgtactactgtgccgccaatccaacctacggcagcgactggaatgccgagaattggggccagggcacccaagtgacagtgtctagtggatccggcggcggaggatctggcggaggcggatctgggggcggaggctctttcgaacaagttcagcttcaacagcctggcgctgagctggtcaaacctggcgcttctgtgaagatgagctgcaaagccagcggctacgccttcagcagctactggatcaactggatgaagcagaaacccggccagggactcgaatggatcggccaaatctatcccggcgacggcgacaccaactacaacggcaagttcaagggcagagccacactgaccgccgatacctctagcagcacagcctacatgcagctgagcagcctgaccagcgaagatagcgccgtgtacttctgtgcccggtccatcacaacagtcgtgggctgcgctatggactattggggccagggaacaagcgtgaccgtgtctagtacgcgtgcctctacaaagggaccctccgtgtttcctctggctcccagcagcaagtctacaagcggaggaacagccgctctgggctgcctggtcaaggattactttcccgagcctgtgaccgtgtcctggaatagcggagcactgacaagcggcgtgcacacctttccagccgtgctgcaaagcagcggcctgtactctctgagcagcgtggtcacagtgcctagctctagcctgggcacccagacctacatctgcaatgtgaaccacaagcctagcaacaccaaggtggacaagagagtggaacccaagagctgtatccccgaggacacattcttcccaagccccgagagcagctgcgacgtgaagctggtggaaaagagcttcgagacagacaccaacctgaacttccagaacctgagcgtgatcggcttcagaatcctgctgctgaaagtggccggctttaacctgctgatgaccctgcggctgtggtccagc

SEQ ID NO: 5629 - DNA, 3012 bp, Artificial Sequence
  Synthetic Polynucloetide
atggccttaccagtgaccgccttgctcctgccgctggccttgctgctccacgccgccaggccggaggttcagctgcttgagtctggcggaggactggttcaacctggcggaagcctgagactgtcttgtgccgccagcggcttcacctttagcagctacgccatgagctgggtccgacaggctcctggcaaaggactggaatgggtgtccagcatcagcggcagcggcgactacatctactacgccgatagcgtgaagggcagattcaccatcagccgggacatcagcaagaacaccctgtacctccagatgaacagcctgagagccgaggacaccgccgtgtactactgtgccaaagaaggcaccggcgctaacagcagcctggccgattatagaggccagggcacactggtcaccgtgtctagtggcggaggaagcggcggaggatctgaagtgcaactggtggaatctggagggggaagcgtgcaggcaggcggatctctgagactgtcctgcaccacatctggcagagccctgaatatgtacgtgatgggatggtttcggcaggctcccggcaacgagcgggaatttgtggccgctacaagcagcagcggcggcagcacaagctaccccgattctgtgaagggcagattcacaatctcccgcgataatgccaagaatactgtgtacctgcagatgaatagtctgaagcctgaagatacagccgcctacagatgtgccgccagcccctacgtgtccacccccaccatgaacatcctggaagagtacagatactggggcctgggaacacaagtgacagtgtccagcctcgagggacagcctaaggccaatcctaccgtgacactgttccctccaagcagcgaagaactccaggccaacaaggccacacttgtgtgcctgatctccgacttctaccctggggctgtgacagtggcttggaaggccgatggatctcctgtgaaagccggcgtggaaaccaccaagccatccaagcagagcaacaacaaatacgccgccagctcctacctgagcctgacacctgagcagtggaagtcccacagatcctacagctgccaagtgacccacgaaggcagcaccgtggaaaagacagtggcccctacagagtgcagcggcagagccgattgcggctttaccagcgagagctaccagcagggcgtgctgagcgccaccatcctgtacgagatcctgctgggcaaggccaccctgtacgccgtgctggtgtctgccctggtgctgatggctatggtcaagcggaaggacagccggggaagggccaagcgatctggatctggagcaacaaacttctcactactcaaacaagcaggtgacgtggaggagaatcccgggcctactagtatggactggatttggcgcatccttttccttgtcggcgctgctaccggcgcgcattccgggccccaggttcagctgcaagagtctggcggaggacttgctcaagctggcggaagcctgagactgtcttgtgccgcctctggcagaaccttcagcatgggctggtttagacaggcccctggcaaagagagagagttcgtcgccgccatcacatacagcggcggcagcccttactacgcctcttctgtcagaggccggttcaccatcagccgggacaacgccaagaacaccgtgtacctccagatgaacagcctgaagccagaggacaccgccgtgtactactgtgccgccaatccaacctacggcagcgactggaatgccgagaattggggccagggcacccaagtgacagtgtctagtacgcgtgcctctacaaagggaccctccgtgtttcctctggctcccagcagcaagtctacaagcggaggaacagccgctctgggctgcctggtcaaggattactttcccgagcctgtgaccgtgtcctggaatagcggagcactgacaagcggcgtgcacacctttccagccgtgctgcaaagcagcggcctgtactctctgagcagcgtggtcacagtgcctagctctagcctgggcacccagacctacatctgcaatgtgaaccacaagcctagcaacaccaaggtggacaagagagtggaacccaagagctgtatccccgaggacacattcttcccaagccccgagagcagctgcgacgtgaagctggtggaaaagagcttcgagacagacaccaacctgaacttccagaacctgagcgtgatcggcttcagaatcctgctgctgaaagtggccggctttaacctgctgatgaccctgcggctgtggtccagccgcgccaagagaagcggatctggcgtgaagcagaccctgaatttcgacctgctgaagctggctggcgacgtggaatccaacccaggcccttctagaggccatatgaccgagtacaagcccacggtgcgcctcgccacccgcgacgacgtccccagggccgtacgcaccctcgccgccgcgttcgccgactaccccgccacgcgccacaccgtcgatccggaccgccacatcgagcgggtcaccgagctgcaagaactcttcctcacgcgcgtcgggctcgacatcggcaaggtgtgggtcgcggacgacggcgccgcggtggcggtctggaccacgccggagagcgtcgaagcgggggcggtgttcgccgagatcggcccgcgcatggccgagttgagcggttcccggctggccgcgcagcaacagatggaaggcctcctggcgccgcaccggcccaaggagcccgcgtggttcctggccaccgtcggcgtctcgcccgaccaccagggcaagggtctgggcagcgccgtcgtgctccccggagtggaggcggccgagcgcgccggggtgcccgccttcctggagacctccgcgccccgcaacctccccttctacgagcggctcggcttcaccgtcaccgccgacgtcgaggtgcccgaaggaccgcgcacctggtgcatgacccgcaagcccggtgcctga

SEQ ID NO: 5630 - DNA, 2310 bp, Artificial Sequence
  Synthetic Polynucloetide
atggccttaccagtgaccgccttgctcctgccgctggccttgctgctccacgccgccaggccggaggttcagctgcttgagtctggcggaggactggttcaacctggcggaagcctgagactgtcttgtgccgccagcggcttcacctttagcagctacgccatgagctgggtccgacaggctcctggcaaaggactggaatgggtgtccagcatcagcggcagcggcgactacatctactacgccgatagcgtgaagggcagattcaccatcagccgggacatcagcaagaacaccctgtacctccagatgaacagcctgagagccgaggacaccgccgtgtactactgtgccaaagaaggcaccggcgctaacagcagcctggccgattatagaggccagggcacactggtcaccgtgtctagtggcggaggaagcggcggaggatctgaagtgcaactggtggaatctggagggggaagcgtgcaggcaggcggatctctgagactgtcctgcaccacatctggcagagccctgaatatgtacgtgatgggatggtttcggcaggctcccggcaacgagcgggaatttgtggccgctacaagcagcagcggcggcagcacaagctaccccgattctgtgaagggcagattcacaatctcccgcgataatgccaagaatactgtgtacctgcagatgaatagtctgaagcctgaagatacagccgcctacagatgtgccgccagcccctacgtgtccacccccaccatgaacatcctggaagagtacagatactggggcctgggaacacaagtgacagtgtccagcctcgagggacagcctaaggccaatcctaccgtgacactgttccctccaagcagcgaagaactccaggccaacaaggccacacttgtgtgcctgatctccgacttctaccctggggctgtgacagtggcttggaaggccgatggatctcctgtgaaagccggcgtggaaaccaccaagccatccaagcagagcaacaacaaatacgccgccagctcctacctgagcctgacacctgagcagtggaagtcccacagatcctacagctgccaagtgacccacgaaggcagcaccgtggaaaagacagtggcccctacagagtgcagcggcagagccgattgcggctttaccagcgagagctaccagcagggcgtgctgagcgccaccatcctgtacgagatcctgctgggcaaggccaccctgtacgccgtgctggtgtctgccctggtgctgatggctatggtcaagcggaaggacagccggggaagggccaagcgatctggatctggagcaacaaacttctcactactcaaacaagcaggtgacgtggaggagaatcccgggcctactagtatggactggatttggcgcatccttttccttgtcggcgctgctaccggcgcgcattccgggccccaggttcagctgcaagagtctggcggaggacttgctcaagctggcggaagcctgagactgtcttgtgccgcctctggcagaaccttcagcatgggctggtttagacaggcccctggcaaagagagagagttcgtcgccgccatcacatacagcggcggcagcccttactacgcctcttctgtcagaggccggttcaccatcagccgggacaacgccaagaacaccgtgtacctccagatgaacagcctgaagccagaggacaccgccgtgtactactgtgccgccaatccaacctacggcagcgactggaatgccgagaattggggccagggcacccaagtgacagtgtctagtacgcgtgcctctacaaagggaccctccgtgtttcctctggctcccagcagcaagtctacaagcggaggaacagccgctctgggctgcctggtcaaggattactttcccgagcctgtgaccgtgtcctggaatagcggagcactgacaagcggcgtgcacacctttccagccgtgctgcaaagcagcggcctgtactctctgagcagcgtggtcacagtgcctagctctagcctgggcacccagacctacatctgcaatgtgaaccacaagcctagcaacaccaaggtggacaagagagtggaacccaagagctgtatccccgaggacacattcttcccaagccccgagagcagctgcgacgtgaagctggtggaaaagagcttcgagacagacaccaacctgaacttccagaacctgagcgtgatcggcttcagaatcctgctgctgaaagtggccggctttaacctgctgatgaccctgcggctgtggtccagc

SEQ ID NO: 5631 - DNA, 2397 bp, Artificial Sequence
  Synthetic Polynucloetide
atggccttaccagtgaccgccttgctcctgccgctggccttgctgctccacgccgccaggccggaggttcagctgcttgagtctggcggaggactggttcaacctggcggaagcctgagactgtcttgtgccgccagcggcttcacctttagcagctacgccatgagctgggtccgacaggctcctggcaaaggactggaatgggtgtccagcatcagcggcagcggcgactacatctactacgccgatagcgtgaagggcagattcaccatcagccgggacatcagcaagaacaccctgtacctccagatgaacagcctgagagccgaggacaccgccgtgtactactgtgccaaagaaggcaccggcgctaacagcagcctggccgattatagaggccagggcacactggtcaccgtgtctagtggcggaggaagcggcggaggatctgaagtgcaactggtggaatctggagggggaagcgtgcaggcaggcggatctctgagactgtcctgcaccacatctggcagagccctgaatatgtacgtgatgggatggtttcggcaggctcccggcaacgagcgggaatttgtggccgctacaagcagcagcggcggcagcacaagctaccccgattctgtgaagggcagattcacaatctcccgcgataatgccaagaatactgtgtacctgcagatgaatagtctgaagcctgaagatacagccgcctacagatgtgccgccagcccctacgtgtccacccccaccatgaacatcctggaagagtacagatactggggcctgggaacacaagtgacagtgtccagcctcgagggatctggcagagccgattgcggctttaccagcgagagctaccagcagggcgtgctgagcgccaccatcctgtacgagatcctgctgggcaaggccaccctgtacgccgtgctggtgtctgccctggtgctgatggctatggtcaagcggaaggacagccggggaagggccaagcgatctggatctggagcaacaaacttctcactactcaaacaagcaggtgacgtggaggagaatcccgggcctactagtatggactggatttggcgcatccttttccttgtcggcgctgctaccggcgcgcattccgggccccaggttcagctgcaagagtctggcggaggacttgctcaagctggcggaagcctgagactgtcttgtgccgcctctggcagaaccttcagcatgggctggtttagacaggcccctggcaaagagagagagttcgtcgccgccatcacatacagcggcggcagcccttactacgcctcttctgtcagaggccggttcaccatcagccgggacaacgccaagaacaccgtgtacctccagatgaacagcctgaagccagaggacaccgccgtgtactactgtgccgccaatccaacctacggcagcgactggaatgccgagaattggggccagggcacccaagtgacagtgtctagtacgcgtggcagcatccccgaggacacattcttcccaagccccgagagcagctgcgacgtgaagctggtggaaaagagcttcgagacagacaccaacctgaacttccagaacctgagcgtgatcggcttcagaatcctgctgctgaaagtggccggctttaacctgctgatgaccctgcggctgtggtccagccgcgccaagagaagcggatctggcgtgaagcagaccctgaatttcgacctgctgaagctggctggcgacgtggaatccaacccaggcccttctagaggccatatgaccgagtacaagcccacggtgcgcctcgccacccgcgacgacgtccccagggccgtacgcaccctcgccgccgcgttcgccgactaccccgccacgcgccacaccgtcgatccggaccgccacatcgagcgggtcaccgagctgcaagaactcttcctcacgcgcgtcgggctcgacatcggcaaggtgtgggtcgcggacgacggcgccgcggtggcggtctggaccacgccggagagcgtcgaagcgggggcggtgttcgccgagatcggcccgcgcatggccgagttgagcggttcccggctggccgcgcagcaacagatggaaggcctcctggcgccgcaccggcccaaggagcccgcgtggttcctggccaccgtcggcgtctcgcccgaccaccagggcaagggtctgggcagcgccgtcgtgctccccggagtggaggcggccgagcgcgccggggtgcccgccttcctggagacctccgcgccccgcaacctccccttctacgagcggctcggcttcaccgtcaccgccgacgtcgaggtgcccgaaggaccgcgcacctggtgcatgacccgcaagcccggtgcctga

SEQ ID NO: 5632 - DNA, 1695 bp, Artificial Sequence
  Synthetic Polynucloetide
atggccttaccagtgaccgccttgctcctgccgctggccttgctgctccacgccgccaggccggaggttcagctgcttgagtctggcggaggactggttcaacctggcggaagcctgagactgtcttgtgccgccagcggcttcacctttagcagctacgccatgagctgggtccgacaggctcctggcaaaggactggaatgggtgtccagcatcagcggcagcggcgactacatctactacgccgatagcgtgaagggcagattcaccatcagccgggacatcagcaagaacaccctgtacctccagatgaacagcctgagagccgaggacaccgccgtgtactactgtgccaaagaaggcaccggcgctaacagcagcctggccgattatagaggccagggcacactggtcaccgtgtctagtggcggaggaagcggcggaggatctgaagtgcaactggtggaatctggagggggaagcgtgcaggcaggcggatctctgagactgtcctgcaccacatctggcagagccctgaatatgtacgtgatgggatggtttcggcaggctcccggcaacgagcgggaatttgtggccgctacaagcagcagcggcggcagcacaagctaccccgattctgtgaagggcagattcacaatctcccgcgataatgccaagaatactgtgtacctgcagatgaatagtctgaagcctgaagatacagccgcctacagatgtgccgccagcccctacgtgtccacccccaccatgaacatcctggaagagtacagatactggggcctgggaacacaagtgacagtgtccagcctcgagggatctggcagagccgattgcggctttaccagcgagagctaccagcagggcgtgctgagcgccaccatcctgtacgagatcctgctgggcaaggccaccctgtacgccgtgctggtgtctgccctggtgctgatggctatggtcaagcggaaggacagccggggaagggccaagcgatctggatctggagcaacaaacttctcactactcaaacaagcaggtgacgtggaggagaatcccgggcctactagtatggactggatttggcgcatccttttccttgtcggcgctgctaccggcgcgcattccgggccccaggttcagctgcaagagtctggcggaggacttgctcaagctggcggaagcctgagactgtcttgtgccgcctctggcagaaccttcagcatgggctggtttagacaggcccctggcaaagagagagagttcgtcgccgccatcacatacagcggcggcagcccttactacgcctcttctgtcagaggccggttcaccatcagccgggacaacgccaagaacaccgtgtacctccagatgaacagcctgaagccagaggacaccgccgtgtactactgtgccgccaatccaacctacggcagcgactggaatgccgagaattggggccagggcacccaagtgacagtgtctagtacgcgtggcagcatccccgaggacacattcttcccaagccccgagagcagctgcgacgtgaagctggtggaaaagagcttcgagacagacaccaacctgaacttccagaacctgagcgtgatcggcttcagaatcctgctgctgaaagtggccggctttaacctgctgatgaccctgcggctgtggtccagc

SEQ ID NO: 5633 - DNA, 2424 bp, Artificial Sequence
  Synthetic Polynucloetide
atggccttaccagtgaccgccttgctcctgccgctggccttgctgctccacgccgccaggccggaggttcagctgcttgagtctggcggaggactggttcaacctggcggaagcctgagactgtcttgtgccgccagcggcttcacctttagcagctacgccatgagctgggtccgacaggctcctggcaaaggactggaatgggtgtccagcatcagcggcagcggcgactacatctactacgccgatagcgtgaagggcagattcaccatcagccgggacatcagcaagaacaccctgtacctccagatgaacagcctgagagccgaggacaccgccgtgtactactgtgccaaagaaggcaccggcgctaacagcagcctggccgattatagaggccagggcacactggtcaccgtgtctagtggcggaggaagcggcggaggatctgaagtgcaactggtggaatctggagggggaagcgtgcaggcaggcggatctctgagactgtcctgcaccacatctggcagagccctgaatatgtacgtgatgggatggtttcggcaggctcccggcaacgagcgggaatttgtggccgctacaagcagcagcggcggcagcacaagctaccccgattctgtgaagggcagattcacaatctcccgcgataatgccaagaatactgtgtacctgcagatgaatagtctgaagcctgaagatacagccgcctacagatgtgccgccagcccctacgtgtccacccccaccatgaacatcctggaagagtacagatactggggcctgggaacacaagtgacagtgtccagcctcgaggacaaaactcacacatgcccaccgtgcccagcaggcagagccgattgcggctttaccagcgagagctaccagcagggcgtgctgagcgccaccatcctgtacgagatcctgctgggcaaggccaccctgtacgccgtgctggtgtctgccctggtgctgatggctatggtcaagcggaaggacagccggggaagggccaagcgatctggatctggagcaacaaacttctcactactcaaacaagcaggtgacgtggaggagaatcccgggcctactagtatggactggatttggcgcatccttttccttgtcggcgctgctaccggcgcgcattccgggccccaggttcagctgcaagagtctggcggaggacttgctcaagctggcggaagcctgagactgtcttgtgccgcctctggcagaaccttcagcatgggctggtttagacaggcccctggcaaagagagagagttcgtcgccgccatcacatacagcggcggcagcccttactacgcctcttctgtcagaggccggttcaccatcagccgggacaacgccaagaacaccgtgtacctccagatgaacagcctgaagccagaggacaccgccgtgtactactgtgccgccaatccaacctacggcagcgactggaatgccgagaattggggccagggcacccaagtgacagtgtctagtacgcgtggcagcatccccgaggacacattcttcccaagccccgagagcagctgcgacgtgaagctggtggaaaagagcttcgagacagacaccaacctgaacttccagaacctgagcgtgatcggcttcagaatcctgctgctgaaagtggccggctttaacctgctgatgaccctgcggctgtggtccagccgcgccaagagaagcggatctggcgtgaagcagaccctgaatttcgacctgctgaagctggctggcgacgtggaatccaacccaggcccttctagaggccatatgaccgagtacaagcccacggtgcgcctcgccacccgcgacgacgtccccagggccgtacgcaccctcgccgccgcgttcgccgactaccccgccacgcgccacaccgtcgatccggaccgccacatcgagcgggtcaccgagctgcaagaactcttcctcacgcgcgtcgggctcgacatcggcaaggtgtgggtcgcggacgacggcgccgcggtggcggtctggaccacgccggagagcgtcgaagcgggggcggtgttcgccgagatcggcccgcgcatggccgagttgagcggttcccggctggccgcgcagcaacagatggaaggcctcctggcgccgcaccggcccaaggagcccgcgtggttcctggccaccgtcggcgtctcgcccgaccaccagggcaagggtctgggcagcgccgtcgtgctccccggagtggaggcggccgagcgcgccggggtgcccgccttcctggagacctccgcgccccgcaacctccccttctacgagcggctcggcttcaccgtcaccgccgacgtcgaggtgcccgaaggaccgcgcacctggtgcatgacccgcaagcccggtgcctga

SEQ ID NO: 5634 - DNA, 2424 bp, Artificial Sequence
  Synthetic Polynucloetide
atggccttaccagtgaccgccttgctcctgccgctggccttgctgctccacgccgccaggccggaggttcagctgcttgagtctggcggaggactggttcaacctggcggaagcctgagactgtcttgtgccgccagcggcttcacctttagcagctacgccatgagctgggtccgacaggctcctggcaaaggactggaatgggtgtccagcatcagcggcagcggcgactacatctactacgccgatagcgtgaagggcagattcaccatcagccgggacatcagcaagaacaccctgtacctccagatgaacagcctgagagccgaggacaccgccgtgtactactgtgccaaagaaggcaccggcgctaacagcagcctggccgattatagaggccagggcacactggtcaccgtgtctagtggcggaggaagcggcggaggatctgaagtgcaactggtggaatctggagggggaagcgtgcaggcaggcggatctctgagactgtcctgcaccacatctggcagagccctgaatatgtacgtgatgggatggtttcggcaggctcccggcaacgagcgggaatttgtggccgctacaagcagcagcggcggcagcacaagctaccccgattctgtgaagggcagattcacaatctcccgcgataatgccaagaatactgtgtacctgcagatgaatagtctgaagcctgaagatacagccgcctacagatgtgccgccagcccctacgtgtccacccccaccatgaacatcctggaagagtacagatactggggcctgggaacacaagtgacagtgtccagcctcgagggatctggcagagccgattgcggctttaccagcgagagctaccagcagggcgtgctgagcgccaccatcctgtacgagatcctgctgggcaaggccaccctgtacgccgtgctggtgtctgccctggtgctgatggctatggtcaagcggaaggacagccggggaagggccaagcgatctggatctggagcaacaaacttctcactactcaaacaagcaggtgacgtggaggagaatcccgggcctactagtatggactggatttggcgcatccttttccttgtcggcgctgctaccggcgcgcattccgggccccaggttcagctgcaagagtctggcggaggacttgctcaagctggcggaagcctgagactgtcttgtgccgcctctggcagaaccttcagcatgggctggtttagacaggcccctggcaaagagagagagttcgtcgccgccatcacatacagcggcggcagcccttactacgcctcttctgtcagaggccggttcaccatcagccgggacaacgccaagaacaccgtgtacctccagatgaacagcctgaagccagaggacaccgccgtgtactactgtgccgccaatccaacctacggcagcgactggaatgccgagaattggggccagggcacccaagtgacagtgtctagtacgcgtgataaaactcatacctgtccgccatgcccggcaatccccgaggacacattcttcccaagccccgagagcagctgcgacgtgaagctggtggaaaagagcttcgagacagacaccaacctgaacttccagaacctgagcgtgatcggcttcagaatcctgctgctgaaagtggccggctttaacctgctgatgaccctgcggctgtggtccagccgcgccaagagaagcggatctggcgtgaagcagaccctgaatttcgacctgctgaagctggctggcgacgtggaatccaacccaggcccttctagaggccatatgaccgagtacaagcccacggtgcgcctcgccacccgcgacgacgtccccagggccgtacgcaccctcgccgccgcgttcgccgactaccccgccacgcgccacaccgtcgatccggaccgccacatcgagcgggtcaccgagctgcaagaactcttcctcacgcgcgtcgggctcgacatcggcaaggtgtgggtcgcggacgacggcgccgcggtggcggtctggaccacgccggagagcgtcgaagcgggggcggtgttcgccgagatcggcccgcgcatggccgagttgagcggttcccggctggccgcgcagcaacagatggaaggcctcctggcgccgcaccggcccaaggagcccgcgtggttcctggccaccgtcggcgtctcgcccgaccaccagggcaagggtctgggcagcgccgtcgtgctccccggagtggaggcggccgagcgcgccggggtgcccgccttcctggagacctccgcgccccgcaacctccccttctacgagcggctcggcttcaccgtcaccgccgacgtcgaggtgcccgaaggaccgcgcacctggtgcatgacccgcaagcccggtgcctga

SEQ ID NO: 5635 - DNA, 2451 bp, Artificial Sequence
  Synthetic Polynucloetide
atggccttaccagtgaccgccttgctcctgccgctggccttgctgctccacgccgccaggccggaggttcagctgcttgagtctggcggaggactggttcaacctggcggaagcctgagactgtcttgtgccgccagcggcttcacctttagcagctacgccatgagctgggtccgacaggctcctggcaaaggactggaatgggtgtccagcatcagcggcagcggcgactacatctactacgccgatagcgtgaagggcagattcaccatcagccgggacatcagcaagaacaccctgtacctccagatgaacagcctgagagccgaggacaccgccgtgtactactgtgccaaagaaggcaccggcgctaacagcagcctggccgattatagaggccagggcacactggtcaccgtgtctagtggcggaggaagcggcggaggatctgaagtgcaactggtggaatctggagggggaagcgtgcaggcaggcggatctctgagactgtcctgcaccacatctggcagagccctgaatatgtacgtgatgggatggtttcggcaggctcccggcaacgagcgggaatttgtggccgctacaagcagcagcggcggcagcacaagctaccccgattctgtgaagggcagattcacaatctcccgcgataatgccaagaatactgtgtacctgcagatgaatagtctgaagcctgaagatacagccgcctacagatgtgccgccagcccctacgtgtccacccccaccatgaacatcctggaagagtacagatactggggcctgggaacacaagtgacagtgtccagcctcgaggacaaaactcacacatgcccaccgtgcccagcaggcagagccgattgcggctttaccagcgagagctaccagcagggcgtgctgagcgccaccatcctgtacgagatcctgctgggcaaggccaccctgtacgccgtgctggtgtctgccctggtgctgatggctatggtcaagcggaaggacagccggggaagggccaagcgatctggatctggagcaacaaacttctcactactcaaacaagcaggtgacgtggaggagaatcccgggcctactagtatggactggatttggcgcatccttttccttgtcggcgctgctaccggcgcgcattccgggccccaggttcagctgcaagagtctggcggaggacttgctcaagctggcggaagcctgagactgtcttgtgccgcctctggcagaaccttcagcatgggctggtttagacaggcccctggcaaagagagagagttcgtcgccgccatcacatacagcggcggcagcccttactacgcctcttctgtcagaggccggttcaccatcagccgggacaacgccaagaacaccgtgtacctccagatgaacagcctgaagccagaggacaccgccgtgtactactgtgccgccaatccaacctacggcagcgactggaatgccgagaattggggccagggcacccaagtgacagtgtctagtacgcgtgataaaactcatacctgtccgccatgcccggcaatccccgaggacacattcttcccaagccccgagagcagctgcgacgtgaagctggtggaaaagagcttcgagacagacaccaacctgaacttccagaacctgagcgtgatcggcttcagaatcctgctgctgaaagtggccggctttaacctgctgatgaccctgcggctgtggtccagccgcgccaagagaagcggatctggcgtgaagcagaccctgaatttcgacctgctgaagctggctggcgacgtggaatccaacccaggcccttctagaggccatatgaccgagtacaagcccacggtgcgcctcgccacccgcgacgacgtccccagggccgtacgcaccctcgccgccgcgttcgccgactaccccgccacgcgccacaccgtcgatccggaccgccacatcgagcgggtcaccgagctgcaagaactcttcctcacgcgcgtcgggctcgacatcggcaaggtgtgggtcgcggacgacggcgccgcggtggcggtctggaccacgccggagagcgtcgaagcgggggcggtgttcgccgagatcggcccgcgcatggccgagttgagcggttcccggctggccgcgcagcaacagatggaaggcctcctggcgccgcaccggcccaaggagcccgcgtggttcctggccaccgtcggcgtctcgcccgaccaccagggcaagggtctgggcagcgccgtcgtgctccccggagtggaggcggccgagcgcgccggggtgcccgccttcctggagacctccgcgccccgcaacctccccttctacgagcggctcggcttcaccgtcaccgccgacgtcgaggtgcccgaaggaccgcgcacctggtgcatgacccgcaagcccggtgcctga

SEQ ID NO: 5636 - DNA, 1749 bp, Artificial Sequence
  Synthetic Polynucloetide
atggccttaccagtgaccgccttgctcctgccgctggccttgctgctccacgccgccaggccggaggttcagctgcttgagtctggcggaggactggttcaacctggcggaagcctgagactgtcttgtgccgccagcggcttcacctttagcagctacgccatgagctgggtccgacaggctcctggcaaaggactggaatgggtgtccagcatcagcggcagcggcgactacatctactacgccgatagcgtgaagggcagattcaccatcagccgggacatcagcaagaacaccctgtacctccagatgaacagcctgagagccgaggacaccgccgtgtactactgtgccaaagaaggcaccggcgctaacagcagcctggccgattatagaggccagggcacactggtcaccgtgtctagtggcggaggaagcggcggaggatctgaagtgcaactggtggaatctggagggggaagcgtgcaggcaggcggatctctgagactgtcctgcaccacatctggcagagccctgaatatgtacgtgatgggatggtttcggcaggctcccggcaacgagcgggaatttgtggccgctacaagcagcagcggcggcagcacaagctaccccgattctgtgaagggcagattcacaatctcccgcgataatgccaagaatactgtgtacctgcagatgaatagtctgaagcctgaagatacagccgcctacagatgtgccgccagcccctacgtgtccacccccaccatgaacatcctggaagagtacagatactggggcctgggaacacaagtgacagtgtccagcctcgaggacaaaactcacacatgcccaccgtgcccagcaggcagagccgattgcggctttaccagcgagagctaccagcagggcgtgctgagcgccaccatcctgtacgagatcctgctgggcaaggccaccctgtacgccgtgctggtgtctgccctggtgctgatggctatggtcaagcggaaggacagccggggaagggccaagcgatctggatctggagcaacaaacttctcactactcaaacaagcaggtgacgtggaggagaatcccgggcctactagtatggactggatttggcgcatccttttccttgtcggcgctgctaccggcgcgcattccgggccccaggttcagctgcaagagtctggcggaggacttgctcaagctggcggaagcctgagactgtcttgtgccgcctctggcagaaccttcagcatgggctggtttagacaggcccctggcaaagagagagagttcgtcgccgccatcacatacagcggcggcagcccttactacgcctcttctgtcagaggccggttcaccatcagccgggacaacgccaagaacaccgtgtacctccagatgaacagcctgaagccagaggacaccgccgtgtactactgtgccgccaatccaacctacggcagcgactggaatgccgagaattggggccagggcacccaagtgacagtgtctagtacgcgtgataaaactcatacctgtccgccatgcccggcaatccccgaggacacattcttcccaagccccgagagcagctgcgacgtgaagctggtggaaaagagcttcgagacagacaccaacctgaacttccagaacctgagcgtgatcggcttcagaatcctgctgctgaaagtggccggctttaacctgctgatgaccctgcggctgtggtccagc

SEQ ID NO: 5637 - DNA, 1722 bp, Artificial Sequence
  Synthetic Polynucloetide
atggccttaccagtgaccgccttgctcctgccgctggccttgctgctccacgccgccaggccggaggttcagctgcttgagtctggcggaggactggttcaacctggcggaagcctgagactgtcttgtgccgccagcggcttcacctttagcagctacgccatgagctgggtccgacaggctcctggcaaaggactggaatgggtgtccagcatcagcggcagcggcgactacatctactacgccgatagcgtgaagggcagattcaccatcagccgggacatcagcaagaacaccctgtacctccagatgaacagcctgagagccgaggacaccgccgtgtactactgtgccaaagaaggcaccggcgctaacagcagcctggccgattatagaggccagggcacactggtcaccgtgtctagtggcggaggaagcggcggaggatctgaagtgcaactggtggaatctggagggggaagcgtgcaggcaggcggatctctgagactgtcctgcaccacatctggcagagccctgaatatgtacgtgatgggatggtttcggcaggctcccggcaacgagcgggaatttgtggccgctacaagcagcagcggcggcagcacaagctaccccgattctgtgaagggcagattcacaatctcccgcgataatgccaagaatactgtgtacctgcagatgaatagtctgaagcctgaagatacagccgcctacagatgtgccgccagcccctacgtgtccacccccaccatgaacatcctggaagagtacagatactggggcctgggaacacaagtgacagtgtccagcctcgagggatctggcagagccgattgcggctttaccagcgagagctaccagcagggcgtgctgagcgccaccatcctgtacgagatcctgctgggcaaggccaccctgtacgccgtgctggtgtctgccctggtgctgatggctatggtcaagcggaaggacagccggggaagggccaagcgatctggatctggagcaacaaacttctcactactcaaacaagcaggtgacgtggaggagaatcccgggcctactagtatggactggatttggcgcatccttttccttgtcggcgctgctaccggcgcgcattccgggccccaggttcagctgcaagagtctggcggaggacttgctcaagctggcggaagcctgagactgtcttgtgccgcctctggcagaaccttcagcatgggctggtttagacaggcccctggcaaagagagagagttcgtcgccgccatcacatacagcggcggcagcccttactacgcctcttctgtcagaggccggttcaccatcagccgggacaacgccaagaacaccgtgtacctccagatgaacagcctgaagccagaggacaccgccgtgtactactgtgccgccaatccaacctacggcagcgactggaatgccgagaattggggccagggcacccaagtgacagtgtctagtacgcgtgataaaactcatacctgtccgccatgcccggcaatccccgaggacacattcttcccaagccccgagagcagctgcgacgtgaagctggtggaaaagagcttcgagacagacaccaacctgaacttccagaacctgagcgtgatcggcttcagaatcctgctgctgaaagtggccggctttaacctgctgatgaccctgcggctgtggtccagc

SEQ ID NO: 5638 - DNA, 3078 bp, Artificial Sequence
  Synthetic Polynucloetide
atggccttaccagtgaccgccttgctcctgccgctggccttgctgctccacgccgccaggccggaggttcagctgcttgagtctggcggaggactggttcaacctggcggaagcctgagactgtcttgtgccgccagcggcttcacctttagcagctacgccatgagctgggtccgacaggctcctggcaaaggactggaatgggtgtccagcatcagcggcagcggcgactacatctactacgccgatagcgtgaagggcagattcaccatcagccgggacatcagcaagaacaccctgtacctccagatgaacagcctgagagccgaggacaccgccgtgtactactgtgccaaagaaggcaccggcgctaacagcagcctggccgattatagaggccagggcacactggtcaccgtgtctagtggcggaggaagcggcggaggatctgaagtgcaactggtggaatctggagggggaagcgtgcaggcaggcggatctctgagactgtcctgcaccacatctggcagagccctgaatatgtacgtgatgggatggtttcggcaggctcccggcaacgagcgggaatttgtggccgctacaagcagcagcggcggcagcacaagctaccccgattctgtgaagggcagattcacaatctcccgcgataatgccaagaatactgtgtacctgcagatgaatagtctgaagcctgaagatacagccgcctacagatgtgccgccagcccctacgtgtccacccccaccatgaacatcctggaagagtacagatactggggcctgggaacacaagtgacagtgtccagcctcgagggacagcctaaggccaatcctaccgtgacactgttccctccaagcagcgaagaactccaggccaacaaggccacacttgtgtgcctgatctccgacttctaccctggggctgtgacagtggcttggaaggccgatggatctcctgtgaaagccggcgtggaaaccaccaagccatccaagcagagcaacaacaaatacgccgccagctcctacctgagcctgacacctgagcagtggaagtcccacagatcctacagctgccaagtgacccacgaaggcagcaccgtggaaaagacagtggcccctacagagtgcagccccatcaagaccgatgtgattacaatggaccccaaggacaactgctccaaggacgccaacgataccctgctgctccagctgaccaacaccagcgcctactacatgtacttgttgctgctgctgaagtccgtggtgtacttcgccatcatcacatgctgcctgctgcggagaaccgccttctgctgcaacggcgagaagtctagggccaagcgatctggatctggagcaacaaacttctcactactcaaacaagcaggtgacgtggaggagaatcccgggcctactagtatggactggatttggcgcatccttttccttgtcggcgctgctaccggcgcgcattccgggccccaggttcagctgcaagagtctggcggaggacttgctcaagctggcggaagcctgagactgtcttgtgccgcctctggcagaaccttcagcatgggctggtttagacaggcccctggcaaagagagagagttcgtcgccgccatcacatacagcggcggcagcccttactacgcctcttctgtcagaggccggttcaccatcagccgggacaacgccaagaacaccgtgtacctccagatgaacagcctgaagccagaggacaccgccgtgtactactgtgccgccaatccaacctacggcagcgactggaatgccgagaattggggccagggcacccaagtgacagtgtctagtacgcgtgcctctacaaagggaccctccgtgtttcctctggctcccagcagcaagtctacaagcggaggaacagccgctctgggctgcctggtcaaggattactttcccgagcctgtgaccgtgtcctggaatagcggagcactgacaagcggcgtgcacacctttccagccgtgctgcaaagcagcggcctgtactctctgagcagcgtggtcacagtgcctagctctagcctgggcacccagacctacatctgcaatgtgaaccacaagcctagcaacaccaaggtggacaagagagtggaacccaagagctgtgaagtgaaaaccgactccaccgaccacgtgaagcccaaagagacagagaacaccaagcagcccagcaagagctgccacaagcccaaggccatcgtgcacaccgagaaagtgaacatgatgagcctgaccgtgctgggcctgcggatgctgttcgccaaaaccgtggccgtgaacttcctgctgaccgccaagctgttcttcctccgcgccaagagaagcggatctggcgtgaagcagaccctgaatttcgacctgctgaagctggctggcgacgtggaatccaacccaggcccttctagaggccatatgaccgagtacaagcccacggtgcgcctcgccacccgcgacgacgtccccagggccgtacgcaccctcgccgccgcgttcgccgactaccccgccacgcgccacaccgtcgatccggaccgccacatcgagcgggtcaccgagctgcaagaactcttcctcacgcgcgtcgggctcgacatcggcaaggtgtgggtcgcggacgacggcgccgcggtggcggtctggaccacgccggagagcgtcgaagcgggggcggtgttcgccgagatcggcccgcgcatggccgagttgagcggttcccggctggccgcgcagcaacagatggaaggcctcctggcgccgcaccggcccaaggagcccgcgtggttcctggccaccgtcggcgtctcgcccgaccaccagggcaagggtctgggcagcgccgtcgtgctccccggagtggaggcggccgagcgcgccggggtgcccgccttcctggagacctccgcgccccgcaacctccccttctacgagcggctcggcttcaccgtcaccgccgacgtcgaggtgcccgaaggaccgcgcacctggtgcatgacccgcaagcccggtgcctga

SEQ ID NO: 5639 - DNA, 2376 bp, Artificial Sequence
  Synthetic Polynucloetide
atggccttaccagtgaccgccttgctcctgccgctggccttgctgctccacgccgccaggccggaggttcagctgcttgagtctggcggaggactggttcaacctggcggaagcctgagactgtcttgtgccgccagcggcttcacctttagcagctacgccatgagctgggtccgacaggctcctggcaaaggactggaatgggtgtccagcatcagcggcagcggcgactacatctactacgccgatagcgtgaagggcagattcaccatcagccgggacatcagcaagaacaccctgtacctccagatgaacagcctgagagccgaggacaccgccgtgtactactgtgccaaagaaggcaccggcgctaacagcagcctggccgattatagaggccagggcacactggtcaccgtgtctagtggcggaggaagcggcggaggatctgaagtgcaactggtggaatctggagggggaagcgtgcaggcaggcggatctctgagactgtcctgcaccacatctggcagagccctgaatatgtacgtgatgggatggtttcggcaggctcccggcaacgagcgggaatttgtggccgctacaagcagcagcggcggcagcacaagctaccccgattctgtgaagggcagattcacaatctcccgcgataatgccaagaatactgtgtacctgcagatgaatagtctgaagcctgaagatacagccgcctacagatgtgccgccagcccctacgtgtccacccccaccatgaacatcctggaagagtacagatactggggcctgggaacacaagtgacagtgtccagcctcgagggacagcctaaggccaatcctaccgtgacactgttccctccaagcagcgaagaactccaggccaacaaggccacacttgtgtgcctgatctccgacttctaccctggggctgtgacagtggcttggaaggccgatggatctcctgtgaaagccggcgtggaaaccaccaagccatccaagcagagcaacaacaaatacgccgccagctcctacctgagcctgacacctgagcagtggaagtcccacagatcctacagctgccaagtgacccacgaaggcagcaccgtggaaaagacagtggcccctacagagtgcagccccatcaagaccgatgtgattacaatggaccccaaggacaactgctccaaggacgccaacgataccctgctgctccagctgaccaacaccagcgcctactacatgtacttgttgctgctgctgaagtccgtggtgtacttcgccatcatcacatgctgcctgctgcggagaaccgccttctgctgcaacggcgagaagtctagggccaagcgatctggatctggagcaacaaacttctcactactcaaacaagcaggtgacgtggaggagaatcccgggcctactagtatggactggatttggcgcatccttttccttgtcggcgctgctaccggcgcgcattccgggccccaggttcagctgcaagagtctggcggaggacttgctcaagctggcggaagcctgagactgtcttgtgccgcctctggcagaaccttcagcatgggctggtttagacaggcccctggcaaagagagagagttcgtcgccgccatcacatacagcggcggcagcccttactacgcctcttctgtcagaggccggttcaccatcagccgggacaacgccaagaacaccgtgtacctccagatgaacagcctgaagccagaggacaccgccgtgtactactgtgccgccaatccaacctacggcagcgactggaatgccgagaattggggccagggcacccaagtgacagtgtctagtacgcgtgcctctacaaagggaccctccgtgtttcctctggctcccagcagcaagtctacaagcggaggaacagccgctctgggctgcctggtcaaggattactttcccgagcctgtgaccgtgtcctggaatagcggagcactgacaagcggcgtgcacacctttccagccgtgctgcaaagcagcggcctgtactctctgagcagcgtggtcacagtgcctagctctagcctgggcacccagacctacatctgcaatgtgaaccacaagcctagcaacaccaaggtggacaagagagtggaacccaagagctgtgaagtgaaaaccgactccaccgaccacgtgaagcccaaagagacagagaacaccaagcagcccagcaagagctgccacaagcccaaggccatcgtgcacaccgagaaagtgaacatgatgagcctgaccgtgctgggcctgcggatgctgttcgccaaaaccgtggccgtgaacttcctgctgaccgccaagctgttcttcctc

SEQ ID NO: 5640 - DNA, 2463 bp, Artificial Sequence
  Synthetic Polynucloetide
atggccttaccagtgaccgccttgctcctgccgctggccttgctgctccacgccgccaggccggaggttcagctgcttgagtctggcggaggactggttcaacctggcggaagcctgagactgtcttgtgccgccagcggcttcacctttagcagctacgccatgagctgggtccgacaggctcctggcaaaggactggaatgggtgtccagcatcagcggcagcggcgactacatctactacgccgatagcgtgaagggcagattcaccatcagccgggacatcagcaagaacaccctgtacctccagatgaacagcctgagagccgaggacaccgccgtgtactactgtgccaaagaaggcaccggcgctaacagcagcctggccgattatagaggccagggcacactggtcaccgtgtctagtggcggaggaagcggcggaggatctgaagtgcaactggtggaatctggagggggaagcgtgcaggcaggcggatctctgagactgtcctgcaccacatctggcagagccctgaatatgtacgtgatgggatggtttcggcaggctcccggcaacgagcgggaatttgtggccgctacaagcagcagcggcggcagcacaagctaccccgattctgtgaagggcagattcacaatctcccgcgataatgccaagaatactgtgtacctgcagatgaatagtctgaagcctgaagatacagccgcctacagatgtgccgccagcccctacgtgtccacccccaccatgaacatcctggaagagtacagatactggggcctgggaacacaagtgacagtgtccagcctcgagggatctcccatcaagaccgatgtgattacaatggaccccaaggacaactgctccaaggacgccaacgataccctgctgctccagctgaccaacaccagcgcctactacatgtacttgttgctgctgctgaagtccgtggtgtacttcgccatcatcacatgctgcctgctgcggagaaccgccttctgctgcaacggcgagaagtctagggccaagcgatctggatctggagcaacaaacttctcactactcaaacaagcaggtgacgtggaggagaatcccgggcctactagtatggactggatttggcgcatccttttccttgtcggcgctgctaccggcgcgcattccgggccccaggttcagctgcaagagtctggcggaggacttgctcaagctggcggaagcctgagactgtcttgtgccgcctctggcagaaccttcagcatgggctggtttagacaggcccctggcaaagagagagagttcgtcgccgccatcacatacagcggcggcagcccttactacgcctcttctgtcagaggccggttcaccatcagccgggacaacgccaagaacaccgtgtacctccagatgaacagcctgaagccagaggacaccgccgtgtactactgtgccgccaatccaacctacggcagcgactggaatgccgagaattggggccagggcacccaagtgacagtgtctagtacgcgtggcagcgaagtgaaaaccgactccaccgaccacgtgaagcccaaagagacagagaacaccaagcagcccagcaagagctgccacaagcccaaggccatcgtgcacaccgagaaagtgaacatgatgagcctgaccgtgctgggcctgcggatgctgttcgccaaaaccgtggccgtgaacttcctgctgaccgccaagctgttcttcctccgcgccaagagaagcggatctggcgtgaagcagaccctgaatttcgacctgctgaagctggctggcgacgtggaatccaacccaggcccttctagaggccatatgaccgagtacaagcccacggtgcgcctcgccacccgcgacgacgtccccagggccgtacgcaccctcgccgccgcgttcgccgactaccccgccacgcgccacaccgtcgatccggaccgccacatcgagcgggtcaccgagctgcaagaactcttcctcacgcgcgtcgggctcgacatcggcaaggtgtgggtcgcggacgacggcgccgcggtggcggtctggaccacgccggagagcgtcgaagcgggggcggtgttcgccgagatcggcccgcgcatggccgagttgagcggttcccggctggccgcgcagcaacagatggaaggcctcctggcgccgcaccggcccaaggagcccgcgtggttcctggccaccgtcggcgtctcgcccgaccaccagggcaagggtctgggcagcgccgtcgtgctccccggagtggaggcggccgagcgcgccggggtgcccgccttcctggagacctccgcgccccgcaacctccccttctacgagcggctcggcttcaccgtcaccgccgacgtcgaggtgcccgaaggaccgcgcacctggtgcatgacccgcaagcccggtgcctga

SEQ ID NO: 5641 - DNA, 1761 bp, Artificial Sequence
  Synthetic Polynucloetide
atggccttaccagtgaccgccttgctcctgccgctggccttgctgctccacgccgccaggccggaggttcagctgcttgagtctggcggaggactggttcaacctggcggaagcctgagactgtcttgtgccgccagcggcttcacctttagcagctacgccatgagctgggtccgacaggctcctggcaaaggactggaatgggtgtccagcatcagcggcagcggcgactacatctactacgccgatagcgtgaagggcagattcaccatcagccgggacatcagcaagaacaccctgtacctccagatgaacagcctgagagccgaggacaccgccgtgtactactgtgccaaagaaggcaccggcgctaacagcagcctggccgattatagaggccagggcacactggtcaccgtgtctagtggcggaggaagcggcggaggatctgaagtgcaactggtggaatctggagggggaagcgtgcaggcaggcggatctctgagactgtcctgcaccacatctggcagagccctgaatatgtacgtgatgggatggtttcggcaggctcccggcaacgagcgggaatttgtggccgctacaagcagcagcggcggcagcacaagctaccccgattctgtgaagggcagattcacaatctcccgcgataatgccaagaatactgtgtacctgcagatgaatagtctgaagcctgaagatacagccgcctacagatgtgccgccagcccctacgtgtccacccccaccatgaacatcctggaagagtacagatactggggcctgggaacacaagtgacagtgtccagcctcgagggatctcccatcaagaccgatgtgattacaatggaccccaaggacaactgctccaaggacgccaacgataccctgctgctccagctgaccaacaccagcgcctactacatgtacttgttgctgctgctgaagtccgtggtgtacttcgccatcatcacatgctgcctgctgcggagaaccgccttctgctgcaacggcgagaagtctagggccaagcgatctggatctggagcaacaaacttctcactactcaaacaagcaggtgacgtggaggagaatcccgggcctactagtatggactggatttggcgcatccttttccttgtcggcgctgctaccggcgcgcattccgggccccaggttcagctgcaagagtctggcggaggacttgctcaagctggcggaagcctgagactgtcttgtgccgcctctggcagaaccttcagcatgggctggtttagacaggcccctggcaaagagagagagttcgtcgccgccatcacatacagcggcggcagcccttactacgcctcttctgtcagaggccggttcaccatcagccgggacaacgccaagaacaccgtgtacctccagatgaacagcctgaagccagaggacaccgccgtgtactactgtgccgccaatccaacctacggcagcgactggaatgccgagaattggggccagggcacccaagtgacagtgtctagtacgcgtggcagcgaagtgaaaaccgactccaccgaccacgtgaagcccaaagagacagagaacaccaagcagcccagcaagagctgccacaagcccaaggccatcgtgcacaccgagaaagtgaacatgatgagcctgaccgtgctgggcctgcggatgctgttcgccaaaaccgtggccgtgaacttcctgctgaccgccaagctgttcttcctc

SEQ ID NO: 5642 - DNA, 2490 bp, Artificial Sequence
  Synthetic Polynucloetide
atggccttaccagtgaccgccttgctcctgccgctggccttgctgctccacgccgccaggccggaggttcagctgcttgagtctggcggaggactggttcaacctggcggaagcctgagactgtcttgtgccgccagcggcttcacctttagcagctacgccatgagctgggtccgacaggctcctggcaaaggactggaatgggtgtccagcatcagcggcagcggcgactacatctactacgccgatagcgtgaagggcagattcaccatcagccgggacatcagcaagaacaccctgtacctccagatgaacagcctgagagccgaggacaccgccgtgtactactgtgccaaagaaggcaccggcgctaacagcagcctggccgattatagaggccagggcacactggtcaccgtgtctagtggcggaggaagcggcggaggatctgaagtgcaactggtggaatctggagggggaagcgtgcaggcaggcggatctctgagactgtcctgcaccacatctggcagagccctgaatatgtacgtgatgggatggtttcggcaggctcccggcaacgagcgggaatttgtggccgctacaagcagcagcggcggcagcacaagctaccccgattctgtgaagggcagattcacaatctcccgcgataatgccaagaatactgtgtacctgcagatgaatagtctgaagcctgaagatacagccgcctacagatgtgccgccagcccctacgtgtccacccccaccatgaacatcctggaagagtacagatactggggcctgggaacacaagtgacagtgtccagcctcgaggacaaaactcacacatgcccaccgtgcccagcacccatcaagaccgatgtgattacaatggaccccaaggacaactgctccaaggacgccaacgataccctgctgctccagctgaccaacaccagcgcctactacatgtacttgttgctgctgctgaagtccgtggtgtacttcgccatcatcacatgctgcctgctgcggagaaccgccttctgctgcaacggcgagaagtctagggccaagcgatctggatctggagcaacaaacttctcactactcaaacaagcaggtgacgtggaggagaatcccgggcctactagtatggactggatttggcgcatccttttccttgtcggcgctgctaccggcgcgcattccgggccccaggttcagctgcaagagtctggcggaggacttgctcaagctggcggaagcctgagactgtcttgtgccgcctctggcagaaccttcagcatgggctggtttagacaggcccctggcaaagagagagagttcgtcgccgccatcacatacagcggcggcagcccttactacgcctcttctgtcagaggccggttcaccatcagccgggacaacgccaagaacaccgtgtacctccagatgaacagcctgaagccagaggacaccgccgtgtactactgtgccgccaatccaacctacggcagcgactggaatgccgagaattggggccagggcacccaagtgacagtgtctagtacgcgtggcagcgaagtgaaaaccgactccaccgaccacgtgaagcccaaagagacagagaacaccaagcagcccagcaagagctgccacaagcccaaggccatcgtgcacaccgagaaagtgaacatgatgagcctgaccgtgctgggcctgcggatgctgttcgccaaaaccgtggccgtgaacttcctgctgaccgccaagctgttcttcctccgcgccaagagaagcggatctggcgtgaagcagaccctgaatttcgacctgctgaagctggctggcgacgtggaatccaacccaggcccttctagaggccatatgaccgagtacaagcccacggtgcgcctcgccacccgcgacgacgtccccagggccgtacgcaccctcgccgccgcgttcgccgactaccccgccacgcgccacaccgtcgatccggaccgccacatcgagcgggtcaccgagctgcaagaactcttcctcacgcgcgtcgggctcgacatcggcaaggtgtgggtcgcggacgacggcgccgcggtggcggtctggaccacgccggagagcgtcgaagcgggggcggtgttcgccgagatcggcccgcgcatggccgagttgagcggttcccggctggccgcgcagcaacagatggaaggcctcctggcgccgcaccggcccaaggagcccgcgtggttcctggccaccgtcggcgtctcgcccgaccaccagggcaagggtctgggcagcgccgtcgtgctccccggagtggaggcggccgagcgcgccggggtgcccgccttcctggagacctccgcgccccgcaacctccccttctacgagcggctcggcttcaccgtcaccgccgacgtcgaggtgcccgaaggaccgcgcacctggtgcatgacccgcaagcccggtgcctga

SEQ ID NO: 5643 - DNA, 2490 bp, Artificial Sequence
  Synthetic Polynucloetide
atggccttaccagtgaccgccttgctcctgccgctggccttgctgctccacgccgccaggccggaggttcagctgcttgagtctggcggaggactggttcaacctggcggaagcctgagactgtcttgtgccgccagcggcttcacctttagcagctacgccatgagctgggtccgacaggctcctggcaaaggactggaatgggtgtccagcatcagcggcagcggcgactacatctactacgccgatagcgtgaagggcagattcaccatcagccgggacatcagcaagaacaccctgtacctccagatgaacagcctgagagccgaggacaccgccgtgtactactgtgccaaagaaggcaccggcgctaacagcagcctggccgattatagaggccagggcacactggtcaccgtgtctagtggcggaggaagcggcggaggatctgaagtgcaactggtggaatctggagggggaagcgtgcaggcaggcggatctctgagactgtcctgcaccacatctggcagagccctgaatatgtacgtgatgggatggtttcggcaggctcccggcaacgagcgggaatttgtggccgctacaagcagcagcggcggcagcacaagctaccccgattctgtgaagggcagattcacaatctcccgcgataatgccaagaatactgtgtacctgcagatgaatagtctgaagcctgaagatacagccgcctacagatgtgccgccagcccctacgtgtccacccccaccatgaacatcctggaagagtacagatactggggcctgggaacacaagtgacagtgtccagcctcgagggatctcccatcaagaccgatgtgattacaatggaccccaaggacaactgctccaaggacgccaacgataccctgctgctccagctgaccaacaccagcgcctactacatgtacttgttgctgctgctgaagtccgtggtgtacttcgccatcatcacatgctgcctgctgcggagaaccgccttctgctgcaacggcgagaagtctagggccaagcgatctggatctggagcaacaaacttctcactactcaaacaagcaggtgacgtggaggagaatcccgggcctactagtatggactggatttggcgcatccttttccttgtcggcgctgctaccggcgcgcattccgggccccaggttcagctgcaagagtctggcggaggacttgctcaagctggcggaagcctgagactgtcttgtgccgcctctggcagaaccttcagcatgggctggtttagacaggcccctggcaaagagagagagttcgtcgccgccatcacatacagcggcggcagcccttactacgcctcttctgtcagaggccggttcaccatcagccgggacaacgccaagaacaccgtgtacctccagatgaacagcctgaagccagaggacaccgccgtgtactactgtgccgccaatccaacctacggcagcgactggaatgccgagaattggggccagggcacccaagtgacagtgtctagtacgcgtgataaaactcatacctgtccgccatgcccggcagaagtgaaaaccgactccaccgaccacgtgaagcccaaagagacagagaacaccaagcagcccagcaagagctgccacaagcccaaggccatcgtgcacaccgagaaagtgaacatgatgagcctgaccgtgctgggcctgcggatgctgttcgccaaaaccgtggccgtgaacttcctgctgaccgccaagctgttcttcctccgcgccaagagaagcggatctggcgtgaagcagaccctgaatttcgacctgctgaagctggctggcgacgtggaatccaacccaggcccttctagaggccatatgaccgagtacaagcccacggtgcgcctcgccacccgcgacgacgtccccagggccgtacgcaccctcgccgccgcgttcgccgactaccccgccacgcgccacaccgtcgatccggaccgccacatcgagcgggtcaccgagctgcaagaactcttcctcacgcgcgtcgggctcgacatcggcaaggtgtgggtcgcggacgacggcgccgcggtggcggtctggaccacgccggagagcgtcgaagcgggggcggtgttcgccgagatcggcccgcgcatggccgagttgagcggttcccggctggccgcgcagcaacagatggaaggcctcctggcgccgcaccggcccaaggagcccgcgtggttcctggccaccgtcggcgtctcgcccgaccaccagggcaagggtctgggcagcgccgtcgtgctccccggagtggaggcggccgagcgcgccggggtgcccgccttcctggagacctccgcgccccgcaacctccccttctacgagcggctcggcttcaccgtcaccgccgacgtcgaggtgcccgaaggaccgcgcacctggtgcatgacccgcaagcccggtgcctga

SEQ ID NO: 5644 - DNA, 2517 bp, Artificial Sequence
  Synthetic Polynucloetide
atggccttaccagtgaccgccttgctcctgccgctggccttgctgctccacgccgccaggccggaggttcagctgcttgagtctggcggaggactggttcaacctggcggaagcctgagactgtcttgtgccgccagcggcttcacctttagcagctacgccatgagctgggtccgacaggctcctggcaaaggactggaatgggtgtccagcatcagcggcagcggcgactacatctactacgccgatagcgtgaagggcagattcaccatcagccgggacatcagcaagaacaccctgtacctccagatgaacagcctgagagccgaggacaccgccgtgtactactgtgccaaagaaggcaccggcgctaacagcagcctggccgattatagaggccagggcacactggtcaccgtgtctagtggcggaggaagcggcggaggatctgaagtgcaactggtggaatctggagggggaagcgtgcaggcaggcggatctctgagactgtcctgcaccacatctggcagagccctgaatatgtacgtgatgggatggtttcggcaggctcccggcaacgagcgggaatttgtggccgctacaagcagcagcggcggcagcacaagctaccccgattctgtgaagggcagattcacaatctcccgcgataatgccaagaatactgtgtacctgcagatgaatagtctgaagcctgaagatacagccgcctacagatgtgccgccagcccctacgtgtccacccccaccatgaacatcctggaagagtacagatactggggcctgggaacacaagtgacagtgtccagcctcgaggacaaaactcacacatgcccaccgtgcccagcacccatcaagaccgatgtgattacaatggaccccaaggacaactgctccaaggacgccaacgataccctgctgctccagctgaccaacaccagcgcctactacatgtacttgttgctgctgctgaagtccgtggtgtacttcgccatcatcacatgctgcctgctgcggagaaccgccttctgctgcaacggcgagaagtctagggccaagcgatctggatctggagcaacaaacttctcactactcaaacaagcaggtgacgtggaggagaatcccgggcctactagtatggactggatttggcgcatccttttccttgtcggcgctgctaccggcgcgcattccgggccccaggttcagctgcaagagtctggcggaggacttgctcaagctggcggaagcctgagactgtcttgtgccgcctctggcagaaccttcagcatgggctggtttagacaggcccctggcaaagagagagagttcgtcgccgccatcacatacagcggcggcagcccttactacgcctcttctgtcagaggccggttcaccatcagccgggacaacgccaagaacaccgtgtacctccagatgaacagcctgaagccagaggacaccgccgtgtactactgtgccgccaatccaacctacggcagcgactggaatgccgagaattggggccagggcacccaagtgacagtgtctagtacgcgtgataaaactcatacctgtccgccatgcccggcagaagtgaaaaccgactccaccgaccacgtgaagcccaaagagacagagaacaccaagcagcccagcaagagctgccacaagcccaaggccatcgtgcacaccgagaaagtgaacatgatgagcctgaccgtgctgggcctgcggatgctgttcgccaaaaccgtggccgtgaacttcctgctgaccgccaagctgttcttcctccgcgccaagagaagcggatctggcgtgaagcagaccctgaatttcgacctgctgaagctggctggcgacgtggaatccaacccaggcccttctagaggccatatgaccgagtacaagcccacggtgcgcctcgccacccgcgacgacgtccccagggccgtacgcaccctcgccgccgcgttcgccgactaccccgccacgcgccacaccgtcgatccggaccgccacatcgagcgggtcaccgagctgcaagaactcttcctcacgcgcgtcgggctcgacatcggcaaggtgtgggtcgcggacgacggcgccgcggtggcggtctggaccacgccggagagcgtcgaagcgggggcggtgttcgccgagatcggcccgcgcatggccgagttgagcggttcccggctggccgcgcagcaacagatggaaggcctcctggcgccgcaccggcccaaggagcccgcgtggttcctggccaccgtcggcgtctcgcccgaccaccagggcaagggtctgggcagcgccgtcgtgctccccggagtggaggcggccgagcgcgccggggtgcccgccttcctggagacctccgcgccccgcaacctccccttctacgagcggctcggcttcaccgtcaccgccgacgtcgaggtgcccgaaggaccgcgcacctggtgcatgacccgcaagcccggtgcctga

SEQ ID NO: 5645 - DNA, 1815 bp, Artificial Sequence
  Synthetic Polynucloetide
atggccttaccagtgaccgccttgctcctgccgctggccttgctgctccacgccgccaggccggaggttcagctgcttgagtctggcggaggactggttcaacctggcggaagcctgagactgtcttgtgccgccagcggcttcacctttagcagctacgccatgagctgggtccgacaggctcctggcaaaggactggaatgggtgtccagcatcagcggcagcggcgactacatctactacgccgatagcgtgaagggcagattcaccatcagccgggacatcagcaagaacaccctgtacctccagatgaacagcctgagagccgaggacaccgccgtgtactactgtgccaaagaaggcaccggcgctaacagcagcctggccgattatagaggccagggcacactggtcaccgtgtctagtggcggaggaagcggcggaggatctgaagtgcaactggtggaatctggagggggaagcgtgcaggcaggcggatctctgagactgtcctgcaccacatctggcagagccctgaatatgtacgtgatgggatggtttcggcaggctcccggcaacgagcgggaatttgtggccgctacaagcagcagcggcggcagcacaagctaccccgattctgtgaagggcagattcacaatctcccgcgataatgccaagaatactgtgtacctgcagatgaatagtctgaagcctgaagatacagccgcctacagatgtgccgccagcccctacgtgtccacccccaccatgaacatcctggaagagtacagatactggggcctgggaacacaagtgacagtgtccagcctcgaggacaaaactcacacatgcccaccgtgcccagcacccatcaagaccgatgtgattacaatggaccccaaggacaactgctccaaggacgccaacgataccctgctgctccagctgaccaacaccagcgcctactacatgtacttgttgctgctgctgaagtccgtggtgtacttcgccatcatcacatgctgcctgctgcggagaaccgccttctgctgcaacggcgagaagtctagggccaagcgatctggatctggagcaacaaacttctcactactcaaacaagcaggtgacgtggaggagaatcccgggcctactagtatggactggatttggcgcatccttttccttgtcggcgctgctaccggcgcgcattccgggccccaggttcagctgcaagagtctggcggaggacttgctcaagctggcggaagcctgagactgtcttgtgccgcctctggcagaaccttcagcatgggctggtttagacaggcccctggcaaagagagagagttcgtcgccgccatcacatacagcggcggcagcccttactacgcctcttctgtcagaggccggttcaccatcagccgggacaacgccaagaacaccgtgtacctccagatgaacagcctgaagccagaggacaccgccgtgtactactgtgccgccaatccaacctacggcagcgactggaatgccgagaattggggccagggcacccaagtgacagtgtctagtacgcgtgataaaactcatacctgtccgccatgcccggcagaagtgaaaaccgactccaccgaccacgtgaagcccaaagagacagagaacaccaagcagcccagcaagagctgccacaagcccaaggccatcgtgcacaccgagaaagtgaacatgatgagcctgaccgtgctgggcctgcggatgctgttcgccaaaaccgtggccgtgaacttcctgctgaccgccaagctgttcttcctc

SEQ ID NO: 5646 - DNA, 1788 bp, Artificial Sequence
  Synthetic Polynucloetide
atggccttaccagtgaccgccttgctcctgccgctggccttgctgctccacgccgccaggccggaggttcagctgcttgagtctggcggaggactggttcaacctggcggaagcctgagactgtcttgtgccgccagcggcttcacctttagcagctacgccatgagctgggtccgacaggctcctggcaaaggactggaatgggtgtccagcatcagcggcagcggcgactacatctactacgccgatagcgtgaagggcagattcaccatcagccgggacatcagcaagaacaccctgtacctccagatgaacagcctgagagccgaggacaccgccgtgtactactgtgccaaagaaggcaccggcgctaacagcagcctggccgattatagaggccagggcacactggtcaccgtgtctagtggcggaggaagcggcggaggatctgaagtgcaactggtggaatctggagggggaagcgtgcaggcaggcggatctctgagactgtcctgcaccacatctggcagagccctgaatatgtacgtgatgggatggtttcggcaggctcccggcaacgagcgggaatttgtggccgctacaagcagcagcggcggcagcacaagctaccccgattctgtgaagggcagattcacaatctcccgcgataatgccaagaatactgtgtacctgcagatgaatagtctgaagcctgaagatacagccgcctacagatgtgccgccagcccctacgtgtccacccccaccatgaacatcctggaagagtacagatactggggcctgggaacacaagtgacagtgtccagcctcgagggatctcccatcaagaccgatgtgattacaatggaccccaaggacaactgctccaaggacgccaacgataccctgctgctccagctgaccaacaccagcgcctactacatgtacttgttgctgctgctgaagtccgtggtgtacttcgccatcatcacatgctgcctgctgcggagaaccgccttctgctgcaacggcgagaagtctagggccaagcgatctggatctggagcaacaaacttctcactactcaaacaagcaggtgacgtggaggagaatcccgggcctactagtatggactggatttggcgcatccttttccttgtcggcgctgctaccggcgcgcattccgggccccaggttcagctgcaagagtctggcggaggacttgctcaagctggcggaagcctgagactgtcttgtgccgcctctggcagaaccttcagcatgggctggtttagacaggcccctggcaaagagagagagttcgtcgccgccatcacatacagcggcggcagcccttactacgcctcttctgtcagaggccggttcaccatcagccgggacaacgccaagaacaccgtgtacctccagatgaacagcctgaagccagaggacaccgccgtgtactactgtgccgccaatccaacctacggcagcgactggaatgccgagaattggggccagggcacccaagtgacagtgtctagtacgcgtgataaaactcatacctgtccgccatgcccggcagaagtgaaaaccgactccaccgaccacgtgaagcccaaagagacagagaacaccaagcagcccagcaagagctgccacaagcccaaggccatcgtgcacaccgagaaagtgaacatgatgagcctgaccgtgctgggcctgcggatgctgttcgccaaaaccgtggccgtgaacttcctgctgaccgccaagctgttcttcctc

SEQ ID NO: 5647 - DNA, 2439 bp, Artificial Sequence
  Synthetic Polynucloetide
atggccttaccagtgaccgccttgctcctgccgctggccttgctgctccacgccgccaggccggaggttcagctgcttgagtctggcggaggactggttcaacctggcggaagcctgagactgtcttgtgccgccagcggcttcacctttagcagctacgccatgagctgggtccgacaggctcctggcaaaggactggaatgggtgtccagcatcagcggcagcggcgactacatctactacgccgatagcgtgaagggcagattcaccatcagccgggacatcagcaagaacaccctgtacctccagatgaacagcctgagagccgaggacaccgccgtgtactactgtgccaaagaaggcaccggcgctaacagcagcctggccgattatagaggccagggcacactggtcaccgtgtctagtggcggaggaagcggcggaggatctgaagtgcaactggtggaatctggagggggaagcgtgcaggcaggcggatctctgagactgtcctgcaccacatctggcagagccctgaatatgtacgtgatgggatggtttcggcaggctcccggcaacgagcgggaatttgtggccgctacaagcagcagcggcggcagcacaagctaccccgattctgtgaagggcagattcacaatctcccgcgataatgccaagaatactgtgtacctgcagatgaatagtctgaagcctgaagatacagccgcctacagatgtgccgccagcccctacgtgtccacccccaccatgaacatcctggaagagtacagatactggggcctgggaacacaagtgacagtgtccagcctcgagggatctatggaccccaaggacaactgctccaaggacgccaacgataccctgctgctccagctgaccaacaccagcgcctactacatgtacttgttgctgctgctgaagtccgtggtgtacttcgccatcatcacatgctgcctgctgcggagaaccgccttctgctgcaacggcgagaagtctagggccaagcgatctggatctggagcaacaaacttctcactactcaaacaagcaggtgacgtggaggagaatcccgggcctactagtatggactggatttggcgcatccttttccttgtcggcgctgctaccggcgcgcattccgggccccaggttcagctgcaagagtctggcggaggacttgctcaagctggcggaagcctgagactgtcttgtgccgcctctggcagaaccttcagcatgggctggtttagacaggcccctggcaaagagagagagttcgtcgccgccatcacatacagcggcggcagcccttactacgcctcttctgtcagaggccggttcaccatcagccgggacaacgccaagaacaccgtgtacctccagatgaacagcctgaagccagaggacaccgccgtgtactactgtgccgccaatccaacctacggcagcgactggaatgccgagaattggggccagggcacccaagtgacagtgtctagtacgcgtggcagcgaagtgaaaaccgactccaccgaccacgtgaagcccaaagagacagagaacaccaagcagcccagcaagagctgccacaagcccaaggccatcgtgcacaccgagaaagtgaacatgatgagcctgaccgtgctgggcctgcggatgctgttcgccaaaaccgtggccgtgaacttcctgctgaccgccaagctgttcttcctccgcgccaagagaagcggatctggcgtgaagcagaccctgaatttcgacctgctgaagctggctggcgacgtggaatccaacccaggcccttctagaggccatatgaccgagtacaagcccacggtgcgcctcgccacccgcgacgacgtccccagggccgtacgcaccctcgccgccgcgttcgccgactaccccgccacgcgccacaccgtcgatccggaccgccacatcgagcgggtcaccgagctgcaagaactcttcctcacgcgcgtcgggctcgacatcggcaaggtgtgggtcgcggacgacggcgccgcggtggcggtctggaccacgccggagagcgtcgaagcgggggcggtgttcgccgagatcggcccgcgcatggccgagttgagcggttcccggctggccgcgcagcaacagatggaaggcctcctggcgccgcaccggcccaaggagcccgcgtggttcctggccaccgtcggcgtctcgcccgaccaccagggcaagggtctgggcagcgccgtcgtgctccccggagtggaggcggccgagcgcgccggggtgcccgccttcctggagacctccgcgccccgcaacctccccttctacgagcggctcggcttcaccgtcaccgccgacgtcgaggtgcccgaaggaccgcgcacctggtgcatgacccgcaagcccggtgcctga

SEQ ID NO: 5648 - DNA, 2442 bp, Artificial Sequence
  Synthetic Polynucloetide
atggccttaccagtgaccgccttgctcctgccgctggccttgctgctccacgccgccaggccggaggttcagctgcttgagtctggcggaggactggttcaacctggcggaagcctgagactgtcttgtgccgccagcggcttcacctttagcagctacgccatgagctgggtccgacaggctcctggcaaaggactggaatgggtgtccagcatcagcggcagcggcgactacatctactacgccgatagcgtgaagggcagattcaccatcagccgggacatcagcaagaacaccctgtacctccagatgaacagcctgagagccgaggacaccgccgtgtactactgtgccaaagaaggcaccggcgctaacagcagcctggccgattatagaggccagggcacactggtcaccgtgtctagtggcggaggaagcggcggaggatctgaagtgcaactggtggaatctggagggggaagcgtgcaggcaggcggatctctgagactgtcctgcaccacatctggcagagccctgaatatgtacgtgatgggatggtttcggcaggctcccggcaacgagcgggaatttgtggccgctacaagcagcagcggcggcagcacaagctaccccgattctgtgaagggcagattcacaatctcccgcgataatgccaagaatactgtgtacctgcagatgaatagtctgaagcctgaagatacagccgcctacagatgtgccgccagcccctacgtgtccacccccaccatgaacatcctggaagagtacagatactggggcctgggaacacaagtgacagtgtccagcctcgagggatctcccatcaagaccgatgtgattacaatggaccccaaggacaactgctccaaggacgccaacgataccctgctgctccagctgaccaacaccagcgcctactacatgtacttgttgctgctgctgaagtccgtggtgtacttcgccatcatcacatgctgcctgctgcggagaaccgccttctgctgcaacggcgagaagtctagggccaagcgatctggatctggagcaacaaacttctcactactcaaacaagcaggtgacgtggaggagaatcccgggcctactagtatggactggatttggcgcatccttttccttgtcggcgctgctaccggcgcgcattccgggccccaggttcagctgcaagagtctggcggaggacttgctcaagctggcggaagcctgagactgtcttgtgccgcctctggcagaaccttcagcatgggctggtttagacaggcccctggcaaagagagagagttcgtcgccgccatcacatacagcggcggcagcccttactacgcctcttctgtcagaggccggttcaccatcagccgggacaacgccaagaacaccgtgtacctccagatgaacagcctgaagccagaggacaccgccgtgtactactgtgccgccaatccaacctacggcagcgactggaatgccgagaattggggccagggcacccaagtgacagtgtctagtacgcgtggcagcgaccacgtgaagcccaaagagacagagaacaccaagcagcccagcaagagctgccacaagcccaaggccatcgtgcacaccgagaaagtgaacatgatgagcctgaccgtgctgggcctgcggatgctgttcgccaaaaccgtggccgtgaacttcctgctgaccgccaagctgttcttcctccgcgccaagagaagcggatctggcgtgaagcagaccctgaatttcgacctgctgaagctggctggcgacgtggaatccaacccaggcccttctagaggccatatgaccgagtacaagcccacggtgcgcctcgccacccgcgacgacgtccccagggccgtacgcaccctcgccgccgcgttcgccgactaccccgccacgcgccacaccgtcgatccggaccgccacatcgagcgggtcaccgagctgcaagaactcttcctcacgcgcgtcgggctcgacatcggcaaggtgtgggtcgcggacgacggcgccgcggtggcggtctggaccacgccggagagcgtcgaagcgggggcggtgttcgccgagatcggcccgcgcatggccgagttgagcggttcccggctggccgcgcagcaacagatggaaggcctcctggcgccgcaccggcccaaggagcccgcgtggttcctggccaccgtcggcgtctcgcccgaccaccagggcaagggtctgggcagcgccgtcgtgctccccggagtggaggcggccgagcgcgccggggtgcccgccttcctggagacctccgcgccccgcaacctccccttctacgagcggctcggcttcaccgtcaccgccgacgtcgaggtgcccgaaggaccgcgcacctggtgcatgacccgcaagcccggtgcctga

SEQ ID NO: 5649 - DNA, 1311 bp, Artificial Sequence
  Synthetic Polynucloetide
atggccttaccagtgaccgccttgctcctgccgctggccttgctgctccacgccgccaggccggaggttcagctgcttgagtctggcggaggactggttcaacctggcggaagcctgagactgtcttgtgccgccagcggcttcacctttagcagctacgccatgagctgggtccgacaggctcctggcaaaggactggaatgggtgtccagcatcagcggcagcggcgactacatctactacgccgatagcgtgaagggcagattcaccatcagccgggacatcagcaagaacaccctgtacctccagatgaacagcctgagagccgaggacaccgccgtgtactactgtgccaaagaaggcaccggcgctaacagcagcctggccgattatagaggccagggcacactggtcaccgtgtctagtggcggaggaagcggcggaggatctgaagtgcaactggtggaatctggagggggaagcgtgcaggcaggcggatctctgagactgtcctgcaccacatctggcagagccctgaatatgtacgtgatgggatggtttcggcaggctcccggcaacgagcgggaatttgtggccgctacaagcagcagcggcggcagcacaagctaccccgattctgtgaagggcagattcacaatctcccgcgataatgccaagaatactgtgtacctgcagatgaatagtctgaagcctgaagatacagccgcctacagatgtgccgccagcccctacgtgtccacccccaccatgaacatcctggaagagtacagatactggggcctgggaacacaagtgacagtgtccagcctcgagggacagcctaaggccaatcctaccgtgacactgttccctccaagcagcgaagaactccaggccaacaaggccacacttgtgtgcctgatctccgacttctaccctggggctgtgacagtggcttggaaggccgatggatctcctgtgaaagccggcgtggaaaccaccaagccatccaagcagagcaacaacaaatacgccgccagctcctacctgagcctgacacctgagcagtggaagtcccacagatcctacagctgccaagtgacccacgaaggcagcaccgtggaaaagacagtggcccctacagagtgcagcggcagagccgattgcggctttaccagcgagagctaccagcagggcgtgctgagcgccaccatcctgtacgagatcctgctgggcaaggccaccctgtacgccgtgctggtgtctgccctggtgctgatggctatggtcaagcggaaggacagccgggga

SEQ ID NO: 5650 - DNA, 1353 bp, Artificial Sequence
  Synthetic Polynucloetide
atggccttaccagtgaccgccttgctcctgccgctggccttgctgctccacgccgccaggccggaggttcagctgcttgagtctggcggaggactggttcaacctggcggaagcctgagactgtcttgtgccgccagcggcttcacctttagcagctacgccatgagctgggtccgacaggctcctggcaaaggactggaatgggtgtccagcatcagcggcagcggcgactacatctactacgccgatagcgtgaagggcagattcaccatcagccgggacatcagcaagaacaccctgtacctccagatgaacagcctgagagccgaggacaccgccgtgtactactgtgccaaagaaggcaccggcgctaacagcagcctggccgattatagaggccagggcacactggtcaccgtgtctagtggcggaggaagcggcggaggatctgaagtgcaactggtggaatctggagggggaagcgtgcaggcaggcggatctctgagactgtcctgcaccacatctggcagagccctgaatatgtacgtgatgggatggtttcggcaggctcccggcaacgagcgggaatttgtggccgctacaagcagcagcggcggcagcacaagctaccccgattctgtgaagggcagattcacaatctcccgcgataatgccaagaatactgtgtacctgcagatgaatagtctgaagcctgaagatacagccgcctacagatgtgccgccagcccctacgtgtccacccccaccatgaacatcctggaagagtacagatactggggcctgggaacacaagtgacagtgtccagcctcgagggacagcctaaggccaatcctaccgtgacactgttccctccaagcagcgaagaactccaggccaacaaggccacacttgtgtgcctgatctccgacttctaccctggggctgtgacagtggcttggaaggccgatggatctcctgtgaaagccggcgtggaaaccaccaagccatccaagcagagcaacaacaaatacgccgccagctcctacctgagcctgacacctgagcagtggaagtcccacagatcctacagctgccaagtgacccacgaaggcagcaccgtggaaaagacagtggcccctacagagtgcagccccatcaagaccgatgtgattacaatggaccccaaggacaactgctccaaggacgccaacgataccctgctgctccagctgaccaacaccagcgcctactacatgtacttgttgctgctgctgaagtccgtggtgtacttcgccatcatcacatgctgcctgctgcggagaaccgccttctgctgcaacggcgagaagtct

SEQ ID NO: 5651 - DNA, 2304 bp, Artificial Sequence; identical to SEQ ID NO: 5155
  Synthetic Polynucloetide

SEQ ID NO: 5652 - DNA, 3363 bp, Artificial Sequence; identical to SEQ ID NO: 5156
  Synthetic Polynucloetide

SEQ ID NO: 5653 - DNA, 3360 bp, Artificial Sequence; identical to SEQ ID NO: 5157
  Synthetic Polynucloetide

SEQ ID NO: 5654 - DNA, 3360 bp, Artificial Sequence; identical to SEQ ID NO: 5158
  Synthetic Polynucloetide

SEQ ID NO: 5655 - DNA, 2658 bp, Artificial Sequence; identical to SEQ ID NO: 5159
  Synthetic Polynucloetide

SEQ ID NO: 5656 - DNA, 3333 bp, Artificial Sequence; identical to SEQ ID NO: 5160
  Synthetic Polynucloetide

SEQ ID NO: 5657 - DNA, 2670 bp, Artificial Sequence; identical to SEQ ID NO: 5161
  Synthetic Polynucloetide

SEQ ID NO: 5658 - DNA, 3336 bp, Artificial Sequence; identical to SEQ ID NO: 5162
  Synthetic Polynucloetide

SEQ ID NO: 5659 - DNA, 3360 bp, Artificial Sequence; identical to SEQ ID NO: 5163
  Synthetic Polynucloetide

SEQ ID NO: 5660 - DNA, 3606 bp, Artificial Sequence; identical to SEQ ID NO: 5164
  Synthetic Polynucloetide

SEQ ID NO: 5661 - DNA, 3471 bp, Artificial Sequence; identical to SEQ ID NO: 5165
  Synthetic Polynucloetide

SEQ ID NO: 5662 - DNA, 2682 bp, Artificial Sequence; identical to SEQ ID NO: 5166
  Synthetic Polynucloetide

SEQ ID NO: 5663 - DNA, 3891 bp, Artificial Sequence; identical to SEQ ID NO: 5167
  Synthetic Polynucloetide

SEQ ID NO: 5664 - DNA, 3246 bp, Artificial Sequence; identical to SEQ ID NO: 5168
  Synthetic Polynucloetide

SEQ ID NO: 5665 - DNA, 3246 bp, Artificial Sequence; identical to SEQ ID NO: 5169
  Synthetic Polynucloetide

SEQ ID NO: 5666 - DNA, 3459 bp, Artificial Sequence; identical to SEQ ID NO: 5170
  Synthetic Polynucloetide

SEQ ID NO: 5667 - DNA, 3582 bp, Artificial Sequence; identical to SEQ ID NO: 5171
  Synthetic Polynucloetide

SEQ ID NO: 5668 - DNA, 3465 bp, Artificial Sequence; identical to SEQ ID NO: 5172
  Synthetic Polynucloetide

SEQ ID NO: 5669 - DNA, 3591 bp, Artificial Sequence; identical to SEQ ID NO: 5173
  Synthetic Polynucloetide

SEQ ID NO: 5670 - DNA, 3264 bp, Artificial Sequence; identical to SEQ ID NO: 5174
  Synthetic Polynucloetide

SEQ ID NO: 5671 - DNA, 2736 bp, Artificial Sequence; identical to SEQ ID NO: 5175
  Synthetic Polynucloetide

SEQ ID NO: 5672 - DNA, 2670 bp, Artificial Sequence; identical to SEQ ID NO: 5176
  Synthetic Polynucloetide

SEQ ID NO: 5673 - DNA, 2670 bp, Artificial Sequence; identical to SEQ ID NO: 5177
  Synthetic Polynucloetide

SEQ ID NO: 5674 - DNA, 2160 bp, Artificial Sequence; identical to SEQ ID NO: 5178
  Synthetic Polynucloetide

SEQ ID NO: 5675 - DNA, 2055 bp, Artificial Sequence; identical to SEQ ID NO: 5179
  Synthetic Polynucloetide

SEQ ID NO: 5676 - DNA, 2085 bp, Artificial Sequence; identical to SEQ ID NO: 5180
  Synthetic Polynucloetide

SEQ ID NO: 5677 - DNA, 2034 bp, Artificial Sequence; identical to SEQ ID NO: 5181
  Synthetic Polynucloetide

SEQ ID NO: 5678 - DNA, 2145 bp, Artificial Sequence; identical to SEQ ID NO: 5182
  Synthetic Polynucloetide

SEQ ID NO: 5679 - DNA, 1644 bp, Artificial Sequence; identical to SEQ ID NO: 5183
  Synthetic Polynucloetide

SEQ ID NO: 5680 - DNA, 2181 bp, Artificial Sequence; identical to SEQ ID NO: 5184
  Synthetic Polynucloetide

SEQ ID NO: 5681 - DNA, 1683 bp, Artificial Sequence; identical to SEQ ID NO: 5185
  Synthetic Polynucloetide

SEQ ID NO: 5682 - DNA, 4185 bp, Artificial Sequence
  Synthetic Polynucloetide
atggccttaccagtgaccgccttgctcctgccgctggccttgctgctccacgccgccaggccggaggttcagctgcttgagtctggcggaggactggttcaacctggcggaagcctgagactgtcttgtgccgccagcggcttcacctttagcagctacgccatgagctgggtccgacaggctcctggcaaaggactggaatgggtgtccagcatcagcggcagcggcgactacatctactacgccgatagcgtgaagggcagattcaccatcagccgggacatcagcaagaacaccctgtacctccagatgaacagcctgagagccgaggacaccgccgtgtactactgtgccaaagaaggcaccggcgctaacagcagcctggccgattatagaggccagggcacactggtcaccgtgtctagtggcggaggaagcggcggaggatctgaagtgcaactggtggaatctggagggggaagcgtgcaggcaggcggatctctgagactgtcctgcaccacatctggcagagccctgaatatgtacgtgatgggatggtttcggcaggctcccggcaacgagcgggaatttgtggccgctacaagcagcagcggcggcagcacaagctaccccgattctgtgaagggcagattcacaatctcccgcgataatgccaagaatactgtgtacctgcagatgaatagtctgaagcctgaagatacagccgcctacagatgtgccgccagcccctacgtgtccacccccaccatgaacatcctggaagagtacagatactggggcctgggaacacaagtgacagtgtccagcggtaccggcggaggcggatctggcggcggaggtagcggtggcggaggatctgaattcgacatccagatgacacagagccctagcagcctgtctgccagcgtgggagacagagtgaccatcacatgcaaggccagcgaccacatcaacaactggctggcctggtatcagcagaagcctggacaggcccctaagctgctgatctacggcgctaccacactggaaacaggcgtgcccagcagattttctggcagcggctctggcaccgactacaccctgacaatatccagcctccagcctgaggacttcgccacctactactgtcagcagagctggaacaccccttggacattcggccagggcaccaagctggaaatcaagagactcgagatccagaaccctgatcctgccgtgtaccagctgcgggatagcaagagcagcgacaagagcgtgtgtctgttcaccgacttcgacagccagaccaacgtgtcccagagcaaggactccgacgtgtacatcaccgataagtgcgtgctggacatgcggagcatggacttcaagagcaactccgccgtggcctggtccaacaagtccgatttcgcctgcgccaacgccttcaacaacagcattatccccgaggacacattcttcccaagcagcgacgtgccctgcgacgtgaagctggtggaaaagagcttcgagacagacaccaacctgaacttccagaacctgagcgtgatcggcttcagaatcctgctgctgaaagtggccggctttaacctgctgatgaccctgcggctgtggtccagccgcgccaagagaagcggatctggcgtgaagcagaccctgaatttcgacctgctgaagctggctggcgacgtggaatccaacccaggccctactagtatggactggatttggcgcatccttttccttgtcggcgctgctaccggcgcccattcccagctccagttgcaagagagcggccctggcttggtaaaaccttccgagacccttagcctcacatgcacggttagtgggggcagcatttcctcaggtgattactattggggatggattcggcaacccccgggtaaaggattggagtggattggtcatatttattatagtggagcgacgtactacaacccaagtctcaaatccagggttacaatatccgtcgatacgagcaggaaccaattcagcttgaaactttctagtgtcaccgcagcagacacagccgtctattactgtacgcgggatgactccagtaattggcggtcccgagggcaagggacactggtcacggtctcctcatctggaggcggtggaagcggtggaggaggatctcaggttcagctgcaagagtctggcggaggacttgctcaagctggcggaagcctgagactgtcttgtgccgcctctggcagaaccttcagcatgggctggtttagacaggcccctggcaaagagagagagttcgtcgccgccatcacatacagcggcggcagcccttactacgcctcttctgtcagaggccggttcaccatcagccgggacaacgccaagaacaccgtgtacctccagatgaacagcctgaagccagaggacaccgccgtgtactactgtgccgccaatccaacctacggcagcgactggaatgccgagaattggggccagggcacccaagtgacagtgtctagtggatccggcggcggaggatctggcggaggcggatctgggggcggaggctctttcgaacaagttcagcttcaacagcctggcgctgagctggtcaaacctggcgcttctgtgaagatgagctgcaaagccagcggctacgccttcagcagctactggatcaactggatgaagcagaaacccggccagggactcgaatggatcggccaaatctatcccggcgacggcgacaccaactacaacggcaagttcaagggcagagccacactgaccgccgatacctctagcagcacagcctacatgcagctgagcagcctgaccagcgaagatagcgccgtgtacttctgtgcccggtccatcacaacagtcgtgggctgcgctatggactattggggccagggaacaagcgtgaccgtgtctagtacgcgtgaggacctgaagaacgtgttcccacctgaggtggccgtgttcgagcctagcaaggccgagatcgcccacacccagaaagccaccctcgtgtgcctggctaccggcttctaccccgaccatgtggaactgtcttggtgggtcaacggcaaagaggtgcacagcggcgtgtgtaccgacccccagccactgaaagaacagcccgccctgaacgacagccggtactgcctgagcagcagactgagagtgtccgccaccttctggcagaacccccggaaccacttcagatgccaggtgcagttctacggcctgagcgagaacgacgagtggacccaggacagagccaagcccgtgacccagatcgtgtctgccgaagcctggggcagagccgattgcggcatcaccagcgccagctaccaccagggcgtgctgagcgccaccatcctgtacgagatcctgctgggcaaggccaccctgtacgccgtgctggtgtctgccctggtgctgatggctatggtcaagcggaaggacagccggggaagggccaagcgatctggatctggagcaacaaacttctcactactcaaacaagcaggtgacgtggaggagaatcccgggccttctagaggccatatgaccgagtacaagcccacggtgcgcctcgccacccgcgacgacgtccccagggccgtacgcaccctcgccgccgcgttcgccgactaccccgccacgcgccacaccgtcgatccggaccgccacatcgagcgggtcaccgagctgcaagaactcttcctcacgcgcgtcgggctcgacatcggcaaggtgtgggtcgcggacgacggcgccgcggtggcggtctggaccacgccggagagcgtcgaagcgggggcggtgttcgccgagatcggcccgcgcatggccgagttgagcggttcccggctggccgcgcagcaacagatggaaggcctcctggcgccgcaccggcccaaggagcccgcgtggttcctggccaccgtcggcgtctcgcccgaccaccagggcaagggtctgggcagcgccgtcgtgctccccggagtggaggcggccgagcgcgccggggtgcccgccttcctggagacctccgcgccccgcaacctccccttctacgagcggctcggcttcaccgtcaccgccgacgtcgaggtgcccgaaggaccgcgcacctggtgcatgacccgcaagcccggtgcctga

SEQ ID NO: 5683 - DNA, 4182 bp, Artificial Sequence
  Synthetic Polynucloetide
atggccttaccagtgaccgccttgctcctgccgctggccttgctgctccacgccgccaggccggaggttcagctgcttgagtctggcggaggactggttcaacctggcggaagcctgagactgtcttgtgccgccagcggcttcacctttagcagctacgccatgagctgggtccgacaggctcctggcaaaggactggaatgggtgtccagcatcagcggcagcggcgactacatctactacgccgatagcgtgaagggcagattcaccatcagccgggacatcagcaagaacaccctgtacctccagatgaacagcctgagagccgaggacaccgccgtgtactactgtgccaaagaaggcaccggcgctaacagcagcctggccgattatagaggccagggcacactggtcaccgtgtctagtggcggaggaagcggcggaggatctgaagtgcaactggtggaatctggagggggaagcgtgcaggcaggcggatctctgagactgtcctgcaccacatctggcagagccctgaatatgtacgtgatgggatggtttcggcaggctcccggcaacgagcgggaatttgtggccgctacaagcagcagcggcggcagcacaagctaccccgattctgtgaagggcagattcacaatctcccgcgataatgccaagaatactgtgtacctgcagatgaatagtctgaagcctgaagatacagccgcctacagatgtgccgccagcccctacgtgtccacccccaccatgaacatcctggaagagtacagatactggggcctgggaacacaagtgacagtgtccagcggtaccggcggaggcggatctggcggcggaggtagcggtggcggaggatctgaattcgacatccagatgacacagagccctagcagcctgtctgccagcgtgggagacagagtgaccatcacatgcaaggccagcgaccacatcaacaactggctggcctggtatcagcagaagcctggacaggcccctaagctgctgatctacggcgctaccacactggaaacaggcgtgcccagcagattttctggcagcggctctggcaccgactacaccctgacaatatccagcctccagcctgaggacttcgccacctactactgtcagcagagctggaacaccccttggacattcggccagggcaccaagctggaaatcaagagactcgaggacctgaagaacgtgttcccacctgaggtggccgtgttcgagcctagcaaggccgagatcgcccacacccagaaagccaccctcgtgtgcctggctaccggcttctaccccgaccatgtggaactgtcttggtgggtcaacggcaaagaggtgcacagcggcgtgtgtaccgacccccagccactgaaagaacagcccgccctgaacgacagccggtactgcctgagcagcagactgagagtgtccgccaccttctggcagaacccccggaaccacttcagatgccaggtgcagttctacggcctgagcgagaacgacgagtggacccaggacagagccaagcccgtgacccagatcgtgtctgccgaagcctggggcagagccgattgcggcatcaccagcgccagctaccaccagggcgtgctgagcgccaccatcctgtacgagatcctgctgggcaaggccaccctgtacgccgtgctggtgtctgccctggtgctgatggctatggtcaagcggaaggacagccggggaagggccaagcgatctggatctggagcaacaaacttctcactactcaaacaagcaggtgacgtggaggagaatcccgggcctactagtatggactggatttggcgcatccttttccttgtcggcgctgctaccggcgcccattcccagctccagttgcaagagagcggccctggcttggtaaaaccttccgagacccttagcctcacatgcacggttagtgggggcagcatttcctcaggtgattactattggggatggattcggcaacccccgggtaaaggattggagtggattggtcatatttattatagtggagcgacgtactacaacccaagtctcaaatccagggttacaatatccgtcgatacgagcaggaaccaattcagcttgaaactttctagtgtcaccgcagcagacacagccgtctattactgtacgcgggatgactccagtaattggcggtcccgagggcaagggacactggtcacggtctcctcatctggaggcggtggaagcggtggaggaggatctcaggttcagctgcaagagtctggcggaggacttgctcaagctggcggaagcctgagactgtcttgtgccgcctctggcagaaccttcagcatgggctggtttagacaggcccctggcaaagagagagagttcgtcgccgccatcacatacagcggcggcagcccttactacgcctcttctgtcagaggccggttcaccatcagccgggacaacgccaagaacaccgtgtacctccagatgaacagcctgaagccagaggacaccgccgtgtactactgtgccgccaatccaacctacggcagcgactggaatgccgagaattggggccagggcacccaagtgacagtgtctagtggatccggcggcggaggatctggcggaggcggatctgggggcggaggctctttcgaacaagttcagcttcaacagcctggcgctgagctggtcaaacctggcgcttctgtgaagatgagctgcaaagccagcggctacgccttcagcagctactggatcaactggatgaagcagaaacccggccagggactcgaatggatcggccaaatctatcccggcgacggcgacaccaactacaacggcaagttcaagggcagagccacactgaccgccgatacctctagcagcacagcctacatgcagctgagcagcctgaccagcgaagatagcgccgtgtacttctgtgcccggtccatcacaacagtcgtgggctgcgctatggactattggggccagggaacaagcgtgaccgtgtctagtacgcgtatccagaaccctgatcctgccgtgtaccagctgcgggatagcaagagcagcgacaagagcgtgtgtctgttcaccgacttcgacagccagaccaacgtgtcccagagcaaggactccgacgtgtacatcaccgataagtgcgtgctggacatgcggagcatggacttcaagagcaactccgccgtggcctggtccaacaagtccgatttcgcctgcgccaacgccttcaacaacagcattatccccgaggacacattcttcccaagcagcgacgtgccctgcgacgtgaagctggtggaaaagagcttcgagacagacaccaacctgaacttccagaacctgagcgtgatcggcttcagaatcctgctgctgaaagtggccggctttaacctgctgatgaccctgcggctgtggtccagccgcgccaagagaagcggatctggcgtgaagcagaccctgaatttcgacctgctgaagctggctggcgacgtggaatccaacccaggcccttctagaggccatatgaccgagtacaagcccacggtgcgcctcgccacccgcgacgacgtccccagggccgtacgcaccctcgccgccgcgttcgccgactaccccgccacgcgccacaccgtcgatccggaccgccacatcgagcgggtcaccgagctgcaagaactcttcctcacgcgcgtcgggctcgacatcggcaaggtgtgggtcgcggacgacggcgccgcggtggcggtctggaccacgccggagagcgtcgaagcgggggcggtgttcgccgagatcggcccgcgcatggccgagttgagcggttcccggctggccgcgcagcaacagatggaaggcctcctggcgccgcaccggcccaaggagcccgcgtggttcctggccaccgtcggcgtctcgcccgaccaccagggcaagggtctgggcagcgccgtcgtgctccccggagtggaggcggccgagcgcgccggggtgcccgccttcctggagacctccgcgccccgcaacctccccttctacgagcggctcggcttcaccgtcaccgccgacgtcgaggtgcccgaaggaccgcgcacctggtgcatgacccgcaagcccggtgcctga

SEQ ID NO: 5684 - DNA, 4182 bp, Artificial Sequence
  Synthetic Polynucloetide
atggccttaccagtgaccgccttgctcctgccgctggccttgctgctccacgccgccaggccggaggttcagctgcttgagtctggcggaggactggttcaacctggcggaagcctgagactgtcttgtgccgccagcggcttcacctttagcagctacgccatgagctgggtccgacaggctcctggcaaaggactggaatgggtgtccagcatcagcggcagcggcgactacatctactacgccgatagcgtgaagggcagattcaccatcagccgggacatcagcaagaacaccctgtacctccagatgaacagcctgagagccgaggacaccgccgtgtactactgtgccaaagaaggcaccggcgctaacagcagcctggccgattatagaggccagggcacactggtcaccgtgtctagtggcggaggaagcggcggaggatctgaagtgcaactggtggaatctggagggggaagcgtgcaggcaggcggatctctgagactgtcctgcaccacatctggcagagccctgaatatgtacgtgatgggatggtttcggcaggctcccggcaacgagcgggaatttgtggccgctacaagcagcagcggcggcagcacaagctaccccgattctgtgaagggcagattcacaatctcccgcgataatgccaagaatactgtgtacctgcagatgaatagtctgaagcctgaagatacagccgcctacagatgtgccgccagcccctacgtgtccacccccaccatgaacatcctggaagagtacagatactggggcctgggaacacaagtgacagtgtccagcggtaccggcggaggcggatctggcggcggaggtagcggtggcggaggatctgaattcgacatccagatgacacagagccctagcagcctgtctgccagcgtgggagacagagtgaccatcacatgcaaggccagcgaccacatcaacaactggctggcctggtatcagcagaagcctggacaggcccctaagctgctgatctacggcgctaccacactggaaacaggcgtgcccagcagattttctggcagcggctctggcaccgactacaccctgacaatatccagcctccagcctgaggacttcgccacctactactgtcagcagagctggaacaccccttggacattcggccagggcaccaagctggaaatcaagagactcgaggacctgaagaacgtgttcccacctgaggtggccgtgttcgagcctagcgaggccgagatcagccacacccagaaagccaccctcgtgtgcctggctaccggcttctaccccgaccatgtggaactgtcttggtgggtcaacggcaaagaggtgcacagcggcgtgtgtaccgacccccagccactgaaagaacagcccgccctgaacgacagccggtactgcctgagcagcagactgagagtgtccgccaccttctggcagaacccccggaaccacttcagatgccaggtgcagttctacggcctgagcgagaacgacgagtggacccaggacagagccaagcccgtgacccagatcgtgtctgccgaagcctggggcagagccgattgcggctttaccagcgagagctaccagcagggcgtgctgagcgccaccatcctgtacgagatcctgctgggcaaggccaccctgtacgccgtgctggtgtctgccctggtgctgatggctatggtcaagcggaaggacagccggggaagggccaagcgatctggatctggagcaacaaacttctcactactcaaacaagcaggtgacgtggaggagaatcccgggcctactagtatggactggatttggcgcatccttttccttgtcggcgctgctaccggcgcccattcccagctccagttgcaagagagcggccctggcttggtaaaaccttccgagacccttagcctcacatgcacggttagtgggggcagcatttcctcaggtgattactattggggatggattcggcaacccccgggtaaaggattggagtggattggtcatatttattatagtggagcgacgtactacaacccaagtctcaaatccagggttacaatatccgtcgatacgagcaggaaccaattcagcttgaaactttctagtgtcaccgcagcagacacagccgtctattactgtacgcgggatgactccagtaattggcggtcccgagggcaagggacactggtcacggtctcctcatctggaggcggtggaagcggtggaggaggatctcaggttcagctgcaagagtctggcggaggacttgctcaagctggcggaagcctgagactgtcttgtgccgcctctggcagaaccttcagcatgggctggtttagacaggcccctggcaaagagagagagttcgtcgccgccatcacatacagcggcggcagcccttactacgcctcttctgtcagaggccggttcaccatcagccgggacaacgccaagaacaccgtgtacctccagatgaacagcctgaagccagaggacaccgccgtgtactactgtgccgccaatccaacctacggcagcgactggaatgccgagaattggggccagggcacccaagtgacagtgtctagtggatccggcggcggaggatctggcggaggcggatctgggggcggaggctctttcgaacaagttcagcttcaacagcctggcgctgagctggtcaaacctggcgcttctgtgaagatgagctgcaaagccagcggctacgccttcagcagctactggatcaactggatgaagcagaaacccggccagggactcgaatggatcggccaaatctatcccggcgacggcgacaccaactacaacggcaagttcaagggcagagccacactgaccgccgatacctctagcagcacagcctacatgcagctgagcagcctgaccagcgaagatagcgccgtgtacttctgtgcccggtccatcacaacagtcgtgggctgcgctatggactattggggccagggaacaagcgtgaccgtgtctagtacgcgtatccagaaccctgatcctgccgtgtaccagctgcgggatagcaagagcagcgacaagagcgtgtgtctgttcaccgacttcgacagccagaccaacgtgtcccagagcaaggactccgacgtgtacatcaccgataagtgcgtgctggacatgcggagcatggacttcaagagcaactccgccgtggcctggtccaacaagtccgatttcgcctgcgccaacgccttcaacaacagcattatccccgaggacacattcttcccaagccccgagagcagctgcgacgtgaagctggtggaaaagagcttcgagacagacaccaacctgaacttccagaacctgagcgtgatcggcttcagaatcctgctgctgaaagtggccggctttaacctgctgatgaccctgcggctgtggtccagccgcgccaagagaagcggatctggcgtgaagcagaccctgaatttcgacctgctgaagctggctggcgacgtggaatccaacccaggcccttctagaggccatatgaccgagtacaagcccacggtgcgcctcgccacccgcgacgacgtccccagggccgtacgcaccctcgccgccgcgttcgccgactaccccgccacgcgccacaccgtcgatccggaccgccacatcgagcgggtcaccgagctgcaagaactcttcctcacgcgcgtcgggctcgacatcggcaaggtgtgggtcgcggacgacggcgccgcggtggcggtctggaccacgccggagagcgtcgaagcgggggcggtgttcgccgagatcggcccgcgcatggccgagttgagcggttcccggctggccgcgcagcaacagatggaaggcctcctggcgccgcaccggcccaaggagcccgcgtggttcctggccaccgtcggcgtctcgcccgaccaccagggcaagggtctgggcagcgccgtcgtgctccccggagtggaggcggccgagcgcgccggggtgcccgccttcctggagacctccgcgccccgcaacctccccttctacgagcggctcggcttcaccgtcaccgccgacgtcgaggtgcccgaaggaccgcgcacctggtgcatgacccgcaagcccggtgcctga

SEQ ID NO: 5685 - DNA, 3480 bp, Artificial Sequence
  Synthetic Polynucloetide
atggccttaccagtgaccgccttgctcctgccgctggccttgctgctccacgccgccaggccggaggttcagctgcttgagtctggcggaggactggttcaacctggcggaagcctgagactgtcttgtgccgccagcggcttcacctttagcagctacgccatgagctgggtccgacaggctcctggcaaaggactggaatgggtgtccagcatcagcggcagcggcgactacatctactacgccgatagcgtgaagggcagattcaccatcagccgggacatcagcaagaacaccctgtacctccagatgaacagcctgagagccgaggacaccgccgtgtactactgtgccaaagaaggcaccggcgctaacagcagcctggccgattatagaggccagggcacactggtcaccgtgtctagtggcggaggaagcggcggaggatctgaagtgcaactggtggaatctggagggggaagcgtgcaggcaggcggatctctgagactgtcctgcaccacatctggcagagccctgaatatgtacgtgatgggatggtttcggcaggctcccggcaacgagcgggaatttgtggccgctacaagcagcagcggcggcagcacaagctaccccgattctgtgaagggcagattcacaatctcccgcgataatgccaagaatactgtgtacctgcagatgaatagtctgaagcctgaagatacagccgcctacagatgtgccgccagcccctacgtgtccacccccaccatgaacatcctggaagagtacagatactggggcctgggaacacaagtgacagtgtccagcggtaccggcggaggcggatctggcggcggaggtagcggtggcggaggatctgaattcgacatccagatgacacagagccctagcagcctgtctgccagcgtgggagacagagtgaccatcacatgcaaggccagcgaccacatcaacaactggctggcctggtatcagcagaagcctggacaggcccctaagctgctgatctacggcgctaccacactggaaacaggcgtgcccagcagattttctggcagcggctctggcaccgactacaccctgacaatatccagcctccagcctgaggacttcgccacctactactgtcagcagagctggaacaccccttggacattcggccagggcaccaagctggaaatcaagagactcgaggacctgaagaacgtgttcccacctgaggtggccgtgttcgagcctagcgaggccgagatcagccacacccagaaagccaccctcgtgtgcctggctaccggcttctaccccgaccatgtggaactgtcttggtgggtcaacggcaaagaggtgcacagcggcgtgtgtaccgacccccagccactgaaagaacagcccgccctgaacgacagccggtactgcctgagcagcagactgagagtgtccgccaccttctggcagaacccccggaaccacttcagatgccaggtgcagttctacggcctgagcgagaacgacgagtggacccaggacagagccaagcccgtgacccagatcgtgtctgccgaagcctggggcagagccgattgcggctttaccagcgagagctaccagcagggcgtgctgagcgccaccatcctgtacgagatcctgctgggcaaggccaccctgtacgccgtgctggtgtctgccctggtgctgatggctatggtcaagcggaaggacagccggggaagggccaagcgatctggatctggagcaacaaacttctcactactcaaacaagcaggtgacgtggaggagaatcccgggcctactagtatggactggatttggcgcatccttttccttgtcggcgctgctaccggcgcccattcccagctccagttgcaagagagcggccctggcttggtaaaaccttccgagacccttagcctcacatgcacggttagtgggggcagcatttcctcaggtgattactattggggatggattcggcaacccccgggtaaaggattggagtggattggtcatatttattatagtggagcgacgtactacaacccaagtctcaaatccagggttacaatatccgtcgatacgagcaggaaccaattcagcttgaaactttctagtgtcaccgcagcagacacagccgtctattactgtacgcgggatgactccagtaattggcggtcccgagggcaagggacactggtcacggtctcctcatctggaggcggtggaagcggtggaggaggatctcaggttcagctgcaagagtctggcggaggacttgctcaagctggcggaagcctgagactgtcttgtgccgcctctggcagaaccttcagcatgggctggtttagacaggcccctggcaaagagagagagttcgtcgccgccatcacatacagcggcggcagcccttactacgcctcttctgtcagaggccggttcaccatcagccgggacaacgccaagaacaccgtgtacctccagatgaacagcctgaagccagaggacaccgccgtgtactactgtgccgccaatccaacctacggcagcgactggaatgccgagaattggggccagggcacccaagtgacagtgtctagtggatccggcggcggaggatctggcggaggcggatctgggggcggaggctctttcgaacaagttcagcttcaacagcctggcgctgagctggtcaaacctggcgcttctgtgaagatgagctgcaaagccagcggctacgccttcagcagctactggatcaactggatgaagcagaaacccggccagggactcgaatggatcggccaaatctatcccggcgacggcgacaccaactacaacggcaagttcaagggcagagccacactgaccgccgatacctctagcagcacagcctacatgcagctgagcagcctgaccagcgaagatagcgccgtgtacttctgtgcccggtccatcacaacagtcgtgggctgcgctatggactattggggccagggaacaagcgtgaccgtgtctagtacgcgtatccagaaccctgatcctgccgtgtaccagctgcgggatagcaagagcagcgacaagagcgtgtgtctgttcaccgacttcgacagccagaccaacgtgtcccagagcaaggactccgacgtgtacatcaccgataagtgcgtgctggacatgcggagcatggacttcaagagcaactccgccgtggcctggtccaacaagtccgatttcgcctgcgccaacgccttcaacaacagcattatccccgaggacacattcttcccaagccccgagagcagctgcgacgtgaagctggtggaaaagagcttcgagacagacaccaacctgaacttccagaacctgagcgtgatcggcttcagaatcctgctgctgaaagtggccggctttaacctgctgatgaccctgcggctgtggtccagc

SEQ ID NO: 5686 - DNA, 4155 bp, Artificial Sequence
  Synthetic Polynucloetide
atggccttaccagtgaccgccttgctcctgccgctggccttgctgctccacgccgccaggccggaggttcagctgcttgagtctggcggaggactggttcaacctggcggaagcctgagactgtcttgtgccgccagcggcttcacctttagcagctacgccatgagctgggtccgacaggctcctggcaaaggactggaatgggtgtccagcatcagcggcagcggcgactacatctactacgccgatagcgtgaagggcagattcaccatcagccgggacatcagcaagaacaccctgtacctccagatgaacagcctgagagccgaggacaccgccgtgtactactgtgccaaagaaggcaccggcgctaacagcagcctggccgattatagaggccagggcacactggtcaccgtgtctagtggcggaggaagcggcggaggatctgaagtgcaactggtggaatctggagggggaagcgtgcaggcaggcggatctctgagactgtcctgcaccacatctggcagagccctgaatatgtacgtgatgggatggtttcggcaggctcccggcaacgagcgggaatttgtggccgctacaagcagcagcggcggcagcacaagctaccccgattctgtgaagggcagattcacaatctcccgcgataatgccaagaatactgtgtacctgcagatgaatagtctgaagcctgaagatacagccgcctacagatgtgccgccagcccctacgtgtccacccccaccatgaacatcctggaagagtacagatactggggcctgggaacacaagtgacagtgtccagcggtaccggcggaggcggatctggcggcggaggtagcggtggcggaggatctgaattcgacatccagatgacacagagccctagcagcctgtctgccagcgtgggagacagagtgaccatcacatgcaaggccagcgaccacatcaacaactggctggcctggtatcagcagaagcctggacaggcccctaagctgctgatctacggcgctaccacactggaaacaggcgtgcccagcagattttctggcagcggctctggcaccgactacaccctgacaatatccagcctccagcctgaggacttcgccacctactactgtcagcagagctggaacaccccttggacattcggccagggcaccaagctggaaatcaagagactcgaggacctgaagaacgtgttcccacctgaggtggccgtgttcgagcctagcgaggccgagatcagccacacccagaaagccaccctcgtgtgcctggctaccggcttctaccccgaccatgtggaactgtcttggtgggtcaacggcaaagaggtgcacagcggcgtgtgtaccgacccccagccactgaaagaacagcccgccctgaacgacagccggtactgcctgagcagcagactgagagtgtccgccaccttctggcagaacccccggaaccacttcagatgccaggtgcagttctacggcctgagcgagaacgacgagtggacccaggacagagccaagcccgtgacccagatcgtgtctgccgaagcctggggcagagccgattgcggctttaccagcgagagctaccagcagggcgtgctgagcgccaccatcctgtacgagatcctgctgggcaaggccaccctgtacgccgtgctggtgtctgccctggtgctgatggctatggtcaagcggaaggacagccggggaagggccaagcgatctggatctggagcaacaaacttctcactactcaaacaagcaggtgacgtggaggagaatcccgggcctactagtatggactggatttggcgcatccttttccttgtcggcgctgctaccggcgcccattcccagctccagttgcaagagagcggccctggcttggtaaaaccttccgagacccttagcctcacatgcacggttagtgggggcagcatttcctcaggtgattactattggggatggattcggcaacccccgggtaaaggattggagtggattggtcatatttattatagtggagcgacgtactacaacccaagtctcaaatccagggttacaatatccgtcgatacgagcaggaaccaattcagcttgaaactttctagtgtcaccgcagcagacacagccgtctattactgtacgcgggatgactccagtaattggcggtcccgagggcaagggacactggtcacggtctcctcatctggaggcggtggaagcggtggaggaggatctcaggttcagctgcaagagtctggcggaggacttgctcaagctggcggaagcctgagactgtcttgtgccgcctctggcagaaccttcagcatgggctggtttagacaggcccctggcaaagagagagagttcgtcgccgccatcacatacagcggcggcagcccttactacgcctcttctgtcagaggccggttcaccatcagccgggacaacgccaagaacaccgtgtacctccagatgaacagcctgaagccagaggacaccgccgtgtactactgtgccgccaatccaacctacggcagcgactggaatgccgagaattggggccagggcacccaagtgacagtgtctagtggatccggcggcggaggatctggcggaggcggatctgggggcggaggctctttcgaacaagttcagcttcaacagcctggcgctgagctggtcaaacctggcgcttctgtgaagatgagctgcaaagccagcggctacgccttcagcagctactggatcaactggatgaagcagaaacccggccagggactcgaatggatcggccaaatctatcccggcgacggcgacaccaactacaacggcaagttcaagggcagagccacactgaccgccgatacctctagcagcacagcctacatgcagctgagcagcctgaccagcgaagatagcgccgtgtacttctgtgcccggtccatcacaacagtcgtgggctgcgctatggactattggggccagggaacaagcgtgaccgtgtctagtacgcgtatccagaaccctgatcctgccgtgtaccagctgcgggatagcaagagcagcgacaagagcgtgtgtctgttcaccgacttcgacagccagaccaacgtgtcccagagcaaggactccgacgtgtacatcaccgataagtgcgtgctggacatgcggagcatggacttcaagagcaactccgccgtggcctggtccaacaagtccgatttcgcctgcgccaacgccttcaacaacagcattatccccgaggacacattcttcccaagccccgagagcagctgcgacgtgaagctggtggaaaagagcttcgagacagacaccaacctgaacttccagaacctgagcgtgatcggcttcagaatcctgctgctgaaagtggccggctttaacctgctgatgaccctgcggctgtggtccagccgcgccaagagaagcggatctggcgtgaagcagaccctgaatttcgacctgctgaagctggctggcgacgtggaatccaacccaggcccttctagaggcgggatccacaccatggctacctacgaggtgctgtgcgaggtggcaagaaagctgggcaccgacgacagagaagtggtgctgttcctgctgaacgtgttcatccctcagcctacactggcccagctgatcggtgcactgagagccctgaaagaggaaggccggctgacctttcctctgctggccgaatgcctgttcagagccggaagaagggatctgctgcgggacctgctgcatctggaccccagatttctggaaagacacctggccggcaccatgagctacttcagcccttaccagctgaccgtgctgcacgttgacggcgaactgtgcgccagagatattcggagcctgatcttcctgagcaaggacaccatcggcagccggtctacccctcagacatttctgcactgggtgtactgcatggaaaacctggacctgctcggccccacagatgtggatgccctgatgtccatgctgagaagcctgagcagagtggacctccagagacaggtgcagacactgatgggactgcacctgagcggacctagccacagccagcactacagacacacccct

SEQ ID NO: 5687 - DNA, 3492 bp, Artificial Sequence
  Synthetic Polynucloetide
atggccttaccagtgaccgccttgctcctgccgctggccttgctgctccacgccgccaggccggaggttcagctgcttgagtctggcggaggactggttcaacctggcggaagcctgagactgtcttgtgccgccagcggcttcacctttagcagctacgccatgagctgggtccgacaggctcctggcaaaggactggaatgggtgtccagcatcagcggcagcggcgactacatctactacgccgatagcgtgaagggcagattcaccatcagccgggacatcagcaagaacaccctgtacctccagatgaacagcctgagagccgaggacaccgccgtgtactactgtgccaaagaaggcaccggcgctaacagcagcctggccgattatagaggccagggcacactggtcaccgtgtctagtggcggaggaagcggcggaggatctgaagtgcaactggtggaatctggagggggaagcgtgcaggcaggcggatctctgagactgtcctgcaccacatctggcagagccctgaatatgtacgtgatgggatggtttcggcaggctcccggcaacgagcgggaatttgtggccgctacaagcagcagcggcggcagcacaagctaccccgattctgtgaagggcagattcacaatctcccgcgataatgccaagaatactgtgtacctgcagatgaatagtctgaagcctgaagatacagccgcctacagatgtgccgccagcccctacgtgtccacccccaccatgaacatcctggaagagtacagatactggggcctgggaacacaagtgacagtgtccagcggtaccggcggaggcggatctggcggcggaggtagcggtggcggaggatctgaattcgacatccagatgacacagagccctagcagcctgtctgccagcgtgggagacagagtgaccatcacatgcaaggccagcgaccacatcaacaactggctggcctggtatcagcagaagcctggacaggcccctaagctgctgatctacggcgctaccacactggaaacaggcgtgcccagcagattttctggcagcggctctggcaccgactacaccctgacaatatccagcctccagcctgaggacttcgccacctactactgtcagcagagctggaacaccccttggacattcggccagggcaccaagctggaaatcaagagactcgagatccagaaccctgatcctgccgtgtaccagctgcgggatagcaagagcagcgacaagagcgtgtgtctgttcaccgacttcgacagccagaccaacgtgtcccagagcaaggactccgacgtgtacatcaccgataagtgcgtgctggacatgcggagcatggacttcaagagcaactccgccgtggcctggtccaacaagtccgatttcgcctgcgccaacgccttcaacaacagcattatccccgaggacacattcttcccaagccccgagagcagctgcgacgtgaagctggtggaaaagagcttcgagacagacaccaacctgaacttccagaacctgagcgtgatcggcttcagaatcctgctgctgaaagtggccggctttaacctgctgatgaccctgcggctgtggtccagccgcgccaagagaagcggatctggcgtgaagcagaccctgaatttcgacctgctgaagctggctggcgacgtggaatccaacccaggccctactagtatggactggatttggcgcatccttttccttgtcggcgctgctaccggcgcccattcccagctccagttgcaagagagcggccctggcttggtaaaaccttccgagacccttagcctcacatgcacggttagtgggggcagcatttcctcaggtgattactattggggatggattcggcaacccccgggtaaaggattggagtggattggtcatatttattatagtggagcgacgtactacaacccaagtctcaaatccagggttacaatatccgtcgatacgagcaggaaccaattcagcttgaaactttctagtgtcaccgcagcagacacagccgtctattactgtacgcgggatgactccagtaattggcggtcccgagggcaagggacactggtcacggtctcctcatctggaggcggtggaagcggtggaggaggatctcaggttcagctgcaagagtctggcggaggacttgctcaagctggcggaagcctgagactgtcttgtgccgcctctggcagaaccttcagcatgggctggtttagacaggcccctggcaaagagagagagttcgtcgccgccatcacatacagcggcggcagcccttactacgcctcttctgtcagaggccggttcaccatcagccgggacaacgccaagaacaccgtgtacctccagatgaacagcctgaagccagaggacaccgccgtgtactactgtgccgccaatccaacctacggcagcgactggaatgccgagaattggggccagggcacccaagtgacagtgtctagtggatccggcggcggaggatctggcggaggcggatctgggggcggaggctctttcgaacaagttcagcttcaacagcctggcgctgagctggtcaaacctggcgcttctgtgaagatgagctgcaaagccagcggctacgccttcagcagctactggatcaactggatgaagcagaaacccggccagggactcgaatggatcggccaaatctatcccggcgacggcgacaccaactacaacggcaagttcaagggcagagccacactgaccgccgatacctctagcagcacagcctacatgcagctgagcagcctgaccagcgaagatagcgccgtgtacttctgtgcccggtccatcacaacagtcgtgggctgcgctatggactattggggccagggaacaagcgtgaccgtgtctagtacgcgtgaggacctgaagaacgtgttcccacctgaggtggccgtgttcgagcctagcgaggccgagatcagccacacccagaaagccaccctcgtgtgcctggctaccggcttctaccccgaccatgtggaactgtcttggtgggtcaacggcaaagaggtgcacagcggcgtgtgtaccgacccccagccactgaaagaacagcccgccctgaacgacagccggtactgcctgagcagcagactgagagtgtccgccaccttctggcagaacccccggaaccacttcagatgccaggtgcagttctacggcctgagcgagaacgacgagtggacccaggacagagccaagcccgtgacccagatcgtgtctgccgaagcctggggcagagccgattgcggctttaccagcgagagctaccagcagggcgtgctgagcgccaccatcctgtacgagatcctgctgggcaaggccaccctgtacgccgtgctggtgtctgccctggtgctgatggctatggtcaagcggaaggacagccgggga

SEQ ID NO: 5688 - DNA, 4158 bp, Artificial Sequence
  Synthetic Polynucloetide
atggccttaccagtgaccgccttgctcctgccgctggccttgctgctccacgccgccaggccggaggttcagctgcttgagtctggcggaggactggttcaacctggcggaagcctgagactgtcttgtgccgccagcggcttcacctttagcagctacgccatgagctgggtccgacaggctcctggcaaaggactggaatgggtgtccagcatcagcggcagcggcgactacatctactacgccgatagcgtgaagggcagattcaccatcagccgggacatcagcaagaacaccctgtacctccagatgaacagcctgagagccgaggacaccgccgtgtactactgtgccaaagaaggcaccggcgctaacagcagcctggccgattatagaggccagggcacactggtcaccgtgtctagtggcggaggaagcggcggaggatctgaagtgcaactggtggaatctggagggggaagcgtgcaggcaggcggatctctgagactgtcctgcaccacatctggcagagccctgaatatgtacgtgatgggatggtttcggcaggctcccggcaacgagcgggaatttgtggccgctacaagcagcagcggcggcagcacaagctaccccgattctgtgaagggcagattcacaatctcccgcgataatgccaagaatactgtgtacctgcagatgaatagtctgaagcctgaagatacagccgcctacagatgtgccgccagcccctacgtgtccacccccaccatgaacatcctggaagagtacagatactggggcctgggaacacaagtgacagtgtccagcggtaccggcggaggcggatctggcggcggaggtagcggtggcggaggatctgaattcgacatccagatgacacagagccctagcagcctgtctgccagcgtgggagacagagtgaccatcacatgcaaggccagcgaccacatcaacaactggctggcctggtatcagcagaagcctggacaggcccctaagctgctgatctacggcgctaccacactggaaacaggcgtgcccagcagattttctggcagcggctctggcaccgactacaccctgacaatatccagcctccagcctgaggacttcgccacctactactgtcagcagagctggaacaccccttggacattcggccagggcaccaagctggaaatcaagagactcgagatccagaaccctgatcctgccgtgtaccagctgcgggatagcaagagcagcgacaagagcgtgtgtctgttcaccgacttcgacagccagaccaacgtgtcccagagcaaggactccgacgtgtacatcaccgataagtgcgtgctggacatgcggagcatggacttcaagagcaactccgccgtggcctggtccaacaagtccgatttcgcctgcgccaacgccttcaacaacagcattatccccgaggacacattcttcccaagccccgagagcagctgcgacgtgaagctggtggaaaagagcttcgagacagacaccaacctgaacttccagaacctgagcgtgatcggcttcagaatcctgctgctgaaagtggccggctttaacctgctgatgaccctgcggctgtggtccagccgcgccaagagaagcggatctggcgtgaagcagaccctgaatttcgacctgctgaagctggctggcgacgtggaatccaacccaggccctactagtatggactggatttggcgcatccttttccttgtcggcgctgctaccggcgcccattcccagctccagttgcaagagagcggccctggcttggtaaaaccttccgagacccttagcctcacatgcacggttagtgggggcagcatttcctcaggtgattactattggggatggattcggcaacccccgggtaaaggattggagtggattggtcatatttattatagtggagcgacgtactacaacccaagtctcaaatccagggttacaatatccgtcgatacgagcaggaaccaattcagcttgaaactttctagtgtcaccgcagcagacacagccgtctattactgtacgcgggatgactccagtaattggcggtcccgagggcaagggacactggtcacggtctcctcatctggaggcggtggaagcggtggaggaggatctcaggttcagctgcaagagtctggcggaggacttgctcaagctggcggaagcctgagactgtcttgtgccgcctctggcagaaccttcagcatgggctggtttagacaggcccctggcaaagagagagagttcgtcgccgccatcacatacagcggcggcagcccttactacgcctcttctgtcagaggccggttcaccatcagccgggacaacgccaagaacaccgtgtacctccagatgaacagcctgaagccagaggacaccgccgtgtactactgtgccgccaatccaacctacggcagcgactggaatgccgagaattggggccagggcacccaagtgacagtgtctagtggatccggcggcggaggatctggcggaggcggatctgggggcggaggctctttcgaacaagttcagcttcaacagcctggcgctgagctggtcaaacctggcgcttctgtgaagatgagctgcaaagccagcggctacgccttcagcagctactggatcaactggatgaagcagaaacccggccagggactcgaatggatcggccaaatctatcccggcgacggcgacaccaactacaacggcaagttcaagggcagagccacactgaccgccgatacctctagcagcacagcctacatgcagctgagcagcctgaccagcgaagatagcgccgtgtacttctgtgcccggtccatcacaacagtcgtgggctgcgctatggactattggggccagggaacaagcgtgaccgtgtctagtacgcgtgaggacctgaagaacgtgttcccacctgaggtggccgtgttcgagcctagcgaggccgagatcagccacacccagaaagccaccctcgtgtgcctggctaccggcttctaccccgaccatgtggaactgtcttggtgggtcaacggcaaagaggtgcacagcggcgtgtgtaccgacccccagccactgaaagaacagcccgccctgaacgacagccggtactgcctgagcagcagactgagagtgtccgccaccttctggcagaacccccggaaccacttcagatgccaggtgcagttctacggcctgagcgagaacgacgagtggacccaggacagagccaagcccgtgacccagatcgtgtctgccgaagcctggggcagagccgattgcggctttaccagcgagagctaccagcagggcgtgctgagcgccaccatcctgtacgagatcctgctgggcaaggccaccctgtacgccgtgctggtgtctgccctggtgctgatggctatggtcaagcggaaggacagccggggaagggccaagcgatctggatctggagcaacaaacttctcactactcaaacaagcaggtgacgtggaggagaatcccgggccttctagaggcgggatccacaccatggctacctacgaggtgctgtgcgaggtggcaagaaagctgggcaccgacgacagagaagtggtgctgttcctgctgaacgtgttcatccctcagcctacactggcccagctgatcggtgcactgagagccctgaaagaggaaggccggctgacctttcctctgctggccgaatgcctgttcagagccggaagaagggatctgctgcgggacctgctgcatctggaccccagatttctggaaagacacctggccggcaccatgagctacttcagcccttaccagctgaccgtgctgcacgttgacggcgaactgtgcgccagagatattcggagcctgatcttcctgagcaaggacaccatcggcagccggtctacccctcagacatttctgcactgggtgtactgcatggaaaacctggacctgctcggccccacagatgtggatgccctgatgtccatgctgagaagcctgagcagagtggacctccagagacaggtgcagacactgatgggactgcacctgagcggacctagccacagccagcactacagacacacccct

SEQ ID NO: 5689 - DNA, 4182 bp, Artificial Sequence
  Synthetic Polynucloetide
atggccttaccagtgaccgccttgctcctgccgctggccttgctgctccacgccgccaggccggaggttcagctgcttgagtctggcggaggactggttcaacctggcggaagcctgagactgtcttgtgccgccagcggcttcacctttagcagctacgccatgagctgggtccgacaggctcctggcaaaggactggaatgggtgtccagcatcagcggcagcggcgactacatctactacgccgatagcgtgaagggcagattcaccatcagccgggacatcagcaagaacaccctgtacctccagatgaacagcctgagagccgaggacaccgccgtgtactactgtgccaaagaaggcaccggcgctaacagcagcctggccgattatagaggccagggcacactggtcaccgtgtctagtggcggaggaagcggcggaggatctgaagtgcaactggtggaatctggagggggaagcgtgcaggcaggcggatctctgagactgtcctgcaccacatctggcagagccctgaatatgtacgtgatgggatggtttcggcaggctcccggcaacgagcgggaatttgtggccgctacaagcagcagcggcggcagcacaagctaccccgattctgtgaagggcagattcacaatctcccgcgataatgccaagaatactgtgtacctgcagatgaatagtctgaagcctgaagatacagccgcctacagatgtgccgccagcccctacgtgtccacccccaccatgaacatcctggaagagtacagatactggggcctgggaacacaagtgacagtgtccagcggtaccggcggaggcggatctggcggcggaggtagcggtggcggaggatctgaattcgacatccagatgacacagagccctagcagcctgtctgccagcgtgggagacagagtgaccatcacatgcaaggccagcgaccacatcaacaactggctggcctggtatcagcagaagcctggacaggcccctaagctgctgatctacggcgctaccacactggaaacaggcgtgcccagcagattttctggcagcggctctggcaccgactacaccctgacaatatccagcctccagcctgaggacttcgccacctactactgtcagcagagctggaacaccccttggacattcggccagggcaccaagctggaaatcaagagactcgaggacctgaagaacgtgttcccacctgaggtggccgtgttcgagcctagcgaggccgagatcagccacacccagaaagccaccctcgtgtgcctggctaccggcttctaccccgaccatgtggaactgtcttggtgggtcaacggcaaagaggtgcacagcggcgtgtctaccgacccccagccactgaaagaacagcccgccctgaacgacagccggtactgcctgagcagcagactgagagtgtccgccaccttctggcagaacccccggaaccacttcagatgccaggtgcagttctacggcctgagcgagaacgacgagtggacccaggacagagccaagcccgtgacccagatcgtgtctgccgaagcctggggcagagccgattgcggctttaccagcgagagctaccagcagggcgtgctgagcgccaccatcctgtacgagatcctgctgggcaaggccaccctgtacgccgtgctggtgtctgccctggtgctgatggctatggtcaagcggaaggacagccggggaagggccaagcgatctggatctggagcaacaaacttctcactactcaaacaagcaggtgacgtggaggagaatcccgggcctactagtatggactggatttggcgcatccttttccttgtcggcgctgctaccggcgcccattcccagctccagttgcaagagagcggccctggcttggtaaaaccttccgagacccttagcctcacatgcacggttagtgggggcagcatttcctcaggtgattactattggggatggattcggcaacccccgggtaaaggattggagtggattggtcatatttattatagtggagcgacgtactacaacccaagtctcaaatccagggttacaatatccgtcgatacgagcaggaaccaattcagcttgaaactttctagtgtcaccgcagcagacacagccgtctattactgtacgcgggatgactccagtaattggcggtcccgagggcaagggacactggtcacggtctcctcatctggaggcggtggaagcggtggaggaggatctcaggttcagctgcaagagtctggcggaggacttgctcaagctggcggaagcctgagactgtcttgtgccgcctctggcagaaccttcagcatgggctggtttagacaggcccctggcaaagagagagagttcgtcgccgccatcacatacagcggcggcagcccttactacgcctcttctgtcagaggccggttcaccatcagccgggacaacgccaagaacaccgtgtacctccagatgaacagcctgaagccagaggacaccgccgtgtactactgtgccgccaatccaacctacggcagcgactggaatgccgagaattggggccagggcacccaagtgacagtgtctagtggatccggcggcggaggatctggcggaggcggatctgggggcggaggctctttcgaacaagttcagcttcaacagcctggcgctgagctggtcaaacctggcgcttctgtgaagatgagctgcaaagccagcggctacgccttcagcagctactggatcaactggatgaagcagaaacccggccagggactcgaatggatcggccaaatctatcccggcgacggcgacaccaactacaacggcaagttcaagggcagagccacactgaccgccgatacctctagcagcacagcctacatgcagctgagcagcctgaccagcgaagatagcgccgtgtacttctgtgcccggtccatcacaacagtcgtgggctgcgctatggactattggggccagggaacaagcgtgaccgtgtctagtacgcgtatccagaaccctgatcctgccgtgtaccagctgcgggatagcaagagcagcgacaagagcgtgtgtctgttcaccgacttcgacagccagaccaacgtgtcccagagcaaggactccgacgtgtacatcaccgataagaccgtgctggacatgcggagcatggacttcaagagcaactccgccgtggcctggtccaacaagtccgatttcgcctgcgccaacgccttcaacaacagcattatccccgaggacacattcttcccaagccccgagagcagctgcgacgtgaagctggtggaaaagagcttcgagacagacaccaacctgaacttccagaacctgagcgtgatcggcttcagaatcctgctgctgaaagtggccggctttaacctgctgatgaccctgcggctgtggtccagccgcgccaagagaagcggatctggcgtgaagcagaccctgaatttcgacctgctgaagctggctggcgacgtggaatccaacccaggcccttctagaggccatatgaccgagtacaagcccacggtgcgcctcgccacccgcgacgacgtccccagggccgtacgcaccctcgccgccgcgttcgccgactaccccgccacgcgccacaccgtcgatccggaccgccacatcgagcgggtcaccgagctgcaagaactcttcctcacgcgcgtcgggctcgacatcggcaaggtgtgggtcgcggacgacggcgccgcggtggcggtctggaccacgccggagagcgtcgaagcgggggcggtgttcgccgagatcggcccgcgcatggccgagttgagcggttcccggctggccgcgcagcaacagatggaaggcctcctggcgccgcaccggcccaaggagcccgcgtggttcctggccaccgtcggcgtctcgcccgaccaccagggcaagggtctgggcagcgccgtcgtgctccccggagtggaggcggccgagcgcgccggggtgcccgccttcctggagacctccgcgccccgcaacctccccttctacgagcggctcggcttcaccgtcaccgccgacgtcgaggtgcccgaaggaccgcgcacctggtgcatgacccgcaagcccggtgcctga

SEQ ID NO: 5690 - DNA, 4428 bp, Artificial Sequence
  Synthetic Polynucloetide
atggccttaccagtgaccgccttgctcctgccgctggccttgctgctccacgccgccaggccggaggttcagctgcttgagtctggcggaggactggttcaacctggcggaagcctgagactgtcttgtgccgccagcggcttcacctttagcagctacgccatgagctgggtccgacaggctcctggcaaaggactggaatgggtgtccagcatcagcggcagcggcgactacatctactacgccgatagcgtgaagggcagattcaccatcagccgggacatcagcaagaacaccctgtacctccagatgaacagcctgagagccgaggacaccgccgtgtactactgtgccaaagaaggcaccggcgctaacagcagcctggccgattatagaggccagggcacactggtcaccgtgtctagtggcggaggaagcggcggaggatctgaagtgcaactggtggaatctggagggggaagcgtgcaggcaggcggatctctgagactgtcctgcaccacatctggcagagccctgaatatgtacgtgatgggatggtttcggcaggctcccggcaacgagcgggaatttgtggccgctacaagcagcagcggcggcagcacaagctaccccgattctgtgaagggcagattcacaatctcccgcgataatgccaagaatactgtgtacctgcagatgaatagtctgaagcctgaagatacagccgcctacagatgtgccgccagcccctacgtgtccacccccaccatgaacatcctggaagagtacagatactggggcctgggaacacaagtgacagtgtccagcggtaccggcggaggcggatctggcggcggaggtagcggtggcggaggatctgaattcgacatccagatgacacagagccctagcagcctgtctgccagcgtgggagacagagtgaccatcacatgcaaggccagcgaccacatcaacaactggctggcctggtatcagcagaagcctggacaggcccctaagctgctgatctacggcgctaccacactggaaacaggcgtgcccagcagattttctggcagcggctctggcaccgactacaccctgacaatatccagcctccagcctgaggacttcgccacctactactgtcagcagagctggaacaccccttggacattcggccagggcaccaagctggaaatcaagagactcgaggacctgaagaacgtgttcccacctgaggtggccgtgttcgagcctagcgaggccgagatcagccacacccagaaagccaccctcgtgtgcctggctaccggcttctaccccgaccatgtggaactgtcttggtgggtcaacggcaaagaggtgcacagcggcgtgtctaccgacccccagccactgaaagaacagcccgccctgaacgacagccggtactgcctgagcagcagactgagagtgtccgccaccttctggcagaacccccggaaccacttcagatgccaggtgcagttctacggcctgagcgagaacgacgagtggacccaggacagagccaagcccgtgacccagatcgtgtctgccgaagcctggggcagagccgattgcggctttaccagcgagagctaccagcagggcgtgctgagcgccaccatcctgtacgagatcctgctgggcaaggccaccctgtacgccgtgctggtgtctgccctggtgctgatggctatggtcaagcggaaggacagccggggaagggccaagcgatctggatctggagcaacaaacttctcactactcaaacaagcaggtgacgtggaggagaatcccgggcctactagtatggactggatttggcgcatccttttccttgtcggcgctgctaccggcgcccattcccagctccagttgcaagagagcggccctggcttggtaaaaccttccgagacccttagcctcacatgcacggttagtgggggcagcatttcctcaggtgattactattggggatggattcggcaacccccgggtaaaggattggagtggattggtcatatttattatagtggagcgacgtactacaacccaagtctcaaatccagggttacaatatccgtcgatacgagcaggaaccaattcagcttgaaactttctagtgtcaccgcagcagacacagccgtctattactgtacgcgggatgactccagtaattggcggtcccgagggcaagggacactggtcacggtctcctcatctggaggcggtggaagcggtggaggaggatctcaggttcagctgcaagagtctggcggaggacttgctcaagctggcggaagcctgagactgtcttgtgccgcctctggcagaaccttcagcatgggctggtttagacaggcccctggcaaagagagagagttcgtcgccgccatcacatacagcggcggcagcccttactacgcctcttctgtcagaggccggttcaccatcagccgggacaacgccaagaacaccgtgtacctccagatgaacagcctgaagccagaggacaccgccgtgtactactgtgccgccaatccaacctacggcagcgactggaatgccgagaattggggccagggcacccaagtgacagtgtctagtggatccggcggcggaggatctggcggaggcggatctgggggcggaggctctttcgaacaagttcagcttcaacagcctggcgctgagctggtcaaacctggcgcttctgtgaagatgagctgcaaagccagcggctacgccttcagcagctactggatcaactggatgaagcagaaacccggccagggactcgaatggatcggccaaatctatcccggcgacggcgacaccaactacaacggcaagttcaagggcagagccacactgaccgccgatacctctagcagcacagcctacatgcagctgagcagcctgaccagcgaagatagcgccgtgtacttctgtgcccggtccatcacaacagtcgtgggctgcgctatggactattggggccagggaacaagcgtgaccgtgtctagtacgcgtgagcagaaactgatctcggaagaggatgggagcggcaccccattcccttctctggcccctcccatcatgctgctggtggacggcaagcagcagatggtggtcgtgtgcctggtgctggatgtggccccacctggactggacagccccatctggtttagcgccggcaatggctctgccctggacgcctttacctacggcccaagccctgccaccgatggcacctggacaaatctggcccacctgagcctgcccagcgaggaactggcttcttgggagcctctcgtgtgccacacaggacctggcgctgagggacacagcagatccacccagcctatgcacctgtctggcgaggccagcaccgccagaacctgtcctcaggaacctctgagaggcacccctggcggagcactgtggctgggagtgctgagactgctgctgttcaagctgctgctgtttgacctgctgctgacctgctcctgtctgtgcgatcctgccggccctctgccttctcctgccaccaccacaagactgagagccctgggcagccacagactgcaccctgccacagagacaggcggcagagaggccacaagcagccctagaccccagcccagagacagaagatggggcgataccccccctggcagaaagcctggatctccagtccgcgccaagagaagcggatctggcgtgaagcagaccctgaatttcgacctgctgaagctggctggcgacgtggaatccaacccaggcccttctagaggccatatgaccgagtacaagcccacggtgcgcctcgccacccgcgacgacgtccccagggccgtacgcaccctcgccgccgcgttcgccgactaccccgccacgcgccacaccgtcgatccggaccgccacatcgagcgggtcaccgagctgcaagaactcttcctcacgcgcgtcgggctcgacatcggcaaggtgtgggtcgcggacgacggcgccgcggtggcggtctggaccacgccggagagcgtcgaagcgggggcggtgttcgccgagatcggcccgcgcatggccgagttgagcggttcccggctggccgcgcagcaacagatggaaggcctcctggcgccgcaccggcccaaggagcccgcgtggttcctggccaccgtcggcgtctcgcccgaccaccagggcaagggtctgggcagcgccgtcgtgctccccggagtggaggcggccgagcgcgccggggtgcccgccttcctggagacctccgcgccccgcaacctccccttctacgagcggctcggcttcaccgtcaccgccgacgtcgaggtgcccgaaggaccgcgcacctggtgcatgacccgcaagcccggtgcctga

SEQ ID NO: 5691 - DNA, 4293 bp, Artificial Sequence
  Synthetic Polynucloetide
atggccttaccagtgaccgccttgctcctgccgctggccttgctgctccacgccgccaggccggaggttcagctgcttgagtctggcggaggactggttcaacctggcggaagcctgagactgtcttgtgccgccagcggcttcacctttagcagctacgccatgagctgggtccgacaggctcctggcaaaggactggaatgggtgtccagcatcagcggcagcggcgactacatctactacgccgatagcgtgaagggcagattcaccatcagccgggacatcagcaagaacaccctgtacctccagatgaacagcctgagagccgaggacaccgccgtgtactactgtgccaaagaaggcaccggcgctaacagcagcctggccgattatagaggccagggcacactggtcaccgtgtctagtggcggaggaagcggcggaggatctgaagtgcaactggtggaatctggagggggaagcgtgcaggcaggcggatctctgagactgtcctgcaccacatctggcagagccctgaatatgtacgtgatgggatggtttcggcaggctcccggcaacgagcgggaatttgtggccgctacaagcagcagcggcggcagcacaagctaccccgattctgtgaagggcagattcacaatctcccgcgataatgccaagaatactgtgtacctgcagatgaatagtctgaagcctgaagatacagccgcctacagatgtgccgccagcccctacgtgtccacccccaccatgaacatcctggaagagtacagatactggggcctgggaacacaagtgacagtgtccagcggtaccggcggaggcggatctggcggcggaggtagcggtggcggaggatctgaattcgacatccagatgacacagagccctagcagcctgtctgccagcgtgggagacagagtgaccatcacatgcaaggccagcgaccacatcaacaactggctggcctggtatcagcagaagcctggacaggcccctaagctgctgatctacggcgctaccacactggaaacaggcgtgcccagcagattttctggcagcggctctggcaccgactacaccctgacaatatccagcctccagcctgaggacttcgccacctactactgtcagcagagctggaacaccccttggacattcggccagggcaccaagctggaaatcaagagactcgaggggaaaccaattcccaaccctcttctgggactggattcaaccggcagcggcgacaagcagctggacgccgacgtgtcccccaagcctaccatcttcctgccctctatcgccgagacaaagctccagaaggccggcacctacctgtgcctgctggaaaagttcttcccagatgtgattaagatccactggcaggaaaagaagtccaacaccatcctgggcagccaggaaggcaacaccatgaagaccaacgacacctacatgaagttcagctggctgaccgtgcccgagaagtccctggacaaagaacacagatgcatcgtgcggcacgaaaacaacaagaacggcgtggaccaggaaatcatcttcccacccatcaagaccgatgtgattacaatggaccccaaggacaactgctccaaggacgccaacgataccctgctgctccagctgaccaacaccagcgcctactacatgtacttgttgctgctgctgaagtccgtggtgtacttcgccatcatcacatgctgcctgctgcggagaaccgccttctgctgcaacggcgagaagtctagggccaagcgatctggatctggagcaacaaacttctcactactcaaacaagcaggtgacgtggaggagaatcccgggcctactagtatggactggatttggcgcatccttttccttgtcggcgctgctaccggcgcccattcccagctccagttgcaagagagcggccctggcttggtaaaaccttccgagacccttagcctcacatgcacggttagtgggggcagcatttcctcaggtgattactattggggatggattcggcaacccccgggtaaaggattggagtggattggtcatatttattatagtggagcgacgtactacaacccaagtctcaaatccagggttacaatatccgtcgatacgagcaggaaccaattcagcttgaaactttctagtgtcaccgcagcagacacagccgtctattactgtacgcgggatgactccagtaattggcggtcccgagggcaagggacactggtcacggtctcctcatctggaggcggtggaagcggtggaggaggatctcaggttcagctgcaagagtctggcggaggacttgctcaagctggcggaagcctgagactgtcttgtgccgcctctggcagaaccttcagcatgggctggtttagacaggcccctggcaaagagagagagttcgtcgccgccatcacatacagcggcggcagcccttactacgcctcttctgtcagaggccggttcaccatcagccgggacaacgccaagaacaccgtgtacctccagatgaacagcctgaagccagaggacaccgccgtgtactactgtgccgccaatccaacctacggcagcgactggaatgccgagaattggggccagggcacccaagtgacagtgtctagtggatccggcggcggaggatctggcggaggcggatctgggggcggaggctctttcgaacaagttcagcttcaacagcctggcgctgagctggtcaaacctggcgcttctgtgaagatgagctgcaaagccagcggctacgccttcagcagctactggatcaactggatgaagcagaaacccggccagggactcgaatggatcggccaaatctatcccggcgacggcgacaccaactacaacggcaagttcaagggcagagccacactgaccgccgatacctctagcagcacagcctacatgcagctgagcagcctgaccagcgaagatagcgccgtgtacttctgtgcccggtccatcacaacagtcgtgggctgcgctatggactattggggccagggaacaagcgtgaccgtgtctagtacgcgtgagcagaaactgatctcggaagaggatgggagcggcagccagcctcacaccaagcccagcgtgttcgtgatgaagaacggcaccaacgtggcctgcctcgtgaaagagttctaccccaaggacatcaggatcaacctggtgtccagcaagaagatcaccgagttcgaccccgccatcgtgatctcccccagcggcaagtacaacgccgtgaagctggggaagtacgaggacagcaacagcgtgacctgctccgtgcagcacgacaacaagaccgtgcacagcaccgactttgaagtgaaaaccgactccaccgaccacgtgaagcccaaagagacagagaacaccaagcagcccagcaagagctgccacaagcccaaggccatcgtgcacaccgagaaagtgaacatgatgagcctgaccgtgctgggcctgcggatgctgttcgccaaaaccgtggccgtgaacttcctgctgaccgccaagctgttcttcctccgcgccaagagaagcggatctggcgtgaagcagaccctgaatttcgacctgctgaagctggctggcgacgtggaatccaacccaggcccttctagaggccatatgaccgagtacaagcccacggtgcgcctcgccacccgcgacgacgtccccagggccgtacgcaccctcgccgccgcgttcgccgactaccccgccacgcgccacaccgtcgatccggaccgccacatcgagcgggtcaccgagctgcaagaactcttcctcacgcgcgtcgggctcgacatcggcaaggtgtgggtcgcggacgacggcgccgcggtggcggtctggaccacgccggagagcgtcgaagcgggggcggtgttcgccgagatcggcccgcgcatggccgagttgagcggttcccggctggccgcgcagcaacagatggaaggcctcctggcgccgcaccggcccaaggagcccgcgtggttcctggccaccgtcggcgtctcgcccgaccaccagggcaagggtctgggcagcgccgtcgtgctccccggagtggaggcggccgagcgcgccggggtgcccgccttcctggagacctccgcgccccgcaacctccccttctacgagcggctcggcttcaccgtcaccgccgacgtcgaggtgcccgaaggaccgcgcacctggtgcatgacccgcaagcccggtgcctga

SEQ ID NO: 5692 - DNA, 3504 bp, Artificial Sequence
  Synthetic Polynucloetide
atggccttaccagtgaccgccttgctcctgccgctggccttgctgctccacgccgccaggccggaggttcagctgcttgagtctggcggaggactggttcaacctggcggaagcctgagactgtcttgtgccgccagcggcttcacctttagcagctacgccatgagctgggtccgacaggctcctggcaaaggactggaatgggtgtccagcatcagcggcagcggcgactacatctactacgccgatagcgtgaagggcagattcaccatcagccgggacatcagcaagaacaccctgtacctccagatgaacagcctgagagccgaggacaccgccgtgtactactgtgccaaagaaggcaccggcgctaacagcagcctggccgattatagaggccagggcacactggtcaccgtgtctagtggcggaggaagcggcggaggatctgaagtgcaactggtggaatctggagggggaagcgtgcaggcaggcggatctctgagactgtcctgcaccacatctggcagagccctgaatatgtacgtgatgggatggtttcggcaggctcccggcaacgagcgggaatttgtggccgctacaagcagcagcggcggcagcacaagctaccccgattctgtgaagggcagattcacaatctcccgcgataatgccaagaatactgtgtacctgcagatgaatagtctgaagcctgaagatacagccgcctacagatgtgccgccagcccctacgtgtccacccccaccatgaacatcctggaagagtacagatactggggcctgggaacacaagtgacagtgtccagcggtaccggcggaggcggatctggcggcggaggtagcggtggcggaggatctgaattcgacatccagatgacacagagccctagcagcctgtctgccagcgtgggagacagagtgaccatcacatgcaaggccagcgaccacatcaacaactggctggcctggtatcagcagaagcctggacaggcccctaagctgctgatctacggcgctaccacactggaaacaggcgtgcccagcagattttctggcagcggctctggcaccgactacaccctgacaatatccagcctccagcctgaggacttcgccacctactactgtcagcagagctggaacaccccttggacattcggccagggcaccaagctggaaatcaagagactcgagagccagcctcacaccaagcccagcgtgttcgtgatgaagaacggcaccaacgtggcctgcctcgtgaaagagttctaccccaaggacatcaggatcaacctggtgtccagcaagaagatcaccgagttcgaccccgccatcgtgatctcccccagcggcaagtacaacgccgtgaagctggggaagtacgaggacagcaacagcgtgacctgctccgtgcagcacgacaacaagaccgtgcacagcaccgactttgaagtgaaaaccgactccaccgaccacgtgaagcccaaagagacagagaacaccaagcagcccagcaagagctgccacaagcccaaggccatcgtgcacaccgagaaagtgaacatgatgagcctgaccgtgctgggcctgcggatgctgttcgccaaaaccgtggccgtgaacttcctgctgaccgccaagctgttcttcctcagggccaagcgatctggatctggagcaacaaacttctcactactcaaacaagcaggtgacgtggaggagaatcccgggcctactagtatggactggatttggcgcatccttttccttgtcggcgctgctaccggcgcccattcccagctccagttgcaagagagcggccctggcttggtaaaaccttccgagacccttagcctcacatgcacggttagtgggggcagcatttcctcaggtgattactattggggatggattcggcaacccccgggtaaaggattggagtggattggtcatatttattatagtggagcgacgtactacaacccaagtctcaaatccagggttacaatatccgtcgatacgagcaggaaccaattcagcttgaaactttctagtgtcaccgcagcagacacagccgtctattactgtacgcgggatgactccagtaattggcggtcccgagggcaagggacactggtcacggtctcctcatctggaggcggtggaagcggtggaggaggatctcaggttcagctgcaagagtctggcggaggacttgctcaagctggcggaagcctgagactgtcttgtgccgcctctggcagaaccttcagcatgggctggtttagacaggcccctggcaaagagagagagttcgtcgccgccatcacatacagcggcggcagcccttactacgcctcttctgtcagaggccggttcaccatcagccgggacaacgccaagaacaccgtgtacctccagatgaacagcctgaagccagaggacaccgccgtgtactactgtgccgccaatccaacctacggcagcgactggaatgccgagaattggggccagggcacccaagtgacagtgtctagtggatccggcggcggaggatctggcggaggcggatctgggggcggaggctctttcgaacaagttcagcttcaacagcctggcgctgagctggtcaaacctggcgcttctgtgaagatgagctgcaaagccagcggctacgccttcagcagctactggatcaactggatgaagcagaaacccggccagggactcgaatggatcggccaaatctatcccggcgacggcgacaccaactacaacggcaagttcaagggcagagccacactgaccgccgatacctctagcagcacagcctacatgcagctgagcagcctgaccagcgaagatagcgccgtgtacttctgtgcccggtccatcacaacagtcgtgggctgcgctatggactattggggccagggaacaagcgtgaccgtgtctagtacgcgtgacaagcagctggacgccgacgtgtcccccaagcctaccatcttcctgccctctatcgccgagacaaagctccagaaggccggcacctacctgtgcctgctggaaaagttcttcccagatgtgattaagatccactggcaggaaaagaagtccaacaccatcctgggcagccaggaaggcaacaccatgaagaccaacgacacctacatgaagttcagctggctgaccgtgcccgagaagtccctggacaaagaacacagatgcatcgtgcggcacgaaaacaacaagaacggcgtggaccaggaaatcatcttcccacccatcaagaccgatgtgattacaatggaccccaaggacaactgctccaaggacgccaacgataccctgctgctccagctgaccaacaccagcgcctactacatgtacttgttgctgctgctgaagtccgtggtgtacttcgccatcatcacatgctgcctgctgcggagaaccgccttctgctgcaacggcgagaagtct

SEQ ID NO: 5693 - DNA, 4713 bp, Artificial Sequence
  Synthetic Polynucloetide
atggccttaccagtgaccgccttgctcctgccgctggccttgctgctccacgccgccaggccggaggttcagctgcttgagtctggcggaggactggttcaacctggcggaagcctgagactgtcttgtgccgccagcggcttcacctttagcagctacgccatgagctgggtccgacaggctcctggcaaaggactggaatgggtgtccagcatcagcggcagcggcgactacatctactacgccgatagcgtgaagggcagattcaccatcagccgggacatcagcaagaacaccctgtacctccagatgaacagcctgagagccgaggacaccgccgtgtactactgtgccaaagaaggcaccggcgctaacagcagcctggccgattatagaggccagggcacactggtcaccgtgtctagtggcggaggaagcggcggaggatctgaagtgcaactggtggaatctggagggggaagcgtgcaggcaggcggatctctgagactgtcctgcaccacatctggcagagccctgaatatgtacgtgatgggatggtttcggcaggctcccggcaacgagcgggaatttgtggccgctacaagcagcagcggcggcagcacaagctaccccgattctgtgaagggcagattcacaatctcccgcgataatgccaagaatactgtgtacctgcagatgaatagtctgaagcctgaagatacagccgcctacagatgtgccgccagcccctacgtgtccacccccaccatgaacatcctggaagagtacagatactggggcctgggaacacaagtgacagtgtccagcggtaccggcggaggcggatctggcggcggaggtagcggtggcggaggatctgaattcgacatccagatgacacagagccctagcagcctgtctgccagcgtgggagacagagtgaccatcacatgcaaggccagcgaccacatcaacaactggctggcctggtatcagcagaagcctggacaggcccctaagctgctgatctacggcgctaccacactggaaacaggcgtgcccagcagattttctggcagcggctctggcaccgactacaccctgacaatatccagcctccagcctgaggacttcgccacctactactgtcagcagagctggaacaccccttggacattcggccagggcaccaagctggaaatcaagagaggacagcctaaggccaatcctaccgtgacactgttccctccaagcagcgaagaactccaggccaacaaggccacacttgtgtgcctgatctccgacttctaccctggggctgtgacagtggcttggaaggccgatggatctcctgtgaaagccggcgtggaaaccaccaagccatccaagcagagcaacaacaaatacgccgccagctcctacctgagcctgacacctgagcagtggaagtcccacagatcctacagctgccaagtgacccacgaaggcagcaccgtggaaaagacagtggcccctacagagtgcagcggatcccagagcttcggcctgctggaccccaagctgtgctacctgctggatggcatcctgttcatctacggcgtgatcctgaccgccctgttcctgagagtgaagttcagcagaagcgccgacgcccctgcctaccagcagggacagaaccaactgtacaacgagctgaacctgggcagacgggaagagtacgacgtgctggacaagcggagaggcagggaccctgagatgggcggaaagccccagcggagaaagaacccccaggaaggactgtataacgaactccagaaagacaagatggccgaagcctacagcgagatcggcatgaagggcgagcggagaagaggcaagggccacgatggcctgtaccagggcctgagcaccgccaccaaggacacctatgacgccctgcacatgcaggccctgcctccaagaagggccaagcgatctggatctggagcaacaaacttctcactactcaaacaagcaggtgacgtggaggagaatcccgggcctactagtatggactggatttggcgcatccttttccttgtcggcgctgctaccggcgcccattcccagctccagttgcaagagagcggccctggcttggtaaaaccttccgagacccttagcctcacatgcacggttagtgggggcagcatttcctcaggtgattactattggggatggattcggcaacccccgggtaaaggattggagtggattggtcatatttattatagtggagcgacgtactacaacccaagtctcaaatccagggttacaatatccgtcgatacgagcaggaaccaattcagcttgaaactttctagtgtcaccgcagcagacacagccgtctattactgtacgcgggatgactccagtaattggcggtcccgagggcaagggacactggtcacggtctcctcatctggaggcggtggaagcggtggaggaggatctcaggttcagctgcaagagtctggcggaggacttgctcaagctggcggaagcctgagactgtcttgtgccgcctctggcagaaccttcagcatgggctggtttagacaggcccctggcaaagagagagagttcgtcgccgccatcacatacagcggcggcagcccttactacgcctcttctgtcagaggccggttcaccatcagccgggacaacgccaagaacaccgtgtacctccagatgaacagcctgaagccagaggacaccgccgtgtactactgtgccgccaatccaacctacggcagcgactggaatgccgagaattggggccagggcacccaagtgacagtgtctagtggatccggcggcggaggatctggcggaggcggatctgggggcggaggctctttcgaacaagttcagcttcaacagcctggcgctgagctggtcaaacctggcgcttctgtgaagatgagctgcaaagccagcggctacgccttcagcagctactggatcaactggatgaagcagaaacccggccagggactcgaatggatcggccaaatctatcccggcgacggcgacaccaactacaacggcaagttcaagggcagagccacactgaccgccgatacctctagcagcacagcctacatgcagctgagcagcctgaccagcgaagatagcgccgtgtacttctgtgcccggtccatcacaacagtcgtgggctgcgctatggactattggggccagggaacaagcgtgaccgtgtctagtgcctctacaaagggaccctccgtgtttcctctggctcccagcagcaagtctacaagcggaggaacagccgctctgggctgcctggtcaaggattactttcccgagcctgtgaccgtgtcctggaatagcggagcactgacaagcggcgtgcacacctttccagccgtgctgcaaagcagcggcctgtactctctgagcagcgtggtcacagtgcctagctctagcctgggcacccagacctacatctgcaatgtgaaccacaagcctagcaacaccaaggtggacaagagagtggaacccaagagctgtggtacccagagttttgggttgttggaccctaaattgtgctatctgttggacggaatcctgttcatttacggagtgatcctgaccgcattgttcctgcgggttaagttttccagatccgcagacgcacccgcttaccaacaagggcagaaccaactctacaatgaacttaatttggggcggagggaagagtacgacgttctggacaaaaggaggggacgagatcccgagatgggcggaaagcctcagcgaaggaagaatccgcaagaggggctttataacgaactccagaaagataaaatggcagaagcctatagtgagattgggatgaagggagaaaggaggaggggtaaaggtcacgatgggttgtaccaaggattgagcacagccactaaagatacctatgatgcgctccacatgcaggccctgccgccaagacgcgccaagagaagcggatctggcgtgaagcagaccctgaatttcgacctgctgaagctggctggcgacgtggaatccaacccaggcccttctagaggccatatgaccgagtacaagcccacggtgcgcctcgccacccgcgacgacgtccccagggccgtacgcaccctcgccgccgcgttcgccgactaccccgccacgcgccacaccgtcgatccggaccgccacatcgagcgggtcaccgagctgcaagaactcttcctcacgcgcgtcgggctcgacatcggcaaggtgtgggtcgcggacgacggcgccgcggtggcggtctggaccacgccggagagcgtcgaagcgggggcggtgttcgccgagatcggcccgcgcatggccgagttgagcggttcccggctggccgcgcagcaacagatggaaggcctcctggcgccgcaccggcccaaggagcccgcgtggttcctggccaccgtcggcgtctcgcccgaccaccagggcaagggtctgggcagcgccgtcgtgctccccggagtggaggcggccgagcgcgccggggtgcccgccttcctggagacctccgcgccccgcaacctccccttctacgagcggctcggcttcaccgtcaccgccgacgtcgaggtgcccgaaggaccgcgcacctggtgcatgacccgcaagcccggtgcctga

SEQ ID NO: 5694 - DNA, 4068 bp, Artificial Sequence
  Synthetic Polynucloetide
atggccttaccagtgaccgccttgctcctgccgctggccttgctgctccacgccgccaggccggaggttcagctgcttgagtctggcggaggactggttcaacctggcggaagcctgagactgtcttgtgccgccagcggcttcacctttagcagctacgccatgagctgggtccgacaggctcctggcaaaggactggaatgggtgtccagcatcagcggcagcggcgactacatctactacgccgatagcgtgaagggcagattcaccatcagccgggacatcagcaagaacaccctgtacctccagatgaacagcctgagagccgaggacaccgccgtgtactactgtgccaaagaaggcaccggcgctaacagcagcctggccgattatagaggccagggcacactggtcaccgtgtctagtggcggaggaagcggcggaggatctgaagtgcaactggtggaatctggagggggaagcgtgcaggcaggcggatctctgagactgtcctgcaccacatctggcagagccctgaatatgtacgtgatgggatggtttcggcaggctcccggcaacgagcgggaatttgtggccgctacaagcagcagcggcggcagcacaagctaccccgattctgtgaagggcagattcacaatctcccgcgataatgccaagaatactgtgtacctgcagatgaatagtctgaagcctgaagatacagccgcctacagatgtgccgccagcccctacgtgtccacccccaccatgaacatcctggaagagtacagatactggggcctgggaacacaagtgacagtgtccagcggtaccggcggaggcggatctggcggcggaggtagcggtggcggaggatctgaattcgacatccagatgacacagagccctagcagcctgtctgccagcgtgggagacagagtgaccatcacatgcaaggccagcgaccacatcaacaactggctggcctggtatcagcagaagcctggacaggcccctaagctgctgatctacggcgctaccacactggaaacaggcgtgcccagcagattttctggcagcggctctggcaccgactacaccctgacaatatccagcctccagcctgaggacttcgccacctactactgtcagcagagctggaacaccccttggacattcggccagggcaccaagctggaaatcaagagactcgaggacctgaagaacgtgttcccacctgaggtggccgtgttcgagcctagcgaggccgagatcagccacacccagaaagccaccctcgtgtgcctggctaccggcttctaccccgaccatgtggaactgtcttggtgggtcaacggcaaagaggtgcacagcggcgtgtctaccgacccccagccactgaaagaacagcccgccctgaacgacagccggtactgcctgagcagcagactgagagtgtccgccaccttctggcagaacccccggaaccacttcagatgccaggtgcagttctacggcctgagcgagaacgacgagtggacccaggacagagccaagcccgtgacccagatcgtgtctgccgaagcctggggcagagccgattgcggatcccagagcttcggcctgctggaccccaagctgtgctacctgctggatggcatcctgttcatctacggcgtgatcctgaccgccctgttcctgagagtgaagttcagcagaagcgccgacgcccctgcctaccagcagggacagaaccaactgtacaacgagctgaacctgggcagacgggaagagtacgacgtgctggacaagcggagaggcagggaccctgagatgggcggaaagccccagcggagaaagaacccccaggaaggactgtataacgaactccagaaagacaagatggccgaagcctacagcgagatcggcatgaagggcgagcggagaagaggcaagggccacgatggcctgtaccagggcctgagcaccgccaccaaggacacctatgacgccctgcacatgcaggccctgcctccaagaagggccaagcgatctggatctggagcaacaaacttctcactactcaaacaagcaggtgacgtggaggagaatcccgggcctactagtatggactggatttggcgcatccttttccttgtcggcgctgctaccggcgcccattcccagctccagttgcaagagagcggccctggcttggtaaaaccttccgagacccttagcctcacatgcacggttagtgggggcagcatttcctcaggtgattactattggggatggattcggcaacccccgggtaaaggattggagtggattggtcatatttattatagtggagcgacgtactacaacccaagtctcaaatccagggttacaatatccgtcgatacgagcaggaaccaattcagcttgaaactttctagtgtcaccgcagcagacacagccgtctattactgtacgcgggatgactccagtaattggcggtcccgagggcaagggacactggtcacggtctcctcatctggaggcggtggaagcggtggaggaggatctcaggttcagctgcaagagtctggcggaggacttgctcaagctggcggaagcctgagactgtcttgtgccgcctctggcagaaccttcagcatgggctggtttagacaggcccctggcaaagagagagagttcgtcgccgccatcacatacagcggcggcagcccttactacgcctcttctgtcagaggccggttcaccatcagccgggacaacgccaagaacaccgtgtacctccagatgaacagcctgaagccagaggacaccgccgtgtactactgtgccgccaatccaacctacggcagcgactggaatgccgagaattggggccagggcacccaagtgacagtgtctagtggatccggcggcggaggatctggcggaggcggatctgggggcggaggctctttcgaacaagttcagcttcaacagcctggcgctgagctggtcaaacctggcgcttctgtgaagatgagctgcaaagccagcggctacgccttcagcagctactggatcaactggatgaagcagaaacccggccagggactcgaatggatcggccaaatctatcccggcgacggcgacaccaactacaacggcaagttcaagggcagagccacactgaccgccgatacctctagcagcacagcctacatgcagctgagcagcctgaccagcgaagatagcgccgtgtacttctgtgcccggtccatcacaacagtcgtgggctgcgctatggactattggggccagggaacaagcgtgaccgtgtctagtacgcgtatccagaaccctgatcctgccgtgtaccagctgcgggatagcaagagcagcgacaagagcgtgtgtctgttcaccgacttcgacagccagaccaacgtgtcccagagcaaggactccgacgtgtacatcaccgataagaccgtgctggacatgcggagcatggacttcaagagcaactccgccgtggcctggtccaacaagtccgatttcgcctgcgccaacgccttcaacaacagcattatccccgaggacacattcttcccaagccccgagagcagctgcggtacccagagttttgggttgttggaccctaaattgtgctatctgttggacggaatcctgttcatttacggagtgatcctgaccgcattgttcctgcgggttaagttttccagatccgcagacgcacccgcttaccaacaagggcagaaccaactctacaatgaacttaatttggggcggagggaagagtacgacgttctggacaaaaggaggggacgagatcccgagatgggcggaaagcctcagcgaaggaagaatccgcaagaggggctttataacgaactccagaaagataaaatggcagaagcctatagtgagattgggatgaagggagaaaggaggaggggtaaaggtcacgatgggttgtaccaaggattgagcacagccactaaagatacctatgatgcgctccacatgcaggccctgccgccaaga

SEQ ID NO: 5695 - DNA, 4068 bp, Artificial Sequence
  Synthetic Polynucloetide
atggccttaccagtgaccgccttgctcctgccgctggccttgctgctccacgccgccaggccggaggttcagctgcttgagtctggcggaggactggttcaacctggcggaagcctgagactgtcttgtgccgccagcggcttcacctttagcagctacgccatgagctgggtccgacaggctcctggcaaaggactggaatgggtgtccagcatcagcggcagcggcgactacatctactacgccgatagcgtgaagggcagattcaccatcagccgggacatcagcaagaacaccctgtacctccagatgaacagcctgagagccgaggacaccgccgtgtactactgtgccaaagaaggcaccggcgctaacagcagcctggccgattatagaggccagggcacactggtcaccgtgtctagtggcggaggaagcggcggaggatctgaagtgcaactggtggaatctggagggggaagcgtgcaggcaggcggatctctgagactgtcctgcaccacatctggcagagccctgaatatgtacgtgatgggatggtttcggcaggctcccggcaacgagcgggaatttgtggccgctacaagcagcagcggcggcagcacaagctaccccgattctgtgaagggcagattcacaatctcccgcgataatgccaagaatactgtgtacctgcagatgaatagtctgaagcctgaagatacagccgcctacagatgtgccgccagcccctacgtgtccacccccaccatgaacatcctggaagagtacagatactggggcctgggaacacaagtgacagtgtccagcggtaccggcggaggcggatctggcggcggaggtagcggtggcggaggatctgaattcgacatccagatgacacagagccctagcagcctgtctgccagcgtgggagacagagtgaccatcacatgcaaggccagcgaccacatcaacaactggctggcctggtatcagcagaagcctggacaggcccctaagctgctgatctacggcgctaccacactggaaacaggcgtgcccagcagattttctggcagcggctctggcaccgactacaccctgacaatatccagcctccagcctgaggacttcgccacctactactgtcagcagagctggaacaccccttggacattcggccagggcaccaagctggaaatcaagagactcgaggacctgaagaacgtgttcccacctgaggtggccgtgttcgagcctagcaaggccgagatcgcccacacccagaaagccaccctcgtgtgcctggctaccggcttctaccccgaccatgtggaactgtcttggtgggtcaacggcaaagaggtgcacagcggcgtgtgtaccgacccccagccactgaaagaacagcccgccctgaacgacagccggtactgcctgagcagcagactgagagtgtccgccaccttctggcagaacccccggaaccacttcagatgccaggtgcagttctacggcctgagcgagaacgacgagtggacccaggacagagccaagcccgtgacccagatcgtgtctgccgaagcctggggcagagccgattgcggatcccagagcttcggcctgctggaccccaagctgtgctacctgctggatggcatcctgttcatctacggcgtgatcctgaccgccctgttcctgagagtgaagttcagcagaagcgccgacgcccctgcctaccagcagggacagaaccaactgtacaacgagctgaacctgggcagacgggaagagtacgacgtgctggacaagcggagaggcagggaccctgagatgggcggaaagccccagcggagaaagaacccccaggaaggactgtataacgaactccagaaagacaagatggccgaagcctacagcgagatcggcatgaagggcgagcggagaagaggcaagggccacgatggcctgtaccagggcctgagcaccgccaccaaggacacctatgacgccctgcacatgcaggccctgcctccaagaagggccaagcgatctggatctggagcaacaaacttctcactactcaaacaagcaggtgacgtggaggagaatcccgggcctactagtatggactggatttggcgcatccttttccttgtcggcgctgctaccggcgcccattcccagctccagttgcaagagagcggccctggcttggtaaaaccttccgagacccttagcctcacatgcacggttagtgggggcagcatttcctcaggtgattactattggggatggattcggcaacccccgggtaaaggattggagtggattggtcatatttattatagtggagcgacgtactacaacccaagtctcaaatccagggttacaatatccgtcgatacgagcaggaaccaattcagcttgaaactttctagtgtcaccgcagcagacacagccgtctattactgtacgcgggatgactccagtaattggcggtcccgagggcaagggacactggtcacggtctcctcatctggaggcggtggaagcggtggaggaggatctcaggttcagctgcaagagtctggcggaggacttgctcaagctggcggaagcctgagactgtcttgtgccgcctctggcagaaccttcagcatgggctggtttagacaggcccctggcaaagagagagagttcgtcgccgccatcacatacagcggcggcagcccttactacgcctcttctgtcagaggccggttcaccatcagccgggacaacgccaagaacaccgtgtacctccagatgaacagcctgaagccagaggacaccgccgtgtactactgtgccgccaatccaacctacggcagcgactggaatgccgagaattggggccagggcacccaagtgacagtgtctagtggatccggcggcggaggatctggcggaggcggatctgggggcggaggctctttcgaacaagttcagcttcaacagcctggcgctgagctggtcaaacctggcgcttctgtgaagatgagctgcaaagccagcggctacgccttcagcagctactggatcaactggatgaagcagaaacccggccagggactcgaatggatcggccaaatctatcccggcgacggcgacaccaactacaacggcaagttcaagggcagagccacactgaccgccgatacctctagcagcacagcctacatgcagctgagcagcctgaccagcgaagatagcgccgtgtacttctgtgcccggtccatcacaacagtcgtgggctgcgctatggactattggggccagggaacaagcgtgaccgtgtctagtacgcgtatccagaaccctgatcctgccgtgtaccagctgcgggatagcaagagcagcgacaagagcgtgtgtctgttcaccgacttcgacagccagaccaacgtgtcccagagcaaggactccgacgtgtacatcaccgataagtgcgtgctggacatgcggagcatggacttcaagagcaactccgccgtggcctggtccaacaagtccgatttcgcctgcgccaacgccttcaacaacagcattatccccgaggacacattcttcccaagcagcgacgtgccctgcggtacccagagttttgggttgttggaccctaaattgtgctatctgttggacggaatcctgttcatttacggagtgatcctgaccgcattgttcctgcgggttaagttttccagatccgcagacgcacccgcttaccaacaagggcagaaccaactctacaatgaacttaatttggggcggagggaagagtacgacgttctggacaaaaggaggggacgagatcccgagatgggcggaaagcctcagcgaaggaagaatccgcaagaggggctttataacgaactccagaaagataaaatggcagaagcctatagtgagattgggatgaagggagaaaggaggaggggtaaaggtcacgatgggttgtaccaaggattgagcacagccactaaagatacctatgatgcgctccacatgcaggccctgccgccaaga

SEQ ID NO: 5696 - DNA, 4281 bp, Artificial Sequence
  Synthetic Polynucloetide
atggccttaccagtgaccgccttgctcctgccgctggccttgctgctccacgccgccaggccggaggttcagctgcttgagtctggcggaggactggttcaacctggcggaagcctgagactgtcttgtgccgccagcggcttcacctttagcagctacgccatgagctgggtccgacaggctcctggcaaaggactggaatgggtgtccagcatcagcggcagcggcgactacatctactacgccgatagcgtgaagggcagattcaccatcagccgggacatcagcaagaacaccctgtacctccagatgaacagcctgagagccgaggacaccgccgtgtactactgtgccaaagaaggcaccggcgctaacagcagcctggccgattatagaggccagggcacactggtcaccgtgtctagtggcggaggaagcggcggaggatctgaagtgcaactggtggaatctggagggggaagcgtgcaggcaggcggatctctgagactgtcctgcaccacatctggcagagccctgaatatgtacgtgatgggatggtttcggcaggctcccggcaacgagcgggaatttgtggccgctacaagcagcagcggcggcagcacaagctaccccgattctgtgaagggcagattcacaatctcccgcgataatgccaagaatactgtgtacctgcagatgaatagtctgaagcctgaagatacagccgcctacagatgtgccgccagcccctacgtgtccacccccaccatgaacatcctggaagagtacagatactggggcctgggaacacaagtgacagtgtccagcggtaccggcggaggcggatctggcggcggaggtagcggtggcggaggatctgaattcgacatccagatgacacagagccctagcagcctgtctgccagcgtgggagacagagtgaccatcacatgcaaggccagcgaccacatcaacaactggctggcctggtatcagcagaagcctggacaggcccctaagctgctgatctacggcgctaccacactggaaacaggcgtgcccagcagattttctggcagcggctctggcaccgactacaccctgacaatatccagcctccagcctgaggacttcgccacctactactgtcagcagagctggaacaccccttggacattcggccagggcaccaagctggaaatcaagagactcgaggggaaaccaattcccaaccctcttctgggactggattcaaccggcagcggcgaggacctgaagaacgtgttcccacctgaggtggccgtgttcgagcctagcgaggccgagatcagccacacccagaaagccaccctcgtgtgcctggctaccggcttctaccccgaccatgtggaactgtcttggtgggtcaacggcaaagaggtgcacagcggcgtgtctaccgacccccagccactgaaagaacagcccgccctgaacgacagccggtactgcctgagcagcagactgagagtgtccgccaccttctggcagaacccccggaaccacttcagatgccaggtgcagttctacggcctgagcgagaacgacgagtggacccaggacagagccaagcccgtgacccagatcgtgtctgccgaagcctggggcagagccgattgcggatcccagagcttcggcctgctggaccccaagctgtgctacctgctggatggcatcctgttcatctacggcgtgatcctgaccgccctgttcctgagagtgaagttcagcagaagcgccgacgcccctgcctaccagcagggacagaaccaactgtacaacgagctgaacctgggcagacgggaagagtacgacgtgctggacaagcggagaggcagggaccctgagatgggcggaaagccccagcggagaaagaacccccaggaaggactgtataacgaactccagaaagacaagatggccgaagcctacagcgagatcggcatgaagggcgagcggagaagaggcaagggccacgatggcctgtaccagggcctgagcaccgccaccaaggacacctatgacgccctgcacatgcaggccctgcctccaagaagggccaagcgatctggatctggagcaacaaacttctcactactcaaacaagcaggtgacgtggaggagaatcccgggcctactagtatggactggatttggcgcatccttttccttgtcggcgctgctaccggcgcccattcccagctccagttgcaagagagcggccctggcttggtaaaaccttccgagacccttagcctcacatgcacggttagtgggggcagcatttcctcaggtgattactattggggatggattcggcaacccccgggtaaaggattggagtggattggtcatatttattatagtggagcgacgtactacaacccaagtctcaaatccagggttacaatatccgtcgatacgagcaggaaccaattcagcttgaaactttctagtgtcaccgcagcagacacagccgtctattactgtacgcgggatgactccagtaattggcggtcccgagggcaagggacactggtcacggtctcctcatctggaggcggtggaagcggtggaggaggatctcaggttcagctgcaagagtctggcggaggacttgctcaagctggcggaagcctgagactgtcttgtgccgcctctggcagaaccttcagcatgggctggtttagacaggcccctggcaaagagagagagttcgtcgccgccatcacatacagcggcggcagcccttactacgcctcttctgtcagaggccggttcaccatcagccgggacaacgccaagaacaccgtgtacctccagatgaacagcctgaagccagaggacaccgccgtgtactactgtgccgccaatccaacctacggcagcgactggaatgccgagaattggggccagggcacccaagtgacagtgtctagtggatccggcggcggaggatctggcggaggcggatctgggggcggaggctctttcgaacaagttcagcttcaacagcctggcgctgagctggtcaaacctggcgcttctgtgaagatgagctgcaaagccagcggctacgccttcagcagctactggatcaactggatgaagcagaaacccggccagggactcgaatggatcggccaaatctatcccggcgacggcgacaccaactacaacggcaagttcaagggcagagccacactgaccgccgatacctctagcagcacagcctacatgcagctgagcagcctgaccagcgaagatagcgccgtgtacttctgtgcccggtccatcacaacagtcgtgggctgcgctatggactattggggccagggaacaagcgtgaccgtgtctagtacgcgtgagcagaaactgatctcggaagaggatgggagcggcatccagaaccctgatcctgccgtgtaccagctgcgggatagcaagagcagcgacaagagcgtgtgtctgttcaccgacttcgacagccagaccaacgtgtcccagagcaaggactccgacgtgtacatcaccgataagaccgtgctggacatgcggagcatggacttcaagagcaactccgccgtggcctggtccaacaagtccgatttcgcctgcgccaacgccttcaacaacagcattatccccgaggacacattcttcccaagccccgagagcagctgcggtacccagagttttgggttgttggaccctaaattgtgctatctgttggacggaatcctgttcatttacggagtgatcctgaccgcattgttcctgaggagcaagcggtcacggctgctccacagcgattacatgaatatgacaccacgaagaccgggtcctactcgcaaacactaccaaccctacgcacctccccgcgactttgcagcgtaccgatctcgggttaagttttccagatccgcagacgcacccgcttaccaacaagggcagaaccaactctacaatgaacttaatttggggcggagggaagagtacgacgttctggacaaaaggaggggacgagatcccgagatgggcggaaagcctcagcgaaggaagaatccgcaagaggggctttataacgaactccagaaagataaaatggcagaagcctatagtgagattgggatgaagggagaaaggaggaggggtaaaggtcacgatgggttgtaccaaggattgagcacagccactaaagatacctatgatgcgctccacatgcaggccctgccgccaaga

SEQ ID NO: 5697 - DNA, 4404 bp, Artificial Sequence
  Synthetic Polynucloetide
atggccttaccagtgaccgccttgctcctgccgctggccttgctgctccacgccgccaggccggaggttcagctgcttgagtctggcggaggactggttcaacctggcggaagcctgagactgtcttgtgccgccagcggcttcacctttagcagctacgccatgagctgggtccgacaggctcctggcaaaggactggaatgggtgtccagcatcagcggcagcggcgactacatctactacgccgatagcgtgaagggcagattcaccatcagccgggacatcagcaagaacaccctgtacctccagatgaacagcctgagagccgaggacaccgccgtgtactactgtgccaaagaaggcaccggcgctaacagcagcctggccgattatagaggccagggcacactggtcaccgtgtctagtggcggaggaagcggcggaggatctgaagtgcaactggtggaatctggagggggaagcgtgcaggcaggcggatctctgagactgtcctgcaccacatctggcagagccctgaatatgtacgtgatgggatggtttcggcaggctcccggcaacgagcgggaatttgtggccgctacaagcagcagcggcggcagcacaagctaccccgattctgtgaagggcagattcacaatctcccgcgataatgccaagaatactgtgtacctgcagatgaatagtctgaagcctgaagatacagccgcctacagatgtgccgccagcccctacgtgtccacccccaccatgaacatcctggaagagtacagatactggggcctgggaacacaagtgacagtgtccagcggtaccggcggaggcggatctggcggcggaggtagcggtggcggaggatctgaattcgacatccagatgacacagagccctagcagcctgtctgccagcgtgggagacagagtgaccatcacatgcaaggccagcgaccacatcaacaactggctggcctggtatcagcagaagcctggacaggcccctaagctgctgatctacggcgctaccacactggaaacaggcgtgcccagcagattttctggcagcggctctggcaccgactacaccctgacaatatccagcctccagcctgaggacttcgccacctactactgtcagcagagctggaacaccccttggacattcggccagggcaccaagctggaaatcaagagactcgaggggaaaccaattcccaaccctcttctgggactggattcaaccggcagcggcgaggacctgaagaacgtgttcccacctgaggtggccgtgttcgagcctagcgaggccgagatcagccacacccagaaagccaccctcgtgtgcctggctaccggcttctaccccgaccatgtggaactgtcttggtgggtcaacggcaaagaggtgcacagcggcgtgtctaccgacccccagccactgaaagaacagcccgccctgaacgacagccggtactgcctgagcagcagactgagagtgtccgccaccttctggcagaacccccggaaccacttcagatgccaggtgcagttctacggcctgagcgagaacgacgagtggacccaggacagagccaagcccgtgacccagatcgtgtctgccgaagcctggggcagagccgattgcggatcccagagcttcggcctgctggaccccaagctgtgctacctgctggatggcatcctgttcatctacggcgtgatcctgaccgccctgttcctgaggagtaagaggagcaggctcctgcacagtgactacatgaacatgactccacgccgccccggacccacccgcaagcattaccagccctatgccccaccacgcgacttcgcagcctatcgctccagagtgaagttcagcagaagcgccgacgcccctgcctaccagcagggacagaaccaactgtacaacgagctgaacctgggcagacgggaagagtacgacgtgctggacaagcggagaggcagggaccctgagatgggcggaaagccccagcggagaaagaacccccaggaaggactgtataacgaactccagaaagacaagatggccgaagcctacagcgagatcggcatgaagggcgagcggagaagaggcaagggccacgatggcctgtaccagggcctgagcaccgccaccaaggacacctatgacgccctgcacatgcaggccctgcctccaagaagggccaagcgatctggatctggagcaacaaacttctcactactcaaacaagcaggtgacgtggaggagaatcccgggcctactagtatggactggatttggcgcatccttttccttgtcggcgctgctaccggcgcccattcccagctccagttgcaagagagcggccctggcttggtaaaaccttccgagacccttagcctcacatgcacggttagtgggggcagcatttcctcaggtgattactattggggatggattcggcaacccccgggtaaaggattggagtggattggtcatatttattatagtggagcgacgtactacaacccaagtctcaaatccagggttacaatatccgtcgatacgagcaggaaccaattcagcttgaaactttctagtgtcaccgcagcagacacagccgtctattactgtacgcgggatgactccagtaattggcggtcccgagggcaagggacactggtcacggtctcctcatctggaggcggtggaagcggtggaggaggatctcaggttcagctgcaagagtctggcggaggacttgctcaagctggcggaagcctgagactgtcttgtgccgcctctggcagaaccttcagcatgggctggtttagacaggcccctggcaaagagagagagttcgtcgccgccatcacatacagcggcggcagcccttactacgcctcttctgtcagaggccggttcaccatcagccgggacaacgccaagaacaccgtgtacctccagatgaacagcctgaagccagaggacaccgccgtgtactactgtgccgccaatccaacctacggcagcgactggaatgccgagaattggggccagggcacccaagtgacagtgtctagtggatccggcggcggaggatctggcggaggcggatctgggggcggaggctctttcgaacaagttcagcttcaacagcctggcgctgagctggtcaaacctggcgcttctgtgaagatgagctgcaaagccagcggctacgccttcagcagctactggatcaactggatgaagcagaaacccggccagggactcgaatggatcggccaaatctatcccggcgacggcgacaccaactacaacggcaagttcaagggcagagccacactgaccgccgatacctctagcagcacagcctacatgcagctgagcagcctgaccagcgaagatagcgccgtgtacttctgtgcccggtccatcacaacagtcgtgggctgcgctatggactattggggccagggaacaagcgtgaccgtgtctagtacgcgtgagcagaaactgatctcggaagaggatgggagcggcatccagaaccctgatcctgccgtgtaccagctgcgggatagcaagagcagcgacaagagcgtgtgtctgttcaccgacttcgacagccagaccaacgtgtcccagagcaaggactccgacgtgtacatcaccgataagaccgtgctggacatgcggagcatggacttcaagagcaactccgccgtggcctggtccaacaagtccgatttcgcctgcgccaacgccttcaacaacagcattatccccgaggacacattcttcccaagccccgagagcagctgcggtacccagagttttgggttgttggaccctaaattgtgctatctgttggacggaatcctgttcatttacggagtgatcctgaccgcattgttcctgaggagcaagcggtcacggctgctccacagcgattacatgaatatgacaccacgaagaccgggtcctactcgcaaacactaccaaccctacgcacctccccgcgactttgcagcgtaccgatctcgggttaagttttccagatccgcagacgcacccgcttaccaacaagggcagaaccaactctacaatgaacttaatttggggcggagggaagagtacgacgttctggacaaaaggaggggacgagatcccgagatgggcggaaagcctcagcgaaggaagaatccgcaagaggggctttataacgaactccagaaagataaaatggcagaagcctatagtgagattgggatgaagggagaaaggaggaggggtaaaggtcacgatgggttgtaccaaggattgagcacagccactaaagatacctatgatgcgctccacatgcaggccctgccgccaaga

SEQ ID NO: 5698 - DNA, 4287 bp, Artificial Sequence
  Synthetic Polynucloetide
atggccttaccagtgaccgccttgctcctgccgctggccttgctgctccacgccgccaggccggaggttcagctgcttgagtctggcggaggactggttcaacctggcggaagcctgagactgtcttgtgccgccagcggcttcacctttagcagctacgccatgagctgggtccgacaggctcctggcaaaggactggaatgggtgtccagcatcagcggcagcggcgactacatctactacgccgatagcgtgaagggcagattcaccatcagccgggacatcagcaagaacaccctgtacctccagatgaacagcctgagagccgaggacaccgccgtgtactactgtgccaaagaaggcaccggcgctaacagcagcctggccgattatagaggccagggcacactggtcaccgtgtctagtggcggaggaagcggcggaggatctgaagtgcaactggtggaatctggagggggaagcgtgcaggcaggcggatctctgagactgtcctgcaccacatctggcagagccctgaatatgtacgtgatgggatggtttcggcaggctcccggcaacgagcgggaatttgtggccgctacaagcagcagcggcggcagcacaagctaccccgattctgtgaagggcagattcacaatctcccgcgataatgccaagaatactgtgtacctgcagatgaatagtctgaagcctgaagatacagccgcctacagatgtgccgccagcccctacgtgtccacccccaccatgaacatcctggaagagtacagatactggggcctgggaacacaagtgacagtgtccagcggtaccggcggaggcggatctggcggcggaggtagcggtggcggaggatctgaattcgacatccagatgacacagagccctagcagcctgtctgccagcgtgggagacagagtgaccatcacatgcaaggccagcgaccacatcaacaactggctggcctggtatcagcagaagcctggacaggcccctaagctgctgatctacggcgctaccacactggaaacaggcgtgcccagcagattttctggcagcggctctggcaccgactacaccctgacaatatccagcctccagcctgaggacttcgccacctactactgtcagcagagctggaacaccccttggacattcggccagggcaccaagctggaaatcaagagactcgaggggaaaccaattcccaaccctcttctgggactggattcaaccggcagcggcgaggacctgaagaacgtgttcccacctgaggtggccgtgttcgagcctagcgaggccgagatcagccacacccagaaagccaccctcgtgtgcctggctaccggcttctaccccgaccatgtggaactgtcttggtgggtcaacggcaaagaggtgcacagcggcgtgtctaccgacccccagccactgaaagaacagcccgccctgaacgacagccggtactgcctgagcagcagactgagagtgtccgccaccttctggcagaacccccggaaccacttcagatgccaggtgcagttctacggcctgagcgagaacgacgagtggacccaggacagagccaagcccgtgacccagatcgtgtctgccgaagcctggggcagagccgattgcggatcccagagcttcggcctgctggaccccaagctgtgctacctgctggatggcatcctgttcatctacggcgtgatcctgaccgccctgttcctgagagtgaagttcagcagaagcgccgacgcccctgcctaccagcagggacagaaccaactgtacaacgagctgaacctgggcagacgggaagagtacgacgtgctggacaagcggagaggcagggaccctgagatgggcggaaagccccagcggagaaagaacccccaggaaggactgtataacgaactccagaaagacaagatggccgaagcctacagcgagatcggcatgaagggcgagcggagaagaggcaagggccacgatggcctgtaccagggcctgagcaccgccaccaaggacacctatgacgccctgcacatgcaggccctgcctccaagaagggccaagcgatctggatctggagcaacaaacttctcactactcaaacaagcaggtgacgtggaggagaatcccgggcctactagtatggactggatttggcgcatccttttccttgtcggcgctgctaccggcgcccattcccagctccagttgcaagagagcggccctggcttggtaaaaccttccgagacccttagcctcacatgcacggttagtgggggcagcatttcctcaggtgattactattggggatggattcggcaacccccgggtaaaggattggagtggattggtcatatttattatagtggagcgacgtactacaacccaagtctcaaatccagggttacaatatccgtcgatacgagcaggaaccaattcagcttgaaactttctagtgtcaccgcagcagacacagccgtctattactgtacgcgggatgactccagtaattggcggtcccgagggcaagggacactggtcacggtctcctcatctggaggcggtggaagcggtggaggaggatctcaggttcagctgcaagagtctggcggaggacttgctcaagctggcggaagcctgagactgtcttgtgccgcctctggcagaaccttcagcatgggctggtttagacaggcccctggcaaagagagagagttcgtcgccgccatcacatacagcggcggcagcccttactacgcctcttctgtcagaggccggttcaccatcagccgggacaacgccaagaacaccgtgtacctccagatgaacagcctgaagccagaggacaccgccgtgtactactgtgccgccaatccaacctacggcagcgactggaatgccgagaattggggccagggcacccaagtgacagtgtctagtggatccggcggcggaggatctggcggaggcggatctgggggcggaggctctttcgaacaagttcagcttcaacagcctggcgctgagctggtcaaacctggcgcttctgtgaagatgagctgcaaagccagcggctacgccttcagcagctactggatcaactggatgaagcagaaacccggccagggactcgaatggatcggccaaatctatcccggcgacggcgacaccaactacaacggcaagttcaagggcagagccacactgaccgccgatacctctagcagcacagcctacatgcagctgagcagcctgaccagcgaagatagcgccgtgtacttctgtgcccggtccatcacaacagtcgtgggctgcgctatggactattggggccagggaacaagcgtgaccgtgtctagtacgcgtgagcagaaactgatctcggaagaggatctggggagcggcatccagaaccctgatcctgccgtgtaccagctgcgggatagcaagagcagcgacaagagcgtgtgtctgttcaccgacttcgacagccagaccaacgtgtcccagagcaaggactccgacgtgtacatcaccgataagaccgtgctggacatgcggagcatggacttcaagagcaactccgccgtggcctggtccaacaagtccgatttcgcctgcgccaacgccttcaacaacagcattatccccgaggacacattcttcccaagccccgagagcagctgcggtacccagagttttgggttgttggaccctaaattgtgctatctgttggacggaatcctgttcatttacggagtgatcctgaccgcattgttcctgaagagaggccggaagaagctgctgtacatcttcaagcagcctttcatgcggcccgtgcagaccacccaggaagaggacggctgctcctgccggttccccgaggaagaagaaggcggctgcgagctgcgggttaagttttccagatccgcagacgcacccgcttaccaacaagggcagaaccaactctacaatgaacttaatttggggcggagggaagagtacgacgttctggacaaaaggaggggacgagatcccgagatgggcggaaagcctcagcgaaggaagaatccgcaagaggggctttataacgaactccagaaagataaaatggcagaagcctatagtgagattgggatgaagggagaaaggaggaggggtaaaggtcacgatgggttgtaccaaggattgagcacagccactaaagatacctatgatgcgctccacatgcaggccctgccgccaaga

SEQ ID NO: 5699 - DNA, 4413 bp, Artificial Sequence
  Synthetic Polynucloetide
atggccttaccagtgaccgccttgctcctgccgctggccttgctgctccacgccgccaggccggaggttcagctgcttgagtctggcggaggactggttcaacctggcggaagcctgagactgtcttgtgccgccagcggcttcacctttagcagctacgccatgagctgggtccgacaggctcctggcaaaggactggaatgggtgtccagcatcagcggcagcggcgactacatctactacgccgatagcgtgaagggcagattcaccatcagccgggacatcagcaagaacaccctgtacctccagatgaacagcctgagagccgaggacaccgccgtgtactactgtgccaaagaaggcaccggcgctaacagcagcctggccgattatagaggccagggcacactggtcaccgtgtctagtggcggaggaagcggcggaggatctgaagtgcaactggtggaatctggagggggaagcgtgcaggcaggcggatctctgagactgtcctgcaccacatctggcagagccctgaatatgtacgtgatgggatggtttcggcaggctcccggcaacgagcgggaatttgtggccgctacaagcagcagcggcggcagcacaagctaccccgattctgtgaagggcagattcacaatctcccgcgataatgccaagaatactgtgtacctgcagatgaatagtctgaagcctgaagatacagccgcctacagatgtgccgccagcccctacgtgtccacccccaccatgaacatcctggaagagtacagatactggggcctgggaacacaagtgacagtgtccagcggtaccggcggaggcggatctggcggcggaggtagcggtggcggaggatctgaattcgacatccagatgacacagagccctagcagcctgtctgccagcgtgggagacagagtgaccatcacatgcaaggccagcgaccacatcaacaactggctggcctggtatcagcagaagcctggacaggcccctaagctgctgatctacggcgctaccacactggaaacaggcgtgcccagcagattttctggcagcggctctggcaccgactacaccctgacaatatccagcctccagcctgaggacttcgccacctactactgtcagcagagctggaacaccccttggacattcggccagggcaccaagctggaaatcaagagactcgaggggaaaccaattcccaaccctcttctgggactggattcaaccggcagcggcgaggacctgaagaacgtgttcccacctgaggtggccgtgttcgagcctagcgaggccgagatcagccacacccagaaagccaccctcgtgtgcctggctaccggcttctaccccgaccatgtggaactgtcttggtgggtcaacggcaaagaggtgcacagcggcgtgtctaccgacccccagccactgaaagaacagcccgccctgaacgacagccggtactgcctgagcagcagactgagagtgtccgccaccttctggcagaacccccggaaccacttcagatgccaggtgcagttctacggcctgagcgagaacgacgagtggacccaggacagagccaagcccgtgacccagatcgtgtctgccgaagcctggggcagagccgattgcggatcccagagcttcggcctgctggaccccaagctgtgctacctgctggatggcatcctgttcatctacggcgtgatcctgaccgccctgttcctgaaacggggcagaaagaaactcctgtatatattcaaacaaccatttatgagaccagtacaaactactcaagaggaagatggctgtagctgccgatttccagaagaagaagaaggaggatgtgaactgagagtgaagttcagcagaagcgccgacgcccctgcctaccagcagggacagaaccaactgtacaacgagctgaacctgggcagacgggaagagtacgacgtgctggacaagcggagaggcagggaccctgagatgggcggaaagccccagcggagaaagaacccccaggaaggactgtataacgaactccagaaagacaagatggccgaagcctacagcgagatcggcatgaagggcgagcggagaagaggcaagggccacgatggcctgtaccagggcctgagcaccgccaccaaggacacctatgacgccctgcacatgcaggccctgcctccaagaagggccaagcgatctggatctggagcaacaaacttctcactactcaaacaagcaggtgacgtggaggagaatcccgggcctactagtatggactggatttggcgcatccttttccttgtcggcgctgctaccggcgcccattcccagctccagttgcaagagagcggccctggcttggtaaaaccttccgagacccttagcctcacatgcacggttagtgggggcagcatttcctcaggtgattactattggggatggattcggcaacccccgggtaaaggattggagtggattggtcatatttattatagtggagcgacgtactacaacccaagtctcaaatccagggttacaatatccgtcgatacgagcaggaaccaattcagcttgaaactttctagtgtcaccgcagcagacacagccgtctattactgtacgcgggatgactccagtaattggcggtcccgagggcaagggacactggtcacggtctcctcatctggaggcggtggaagcggtggaggaggatctcaggttcagctgcaagagtctggcggaggacttgctcaagctggcggaagcctgagactgtcttgtgccgcctctggcagaaccttcagcatgggctggtttagacaggcccctggcaaagagagagagttcgtcgccgccatcacatacagcggcggcagcccttactacgcctcttctgtcagaggccggttcaccatcagccgggacaacgccaagaacaccgtgtacctccagatgaacagcctgaagccagaggacaccgccgtgtactactgtgccgccaatccaacctacggcagcgactggaatgccgagaattggggccagggcacccaagtgacagtgtctagtggatccggcggcggaggatctggcggaggcggatctgggggcggaggctctttcgaacaagttcagcttcaacagcctggcgctgagctggtcaaacctggcgcttctgtgaagatgagctgcaaagccagcggctacgccttcagcagctactggatcaactggatgaagcagaaacccggccagggactcgaatggatcggccaaatctatcccggcgacggcgacaccaactacaacggcaagttcaagggcagagccacactgaccgccgatacctctagcagcacagcctacatgcagctgagcagcctgaccagcgaagatagcgccgtgtacttctgtgcccggtccatcacaacagtcgtgggctgcgctatggactattggggccagggaacaagcgtgaccgtgtctagtacgcgtgagcagaaactgatctcggaagaggatctggggagcggcatccagaaccctgatcctgccgtgtaccagctgcgggatagcaagagcagcgacaagagcgtgtgtctgttcaccgacttcgacagccagaccaacgtgtcccagagcaaggactccgacgtgtacatcaccgataagaccgtgctggacatgcggagcatggacttcaagagcaactccgccgtggcctggtccaacaagtccgatttcgcctgcgccaacgccttcaacaacagcattatccccgaggacacattcttcccaagccccgagagcagctgcggtacccagagttttgggttgttggaccctaaattgtgctatctgttggacggaatcctgttcatttacggagtgatcctgaccgcattgttcctgaagagaggccggaagaagctgctgtacatcttcaagcagcctttcatgcggcccgtgcagaccacccaggaagaggacggctgctcctgccggttccccgaggaagaagaaggcggctgcgagctgcgggttaagttttccagatccgcagacgcacccgcttaccaacaagggcagaaccaactctacaatgaacttaatttggggcggagggaagagtacgacgttctggacaaaaggaggggacgagatcccgagatgggcggaaagcctcagcgaaggaagaatccgcaagaggggctttataacgaactccagaaagataaaatggcagaagcctatagtgagattgggatgaagggagaaaggaggaggggtaaaggtcacgatgggttgtaccaaggattgagcacagccactaaagatacctatgatgcgctccacatgcaggccctgccgccaaga

SEQ ID NO: 5700 - DNA, 4086 bp, Artificial Sequence
  Synthetic Polynucloetide
atggccttaccagtgaccgccttgctcctgccgctggccttgctgctccacgccgccaggccggaggttcagctgcttgagtctggcggaggactggttcaacctggcggaagcctgagactgtcttgtgccgccagcggcttcacctttagcagctacgccatgagctgggtccgacaggctcctggcaaaggactggaatgggtgtccagcatcagcggcagcggcgactacatctactacgccgatagcgtgaagggcagattcaccatcagccgggacatcagcaagaacaccctgtacctccagatgaacagcctgagagccgaggacaccgccgtgtactactgtgccaaagaaggcaccggcgctaacagcagcctggccgattatagaggccagggcacactggtcaccgtgtctagtggcggaggaagcggcggaggatctgaagtgcaactggtggaatctggagggggaagcgtgcaggcaggcggatctctgagactgtcctgcaccacatctggcagagccctgaatatgtacgtgatgggatggtttcggcaggctcccggcaacgagcgggaatttgtggccgctacaagcagcagcggcggcagcacaagctaccccgattctgtgaagggcagattcacaatctcccgcgataatgccaagaatactgtgtacctgcagatgaatagtctgaagcctgaagatacagccgcctacagatgtgccgccagcccctacgtgtccacccccaccatgaacatcctggaagagtacagatactggggcctgggaacacaagtgacagtgtccagcggtaccggcggaggcggatctggcggcggaggtagcggtggcggaggatctgaattcgacatccagatgacacagagccctagcagcctgtctgccagcgtgggagacagagtgaccatcacatgcaaggccagcgaccacatcaacaactggctggcctggtatcagcagaagcctggacaggcccctaagctgctgatctacggcgctaccacactggaaacaggcgtgcccagcagattttctggcagcggctctggcaccgactacaccctgacaatatccagcctccagcctgaggacttcgccacctactactgtcagcagagctggaacaccccttggacattcggccagggcaccaagctggaaatcaagagactcgagcagagcttcggcctgctggaccccaagctgtgctacctgctggatggcatcctgttcatctacggcgtgatcctgaccgccctgttcctgagagtgaagttcagcagaagcgccgacgcccctgcctaccagcagggacagaaccaactgtacaacgagctgaacctgggcagacgggaagagtacgacgtgctggacaagcggagaggcagggaccctgagatgggcggaaagccccagcggagaaagaacccccaggaaggactgtataacgaactccagaaagacaagatggccgaagcctacagcgagatcggcatgaagggcgagcggagaagaggcaagggccacgatggcctgtaccagggcctgagcaccgccaccaaggacacctatgacgccctgcacatgcaggccctgcctccaagaagggccaagcgatctggatctggagcaacaaacttctcactactcaaacaagcaggtgacgtggaggagaatcccgggcctactagtatggactggatttggcgcatccttttccttgtcggcgctgctaccggcgcccattcccagctccagttgcaagagagcggccctggcttggtaaaaccttccgagacccttagcctcacatgcacggttagtgggggcagcatttcctcaggtgattactattggggatggattcggcaacccccgggtaaaggattggagtggattggtcatatttattatagtggagcgacgtactacaacccaagtctcaaatccagggttacaatatccgtcgatacgagcaggaaccaattcagcttgaaactttctagtgtcaccgcagcagacacagccgtctattactgtacgcgggatgactccagtaattggcggtcccgagggcaagggacactggtcacggtctcctcatctggaggcggtggaagcggtggaggaggatctcaggttcagctgcaagagtctggcggaggacttgctcaagctggcggaagcctgagactgtcttgtgccgcctctggcagaaccttcagcatgggctggtttagacaggcccctggcaaagagagagagttcgtcgccgccatcacatacagcggcggcagcccttactacgcctcttctgtcagaggccggttcaccatcagccgggacaacgccaagaacaccgtgtacctccagatgaacagcctgaagccagaggacaccgccgtgtactactgtgccgccaatccaacctacggcagcgactggaatgccgagaattggggccagggcacccaagtgacagtgtctagtggatccggcggcggaggatctggcggaggcggatctgggggcggaggctctttcgaacaagttcagcttcaacagcctggcgctgagctggtcaaacctggcgcttctgtgaagatgagctgcaaagccagcggctacgccttcagcagctactggatcaactggatgaagcagaaacccggccagggactcgaatggatcggccaaatctatcccggcgacggcgacaccaactacaacggcaagttcaagggcagagccacactgaccgccgatacctctagcagcacagcctacatgcagctgagcagcctgaccagcgaagatagcgccgtgtacttctgtgcccggtccatcacaacagtcgtgggctgcgctatggactattggggccagggaacaagcgtgaccgtgtctagtacgcgtcagagttttgggttgttggaccctaaattgtgctatctgttggacggaatcctgttcatttacggagtgatcctgaccgcattgttcctgcgggttaagttttccagatccgcagacgcacccgcttaccaacaagggcagaaccaactctacaatgaacttaatttggggcggagggaagagtacgacgttctggacaaaaggaggggacgagatcccgagatgggcggaaagcctcagcgaaggaagaatccgcaagaggggctttataacgaactccagaaagataaaatggcagaagcctatagtgagattgggatgaagggagaaaggaggaggggtaaaggtcacgatgggttgtaccaaggattgagcacagccactaaagatacctatgatgcgctccacatgcaggccctgccgccaagacgcgccaagagaagcggatctggcgtgaagcagaccctgaatttcgacctgctgaagctggctggcgacgtggaatccaacccaggcccttctagaggccatatgaccgagtacaagcccacggtgcgcctcgccacccgcgacgacgtccccagggccgtacgcaccctcgccgccgcgttcgccgactaccccgccacgcgccacaccgtcgatccggaccgccacatcgagcgggtcaccgagctgcaagaactcttcctcacgcgcgtcgggctcgacatcggcaaggtgtgggtcgcggacgacggcgccgcggtggcggtctggaccacgccggagagcgtcgaagcgggggcggtgttcgccgagatcggcccgcgcatggccgagttgagcggttcccggctggccgcgcagcaacagatggaaggcctcctggcgccgcaccggcccaaggagcccgcgtggttcctggccaccgtcggcgtctcgcccgaccaccagggcaagggtctgggcagcgccgtcgtgctccccggagtggaggcggccgagcgcgccggggtgcccgccttcctggagacctccgcgccccgcaacctccccttctacgagcggctcggcttcaccgtcaccgccgacgtcgaggtgcccgaaggaccgcgcacctggtgcatgacccgcaagcccggtgcctga

SEQ ID NO: 5701 - DNA, 3558 bp, Artificial Sequence
  Synthetic Polynucloetide
atggccttaccagtgaccgccttgctcctgccgctggccttgctgctccacgccgccaggccggaggttcagctgcttgagtctggcggaggactggttcaacctggcggaagcctgagactgtcttgtgccgccagcggcttcacctttagcagctacgccatgagctgggtccgacaggctcctggcaaaggactggaatgggtgtccagcatcagcggcagcggcgactacatctactacgccgatagcgtgaagggcagattcaccatcagccgggacatcagcaagaacaccctgtacctccagatgaacagcctgagagccgaggacaccgccgtgtactactgtgccaaagaaggcaccggcgctaacagcagcctggccgattatagaggccagggcacactggtcaccgtgtctagtggcggaggaagcggcggaggatctgaagtgcaactggtggaatctggagggggaagcgtgcaggcaggcggatctctgagactgtcctgcaccacatctggcagagccctgaatatgtacgtgatgggatggtttcggcaggctcccggcaacgagcgggaatttgtggccgctacaagcagcagcggcggcagcacaagctaccccgattctgtgaagggcagattcacaatctcccgcgataatgccaagaatactgtgtacctgcagatgaatagtctgaagcctgaagatacagccgcctacagatgtgccgccagcccctacgtgtccacccccaccatgaacatcctggaagagtacagatactggggcctgggaacacaagtgacagtgtccagcggtaccggcggaggcggatctggcggcggaggtagcggtggcggaggatctgaattcgacatccagatgacacagagccctagcagcctgtctgccagcgtgggagacagagtgaccatcacatgcaaggccagcgaccacatcaacaactggctggcctggtatcagcagaagcctggacaggcccctaagctgctgatctacggcgctaccacactggaaacaggcgtgcccagcagattttctggcagcggctctggcaccgactacaccctgacaatatccagcctccagcctgaggacttcgccacctactactgtcagcagagctggaacaccccttggacattcggccagggcaccaagctggaaatcaagagactcgagggacagcctaaggccaatcctaccgtgacactgttccctccaagcagcgaagaactccaggccaacaaggccacacttgtgtgcctgatctccgacttctaccctggggctgtgacagtggcttggaaggccgatggatctcctgtgaaagccggcgtggaaaccaccaagccatccaagcagagcaacaacaaatacgccgccagctcctacctgagcctgacacctgagcagtggaagtcccacagatcctacagctgccaagtgacccacgaaggcagcaccgtggaaaagacagtggcccctacagagtgcagccccatcaagaccgatgtgattacaatggaccccaaggacaactgctccaaggacgccaacgataccctgctgctccagctgaccaacaccagcgcctactacatgtacttgttgctgctgctgaagtccgtggtgtacttcgccatcatcacatgctgcctgctgcggagaaccgccttctgctgcaacggcgagaagtctagggccaagcgatctggatctggagcaacaaacttctcactactcaaacaagcaggtgacgtggaggagaatcccgggcctactagtatggactggatttggcgcatccttttccttgtcggcgctgctaccggcgcccattcccagctccagttgcaagagagcggccctggcttggtaaaaccttccgagacccttagcctcacatgcacggttagtgggggcagcatttcctcaggtgattactattggggatggattcggcaacccccgggtaaaggattggagtggattggtcatatttattatagtggagcgacgtactacaacccaagtctcaaatccagggttacaatatccgtcgatacgagcaggaaccaattcagcttgaaactttctagtgtcaccgcagcagacacagccgtctattactgtacgcgggatgactccagtaattggcggtcccgagggcaagggacactggtcacggtctcctcatctggaggcggtggaagcggtggaggaggatctcaggttcagctgcaagagtctggcggaggacttgctcaagctggcggaagcctgagactgtcttgtgccgcctctggcagaaccttcagcatgggctggtttagacaggcccctggcaaagagagagagttcgtcgccgccatcacatacagcggcggcagcccttactacgcctcttctgtcagaggccggttcaccatcagccgggacaacgccaagaacaccgtgtacctccagatgaacagcctgaagccagaggacaccgccgtgtactactgtgccgccaatccaacctacggcagcgactggaatgccgagaattggggccagggcacccaagtgacagtgtctagtggatccggcggcggaggatctggcggaggcggatctgggggcggaggctctttcgaacaagttcagcttcaacagcctggcgctgagctggtcaaacctggcgcttctgtgaagatgagctgcaaagccagcggctacgccttcagcagctactggatcaactggatgaagcagaaacccggccagggactcgaatggatcggccaaatctatcccggcgacggcgacaccaactacaacggcaagttcaagggcagagccacactgaccgccgatacctctagcagcacagcctacatgcagctgagcagcctgaccagcgaagatagcgccgtgtacttctgtgcccggtccatcacaacagtcgtgggctgcgctatggactattggggccagggaacaagcgtgaccgtgtctagtacgcgtgcctctacaaagggaccctccgtgtttcctctggctcccagcagcaagtctacaagcggaggaacagccgctctgggctgcctggtcaaggattactttcccgagcctgtgaccgtgtcctggaatagcggagcactgacaagcggcgtgcacacctttccagccgtgctgcaaagcagcggcctgtactctctgagcagcgtggtcacagtgcctagctctagcctgggcacccagacctacatctgcaatgtgaaccacaagcctagcaacaccaaggtggacaagagagtggaacccaagagctgtgaagtgaaaaccgactccaccgaccacgtgaagcccaaagagacagagaacaccaagcagcccagcaagagctgccacaagcccaaggccatcgtgcacaccgagaaagtgaacatgatgagcctgaccgtgctgggcctgcggatgctgttcgccaaaaccgtggccgtgaacttcctgctgaccgccaagctgttcttcctc

SEQ ID NO: 5702 - DNA, 3492 bp, Artificial Sequence
  Synthetic Polynucloetide
atggccttaccagtgaccgccttgctcctgccgctggccttgctgctccacgccgccaggccggaggttcagctgcttgagtctggcggaggactggttcaacctggcggaagcctgagactgtcttgtgccgccagcggcttcacctttagcagctacgccatgagctgggtccgacaggctcctggcaaaggactggaatgggtgtccagcatcagcggcagcggcgactacatctactacgccgatagcgtgaagggcagattcaccatcagccgggacatcagcaagaacaccctgtacctccagatgaacagcctgagagccgaggacaccgccgtgtactactgtgccaaagaaggcaccggcgctaacagcagcctggccgattatagaggccagggcacactggtcaccgtgtctagtggcggaggaagcggcggaggatctgaagtgcaactggtggaatctggagggggaagcgtgcaggcaggcggatctctgagactgtcctgcaccacatctggcagagccctgaatatgtacgtgatgggatggtttcggcaggctcccggcaacgagcgggaatttgtggccgctacaagcagcagcggcggcagcacaagctaccccgattctgtgaagggcagattcacaatctcccgcgataatgccaagaatactgtgtacctgcagatgaatagtctgaagcctgaagatacagccgcctacagatgtgccgccagcccctacgtgtccacccccaccatgaacatcctggaagagtacagatactggggcctgggaacacaagtgacagtgtccagcggtaccggcggaggcggatctggcggcggaggtagcggtggcggaggatctgaattcgacatccagatgacacagagccctagcagcctgtctgccagcgtgggagacagagtgaccatcacatgcaaggccagcgaccacatcaacaactggctggcctggtatcagcagaagcctggacaggcccctaagctgctgatctacggcgctaccacactggaaacaggcgtgcccagcagattttctggcagcggctctggcaccgactacaccctgacaatatccagcctccagcctgaggacttcgccacctactactgtcagcagagctggaacaccccttggacattcggccagggcaccaagctggaaatcaagagactcgagggacagcctaaggccaatcctaccgtgacactgttccctccaagcagcgaagaactccaggccaacaaggccacacttgtgtgcctgatctccgacttctaccctggggctgtgacagtggcttggaaggccgatggatctcctgtgaaagccggcgtggaaaccaccaagccatccaagcagagcaacaacaaatacgccgccagctcctacctgagcctgacacctgagcagtggaagtcccacagatcctacagctgccaagtgacccacgaaggcagcaccgtggaaaagacagtggcccctacagagtgcagcggcagagccgattgcggcatcaccagcgccagctaccaccagggcgtgctgagcgccaccatcctgtacgagatcctgctgggcaaggccaccctgtacgccgtgctggtgtctgccctggtgctgatggctatggtcaagcggaaggacagccggggaagggccaagcgatctggatctggagcaacaaacttctcactactcaaacaagcaggtgacgtggaggagaatcccgggcctactagtatggactggatttggcgcatccttttccttgtcggcgctgctaccggcgcccattcccagctccagttgcaagagagcggccctggcttggtaaaaccttccgagacccttagcctcacatgcacggttagtgggggcagcatttcctcaggtgattactattggggatggattcggcaacccccgggtaaaggattggagtggattggtcatatttattatagtggagcgacgtactacaacccaagtctcaaatccagggttacaatatccgtcgatacgagcaggaaccaattcagcttgaaactttctagtgtcaccgcagcagacacagccgtctattactgtacgcgggatgactccagtaattggcggtcccgagggcaagggacactggtcacggtctcctcatctggaggcggtggaagcggtggaggaggatctcaggttcagctgcaagagtctggcggaggacttgctcaagctggcggaagcctgagactgtcttgtgccgcctctggcagaaccttcagcatgggctggtttagacaggcccctggcaaagagagagagttcgtcgccgccatcacatacagcggcggcagcccttactacgcctcttctgtcagaggccggttcaccatcagccgggacaacgccaagaacaccgtgtacctccagatgaacagcctgaagccagaggacaccgccgtgtactactgtgccgccaatccaacctacggcagcgactggaatgccgagaattggggccagggcacccaagtgacagtgtctagtggatccggcggcggaggatctggcggaggcggatctgggggcggaggctctttcgaacaagttcagcttcaacagcctggcgctgagctggtcaaacctggcgcttctgtgaagatgagctgcaaagccagcggctacgccttcagcagctactggatcaactggatgaagcagaaacccggccagggactcgaatggatcggccaaatctatcccggcgacggcgacaccaactacaacggcaagttcaagggcagagccacactgaccgccgatacctctagcagcacagcctacatgcagctgagcagcctgaccagcgaagatagcgccgtgtacttctgtgcccggtccatcacaacagtcgtgggctgcgctatggactattggggccagggaacaagcgtgaccgtgtctagtacgcgtgcctctacaaagggaccctccgtgtttcctctggctcccagcagcaagtctacaagcggaggaacagccgctctgggctgcctggtcaaggattactttcccgagcctgtgaccgtgtcctggaatagcggagcactgacaagcggcgtgcacacctttccagccgtgctgcaaagcagcggcctgtactctctgagcagcgtggtcacagtgcctagctctagcctgggcacccagacctacatctgcaatgtgaaccacaagcctagcaacaccaaggtggacaagagagtggaacccaagagctgtatccccgaggacacattcttcccaagcagcgacgtgccctgcgacgtgaagctggtggaaaagagcttcgagacagacaccaacctgaacttccagaacctgagcgtgatcggcttcagaatcctgctgctgaaagtggccggctttaacctgctgatgaccctgcggctgtggtccagc

SEQ ID NO: 5703 - DNA, 3492 bp, Artificial Sequence
  Synthetic Polynucloetide
atggccttaccagtgaccgccttgctcctgccgctggccttgctgctccacgccgccaggccggaggttcagctgcttgagtctggcggaggactggttcaacctggcggaagcctgagactgtcttgtgccgccagcggcttcacctttagcagctacgccatgagctgggtccgacaggctcctggcaaaggactggaatgggtgtccagcatcagcggcagcggcgactacatctactacgccgatagcgtgaagggcagattcaccatcagccgggacatcagcaagaacaccctgtacctccagatgaacagcctgagagccgaggacaccgccgtgtactactgtgccaaagaaggcaccggcgctaacagcagcctggccgattatagaggccagggcacactggtcaccgtgtctagtggcggaggaagcggcggaggatctgaagtgcaactggtggaatctggagggggaagcgtgcaggcaggcggatctctgagactgtcctgcaccacatctggcagagccctgaatatgtacgtgatgggatggtttcggcaggctcccggcaacgagcgggaatttgtggccgctacaagcagcagcggcggcagcacaagctaccccgattctgtgaagggcagattcacaatctcccgcgataatgccaagaatactgtgtacctgcagatgaatagtctgaagcctgaagatacagccgcctacagatgtgccgccagcccctacgtgtccacccccaccatgaacatcctggaagagtacagatactggggcctgggaacacaagtgacagtgtccagcggtaccggcggaggcggatctggcggcggaggtagcggtggcggaggatctgaattcgacatccagatgacacagagccctagcagcctgtctgccagcgtgggagacagagtgaccatcacatgcaaggccagcgaccacatcaacaactggctggcctggtatcagcagaagcctggacaggcccctaagctgctgatctacggcgctaccacactggaaacaggcgtgcccagcagattttctggcagcggctctggcaccgactacaccctgacaatatccagcctccagcctgaggacttcgccacctactactgtcagcagagctggaacaccccttggacattcggccagggcaccaagctggaaatcaagagactcgagggacagcctaaggccaatcctaccgtgacactgttccctccaagcagcgaagaactccaggccaacaaggccacacttgtgtgcctgatctccgacttctaccctggggctgtgacagtggcttggaaggccgatggatctcctgtgaaagccggcgtggaaaccaccaagccatccaagcagagcaacaacaaatacgccgccagctcctacctgagcctgacacctgagcagtggaagtcccacagatcctacagctgccaagtgacccacgaaggcagcaccgtggaaaagacagtggcccctacagagtgcagcggcagagccgattgcggctttaccagcgagagctaccagcagggcgtgctgagcgccaccatcctgtacgagatcctgctgggcaaggccaccctgtacgccgtgctggtgtctgccctggtgctgatggctatggtcaagcggaaggacagccggggaagggccaagcgatctggatctggagcaacaaacttctcactactcaaacaagcaggtgacgtggaggagaatcccgggcctactagtatggactggatttggcgcatccttttccttgtcggcgctgctaccggcgcccattcccagctccagttgcaagagagcggccctggcttggtaaaaccttccgagacccttagcctcacatgcacggttagtgggggcagcatttcctcaggtgattactattggggatggattcggcaacccccgggtaaaggattggagtggattggtcatatttattatagtggagcgacgtactacaacccaagtctcaaatccagggttacaatatccgtcgatacgagcaggaaccaattcagcttgaaactttctagtgtcaccgcagcagacacagccgtctattactgtacgcgggatgactccagtaattggcggtcccgagggcaagggacactggtcacggtctcctcatctggaggcggtggaagcggtggaggaggatctcaggttcagctgcaagagtctggcggaggacttgctcaagctggcggaagcctgagactgtcttgtgccgcctctggcagaaccttcagcatgggctggtttagacaggcccctggcaaagagagagagttcgtcgccgccatcacatacagcggcggcagcccttactacgcctcttctgtcagaggccggttcaccatcagccgggacaacgccaagaacaccgtgtacctccagatgaacagcctgaagccagaggacaccgccgtgtactactgtgccgccaatccaacctacggcagcgactggaatgccgagaattggggccagggcacccaagtgacagtgtctagtggatccggcggcggaggatctggcggaggcggatctgggggcggaggctctttcgaacaagttcagcttcaacagcctggcgctgagctggtcaaacctggcgcttctgtgaagatgagctgcaaagccagcggctacgccttcagcagctactggatcaactggatgaagcagaaacccggccagggactcgaatggatcggccaaatctatcccggcgacggcgacaccaactacaacggcaagttcaagggcagagccacactgaccgccgatacctctagcagcacagcctacatgcagctgagcagcctgaccagcgaagatagcgccgtgtacttctgtgcccggtccatcacaacagtcgtgggctgcgctatggactattggggccagggaacaagcgtgaccgtgtctagtacgcgtgcctctacaaagggaccctccgtgtttcctctggctcccagcagcaagtctacaagcggaggaacagccgctctgggctgcctggtcaaggattactttcccgagcctgtgaccgtgtcctggaatagcggagcactgacaagcggcgtgcacacctttccagccgtgctgcaaagcagcggcctgtactctctgagcagcgtggtcacagtgcctagctctagcctgggcacccagacctacatctgcaatgtgaaccacaagcctagcaacaccaaggtggacaagagagtggaacccaagagctgtatccccgaggacacattcttcccaagccccgagagcagctgcgacgtgaagctggtggaaaagagcttcgagacagacaccaacctgaacttccagaacctgagcgtgatcggcttcagaatcctgctgctgaaagtggccggctttaacctgctgatgaccctgcggctgtggtccagc

SEQ ID NO: 5704 - DNA, 3393 bp, Artificial Sequence
  Synthetic Polynucloetide
atggccttaccagtgaccgccttgctcctgccgctggccttgctgctccacgccgccaggccggaggttcagctgcttgagtctggcggaggactggttcaacctggcggaagcctgagactgtcttgtgccgccagcggcttcacctttagcagctacgccatgagctgggtccgacaggctcctggcaaaggactggaatgggtgtccagcatcagcggcagcggcgactacatctactacgccgatagcgtgaagggcagattcaccatcagccgggacatcagcaagaacaccctgtacctccagatgaacagcctgagagccgaggacaccgccgtgtactactgtgccaaagaaggcaccggcgctaacagcagcctggccgattatagaggccagggcacactggtcaccgtgtctagtggcggaggaagcggcggaggatctgaagtgcaactggtggaatctggagggggaagcgtgcaggcaggcggatctctgagactgtcctgcaccacatctggcagagccctgaatatgtacgtgatgggatggtttcggcaggctcccggcaacgagcgggaatttgtggccgctacaagcagcagcggcggcagcacaagctaccccgattctgtgaagggcagattcacaatctcccgcgataatgccaagaatactgtgtacctgcagatgaatagtctgaagcctgaagatacagccgcctacagatgtgccgccagcccctacgtgtccacccccaccatgaacatcctggaagagtacagatactggggcctgggaacacaagtgacagtgtccagcctcgagggacagcctaaggccaatcctaccgtgacactgttccctccaagcagcgaagaactccaggccaacaaggccacacttgtgtgcctgatctccgacttctaccctggggctgtgacagtggcttggaaggccgatggatctcctgtgaaagccggcgtggaaaccaccaagccatccaagcagagcaacaacaaatacgccgccagctcctacctgagcctgacacctgagcagtggaagtcccacagatcctacagctgccaagtgacccacgaaggcagcaccgtggaaaagacagtggcccctacagagtgcagcggcagagccgattgcggctttaccagcgagagctaccagcagggcgtgctgagcgccaccatcctgtacgagatcctgctgggcaaggccaccctgtacgccgtgctggtgtctgccctggtgctgatggctatggtcaagcggaaggacagccggggaagggccaagcgatctggatctggagcaacaaacttctcactactcaaacaagcaggtgacgtggaggagaatcccgggcctactagtatggactggatttggcgcatccttttccttgtcggcgctgctaccggcgcgcattcccagctccagttgcaagagagcggccctggcttggtaaaaccttccgagacccttagcctcacatgcacggttagtgggggcagcatttcctcaggtgattactattggggatggattcggcaacccccgggtaaaggattggagtggattggtcatatttattatagtggagcgacgtactacaacccaagtctcaaatccagggttacaatatccgtcgatacgagcaggaaccaattcagcttgaaactttctagtgtcaccgcagcagacacagccgtctattactgtacgcgggatgactccagtaattggcggtcccgagggcaagggacactggtcacggtctcctcatctggaggcggtggaagcggtggaggaggatctcaggttcagctgcaagagtctggcggaggacttgctcaagctggcggaagcctgagactgtcttgtgccgcctctggcagaaccttcagcatgggctggtttagacaggcccctggcaaagagagagagttcgtcgccgccatcacatacagcggcggcagcccttactacgcctcttctgtcagaggccggttcaccatcagccgggacaacgccaagaacaccgtgtacctccagatgaacagcctgaagccagaggacaccgccgtgtactactgtgccgccaatccaacctacggcagcgactggaatgccgagaattggggccagggcacccaagtgacagtgtctagtacgcgtgcctctacaaagggaccctccgtgtttcctctggctcccagcagcaagtctacaagcggaggaacagccgctctgggctgcctggtcaaggattactttcccgagcctgtgaccgtgtcctggaatagcggagcactgacaagcggcgtgcacacctttccagccgtgctgcaaagcagcggcctgtactctctgagcagcgtggtcacagtgcctagctctagcctgggcacccagacctacatctgcaatgtgaaccacaagcctagcaacaccaaggtggacaagagagtggaacccaagagctgtatccccgaggacacattcttcccaagccccgagagcagctgcgacgtgaagctggtggaaaagagcttcgagacagacaccaacctgaacttccagaacctgagcgtgatcggcttcagaatcctgctgctgaaagtggccggctttaacctgctgatgaccctgcggctgtggtccagccgcgccaagagaagcggatctggcgtgaagcagaccctgaatttcgacctgctgaagctggctggcgacgtggaatccaacccaggcccttctagaggccatatgaccgagtacaagcccacggtgcgcctcgccacccgcgacgacgtccccagggccgtacgcaccctcgccgccgcgttcgccgactaccccgccacgcgccacaccgtcgatccggaccgccacatcgagcgggtcaccgagctgcaagaactcttcctcacgcgcgtcgggctcgacatcggcaaggtgtgggtcgcggacgacggcgccgcggtggcggtctggaccacgccggagagcgtcgaagcgggggcggtgttcgccgagatcggcccgcgcatggccgagttgagcggttcccggctggccgcgcagcaacagatggaaggcctcctggcgccgcaccggcccaaggagcccgcgtggttcctggccaccgtcggcgtctcgcccgaccaccagggcaagggtctgggcagcgccgtcgtgctccccggagtggaggcggccgagcgcgccggggtgcccgccttcctggagacctccgcgccccgcaacctccccttctacgagcggctcggcttcaccgtcaccgccgacgtcgaggtgcccgaaggaccgcgcacctggtgcatgacccgcaagcccggtgcctga

SEQ ID NO: 5705 - DNA, 2691 bp, Artificial Sequence
  Synthetic Polynucloetide
atggccttaccagtgaccgccttgctcctgccgctggccttgctgctccacgccgccaggccggaggttcagctgcttgagtctggcggaggactggttcaacctggcggaagcctgagactgtcttgtgccgccagcggcttcacctttagcagctacgccatgagctgggtccgacaggctcctggcaaaggactggaatgggtgtccagcatcagcggcagcggcgactacatctactacgccgatagcgtgaagggcagattcaccatcagccgggacatcagcaagaacaccctgtacctccagatgaacagcctgagagccgaggacaccgccgtgtactactgtgccaaagaaggcaccggcgctaacagcagcctggccgattatagaggccagggcacactggtcaccgtgtctagtggcggaggaagcggcggaggatctgaagtgcaactggtggaatctggagggggaagcgtgcaggcaggcggatctctgagactgtcctgcaccacatctggcagagccctgaatatgtacgtgatgggatggtttcggcaggctcccggcaacgagcgggaatttgtggccgctacaagcagcagcggcggcagcacaagctaccccgattctgtgaagggcagattcacaatctcccgcgataatgccaagaatactgtgtacctgcagatgaatagtctgaagcctgaagatacagccgcctacagatgtgccgccagcccctacgtgtccacccccaccatgaacatcctggaagagtacagatactggggcctgggaacacaagtgacagtgtccagcctcgagggacagcctaaggccaatcctaccgtgacactgttccctccaagcagcgaagaactccaggccaacaaggccacacttgtgtgcctgatctccgacttctaccctggggctgtgacagtggcttggaaggccgatggatctcctgtgaaagccggcgtggaaaccaccaagccatccaagcagagcaacaacaaatacgccgccagctcctacctgagcctgacacctgagcagtggaagtcccacagatcctacagctgccaagtgacccacgaaggcagcaccgtggaaaagacagtggcccctacagagtgcagcggcagagccgattgcggctttaccagcgagagctaccagcagggcgtgctgagcgccaccatcctgtacgagatcctgctgggcaaggccaccctgtacgccgtgctggtgtctgccctggtgctgatggctatggtcaagcggaaggacagccggggaagggccaagcgatctggatctggagcaacaaacttctcactactcaaacaagcaggtgacgtggaggagaatcccgggcctactagtatggactggatttggcgcatccttttccttgtcggcgctgctaccggcgcgcattcccagctccagttgcaagagagcggccctggcttggtaaaaccttccgagacccttagcctcacatgcacggttagtgggggcagcatttcctcaggtgattactattggggatggattcggcaacccccgggtaaaggattggagtggattggtcatatttattatagtggagcgacgtactacaacccaagtctcaaatccagggttacaatatccgtcgatacgagcaggaaccaattcagcttgaaactttctagtgtcaccgcagcagacacagccgtctattactgtacgcgggatgactccagtaattggcggtcccgagggcaagggacactggtcacggtctcctcatctggaggcggtggaagcggtggaggaggatctcaggttcagctgcaagagtctggcggaggacttgctcaagctggcggaagcctgagactgtcttgtgccgcctctggcagaaccttcagcatgggctggtttagacaggcccctggcaaagagagagagttcgtcgccgccatcacatacagcggcggcagcccttactacgcctcttctgtcagaggccggttcaccatcagccgggacaacgccaagaacaccgtgtacctccagatgaacagcctgaagccagaggacaccgccgtgtactactgtgccgccaatccaacctacggcagcgactggaatgccgagaattggggccagggcacccaagtgacagtgtctagtacgcgtgcctctacaaagggaccctccgtgtttcctctggctcccagcagcaagtctacaagcggaggaacagccgctctgggctgcctggtcaaggattactttcccgagcctgtgaccgtgtcctggaatagcggagcactgacaagcggcgtgcacacctttccagccgtgctgcaaagcagcggcctgtactctctgagcagcgtggtcacagtgcctagctctagcctgggcacccagacctacatctgcaatgtgaaccacaagcctagcaacaccaaggtggacaagagagtggaacccaagagctgtatccccgaggacacattcttcccaagccccgagagcagctgcgacgtgaagctggtggaaaagagcttcgagacagacaccaacctgaacttccagaacctgagcgtgatcggcttcagaatcctgctgctgaaagtggccggctttaacctgctgatgaccctgcggctgtggtccagc

SEQ ID NO: 5706 - DNA, 2778 bp, Artificial Sequence
  Synthetic Polynucloetide
atggccttaccagtgaccgccttgctcctgccgctggccttgctgctccacgccgccaggccggaggttcagctgcttgagtctggcggaggactggttcaacctggcggaagcctgagactgtcttgtgccgccagcggcttcacctttagcagctacgccatgagctgggtccgacaggctcctggcaaaggactggaatgggtgtccagcatcagcggcagcggcgactacatctactacgccgatagcgtgaagggcagattcaccatcagccgggacatcagcaagaacaccctgtacctccagatgaacagcctgagagccgaggacaccgccgtgtactactgtgccaaagaaggcaccggcgctaacagcagcctggccgattatagaggccagggcacactggtcaccgtgtctagtggcggaggaagcggcggaggatctgaagtgcaactggtggaatctggagggggaagcgtgcaggcaggcggatctctgagactgtcctgcaccacatctggcagagccctgaatatgtacgtgatgggatggtttcggcaggctcccggcaacgagcgggaatttgtggccgctacaagcagcagcggcggcagcacaagctaccccgattctgtgaagggcagattcacaatctcccgcgataatgccaagaatactgtgtacctgcagatgaatagtctgaagcctgaagatacagccgcctacagatgtgccgccagcccctacgtgtccacccccaccatgaacatcctggaagagtacagatactggggcctgggaacacaagtgacagtgtccagcctcgagggatctggcagagccgattgcggctttaccagcgagagctaccagcagggcgtgctgagcgccaccatcctgtacgagatcctgctgggcaaggccaccctgtacgccgtgctggtgtctgccctggtgctgatggctatggtcaagcggaaggacagccggggaagggccaagcgatctggatctggagcaacaaacttctcactactcaaacaagcaggtgacgtggaggagaatcccgggcctactagtatggactggatttggcgcatccttttccttgtcggcgctgctaccggcgcgcattcccagctccagttgcaagagagcggccctggcttggtaaaaccttccgagacccttagcctcacatgcacggttagtgggggcagcatttcctcaggtgattactattggggatggattcggcaacccccgggtaaaggattggagtggattggtcatatttattatagtggagcgacgtactacaacccaagtctcaaatccagggttacaatatccgtcgatacgagcaggaaccaattcagcttgaaactttctagtgtcaccgcagcagacacagccgtctattactgtacgcgggatgactccagtaattggcggtcccgagggcaagggacactggtcacggtctcctcatctggaggcggtggaagcggtggaggaggatctcaggttcagctgcaagagtctggcggaggacttgctcaagctggcggaagcctgagactgtcttgtgccgcctctggcagaaccttcagcatgggctggtttagacaggcccctggcaaagagagagagttcgtcgccgccatcacatacagcggcggcagcccttactacgcctcttctgtcagaggccggttcaccatcagccgggacaacgccaagaacaccgtgtacctccagatgaacagcctgaagccagaggacaccgccgtgtactactgtgccgccaatccaacctacggcagcgactggaatgccgagaattggggccagggcacccaagtgacagtgtctagtacgcgtggcagcatccccgaggacacattcttcccaagccccgagagcagctgcgacgtgaagctggtggaaaagagcttcgagacagacaccaacctgaacttccagaacctgagcgtgatcggcttcagaatcctgctgctgaaagtggccggctttaacctgctgatgaccctgcggctgtggtccagccgcgccaagagaagcggatctggcgtgaagcagaccctgaatttcgacctgctgaagctggctggcgacgtggaatccaacccaggcccttctagaggccatatgaccgagtacaagcccacggtgcgcctcgccacccgcgacgacgtccccagggccgtacgcaccctcgccgccgcgttcgccgactaccccgccacgcgccacaccgtcgatccggaccgccacatcgagcgggtcaccgagctgcaagaactcttcctcacgcgcgtcgggctcgacatcggcaaggtgtgggtcgcggacgacggcgccgcggtggcggtctggaccacgccggagagcgtcgaagcgggggcggtgttcgccgagatcggcccgcgcatggccgagttgagcggttcccggctggccgcgcagcaacagatggaaggcctcctggcgccgcaccggcccaaggagcccgcgtggttcctggccaccgtcggcgtctcgcccgaccaccagggcaagggtctgggcagcgccgtcgtgctccccggagtggaggcggccgagcgcgccggggtgcccgccttcctggagacctccgcgccccgcaacctccccttctacgagcggctcggcttcaccgtcaccgccgacgtcgaggtgcccgaaggaccgcgcacctggtgcatgacccgcaagcccggtgcctga

SEQ ID NO: 5707 - DNA, 2076 bp, Artificial Sequence
  Synthetic Polynucloetide
atggccttaccagtgaccgccttgctcctgccgctggccttgctgctccacgccgccaggccggaggttcagctgcttgagtctggcggaggactggttcaacctggcggaagcctgagactgtcttgtgccgccagcggcttcacctttagcagctacgccatgagctgggtccgacaggctcctggcaaaggactggaatgggtgtccagcatcagcggcagcggcgactacatctactacgccgatagcgtgaagggcagattcaccatcagccgggacatcagcaagaacaccctgtacctccagatgaacagcctgagagccgaggacaccgccgtgtactactgtgccaaagaaggcaccggcgctaacagcagcctggccgattatagaggccagggcacactggtcaccgtgtctagtggcggaggaagcggcggaggatctgaagtgcaactggtggaatctggagggggaagcgtgcaggcaggcggatctctgagactgtcctgcaccacatctggcagagccctgaatatgtacgtgatgggatggtttcggcaggctcccggcaacgagcgggaatttgtggccgctacaagcagcagcggcggcagcacaagctaccccgattctgtgaagggcagattcacaatctcccgcgataatgccaagaatactgtgtacctgcagatgaatagtctgaagcctgaagatacagccgcctacagatgtgccgccagcccctacgtgtccacccccaccatgaacatcctggaagagtacagatactggggcctgggaacacaagtgacagtgtccagcctcgagggatctggcagagccgattgcggctttaccagcgagagctaccagcagggcgtgctgagcgccaccatcctgtacgagatcctgctgggcaaggccaccctgtacgccgtgctggtgtctgccctggtgctgatggctatggtcaagcggaaggacagccggggaagggccaagcgatctggatctggagcaacaaacttctcactactcaaacaagcaggtgacgtggaggagaatcccgggcctactagtatggactggatttggcgcatccttttccttgtcggcgctgctaccggcgcgcattcccagctccagttgcaagagagcggccctggcttggtaaaaccttccgagacccttagcctcacatgcacggttagtgggggcagcatttcctcaggtgattactattggggatggattcggcaacccccgggtaaaggattggagtggattggtcatatttattatagtggagcgacgtactacaacccaagtctcaaatccagggttacaatatccgtcgatacgagcaggaaccaattcagcttgaaactttctagtgtcaccgcagcagacacagccgtctattactgtacgcgggatgactccagtaattggcggtcccgagggcaagggacactggtcacggtctcctcatctggaggcggtggaagcggtggaggaggatctcaggttcagctgcaagagtctggcggaggacttgctcaagctggcggaagcctgagactgtcttgtgccgcctctggcagaaccttcagcatgggctggtttagacaggcccctggcaaagagagagagttcgtcgccgccatcacatacagcggcggcagcccttactacgcctcttctgtcagaggccggttcaccatcagccgggacaacgccaagaacaccgtgtacctccagatgaacagcctgaagccagaggacaccgccgtgtactactgtgccgccaatccaacctacggcagcgactggaatgccgagaattggggccagggcacccaagtgacagtgtctagtacgcgtggcagcatccccgaggacacattcttcccaagccccgagagcagctgcgacgtgaagctggtggaaaagagcttcgagacagacaccaacctgaacttccagaacctgagcgtgatcggcttcagaatcctgctgctgaaagtggccggctttaacctgctgatgaccctgcggctgtggtccagc

SEQ ID NO: 5708 - DNA, 2805 bp, Artificial Sequence
  Synthetic Polynucloetide
atggccttaccagtgaccgccttgctcctgccgctggccttgctgctccacgccgccaggccggaggttcagctgcttgagtctggcggaggactggttcaacctggcggaagcctgagactgtcttgtgccgccagcggcttcacctttagcagctacgccatgagctgggtccgacaggctcctggcaaaggactggaatgggtgtccagcatcagcggcagcggcgactacatctactacgccgatagcgtgaagggcagattcaccatcagccgggacatcagcaagaacaccctgtacctccagatgaacagcctgagagccgaggacaccgccgtgtactactgtgccaaagaaggcaccggcgctaacagcagcctggccgattatagaggccagggcacactggtcaccgtgtctagtggcggaggaagcggcggaggatctgaagtgcaactggtggaatctggagggggaagcgtgcaggcaggcggatctctgagactgtcctgcaccacatctggcagagccctgaatatgtacgtgatgggatggtttcggcaggctcccggcaacgagcgggaatttgtggccgctacaagcagcagcggcggcagcacaagctaccccgattctgtgaagggcagattcacaatctcccgcgataatgccaagaatactgtgtacctgcagatgaatagtctgaagcctgaagatacagccgcctacagatgtgccgccagcccctacgtgtccacccccaccatgaacatcctggaagagtacagatactggggcctgggaacacaagtgacagtgtccagcctcgaggacaaaactcacacatgcccaccgtgcccagcaggcagagccgattgcggctttaccagcgagagctaccagcagggcgtgctgagcgccaccatcctgtacgagatcctgctgggcaaggccaccctgtacgccgtgctggtgtctgccctggtgctgatggctatggtcaagcggaaggacagccggggaagggccaagcgatctggatctggagcaacaaacttctcactactcaaacaagcaggtgacgtggaggagaatcccgggcctactagtatggactggatttggcgcatccttttccttgtcggcgctgctaccggcgcgcattcccagctccagttgcaagagagcggccctggcttggtaaaaccttccgagacccttagcctcacatgcacggttagtgggggcagcatttcctcaggtgattactattggggatggattcggcaacccccgggtaaaggattggagtggattggtcatatttattatagtggagcgacgtactacaacccaagtctcaaatccagggttacaatatccgtcgatacgagcaggaaccaattcagcttgaaactttctagtgtcaccgcagcagacacagccgtctattactgtacgcgggatgactccagtaattggcggtcccgagggcaagggacactggtcacggtctcctcatctggaggcggtggaagcggtggaggaggatctcaggttcagctgcaagagtctggcggaggacttgctcaagctggcggaagcctgagactgtcttgtgccgcctctggcagaaccttcagcatgggctggtttagacaggcccctggcaaagagagagagttcgtcgccgccatcacatacagcggcggcagcccttactacgcctcttctgtcagaggccggttcaccatcagccgggacaacgccaagaacaccgtgtacctccagatgaacagcctgaagccagaggacaccgccgtgtactactgtgccgccaatccaacctacggcagcgactggaatgccgagaattggggccagggcacccaagtgacagtgtctagtacgcgtggcagcatccccgaggacacattcttcccaagccccgagagcagctgcgacgtgaagctggtggaaaagagcttcgagacagacaccaacctgaacttccagaacctgagcgtgatcggcttcagaatcctgctgctgaaagtggccggctttaacctgctgatgaccctgcggctgtggtccagccgcgccaagagaagcggatctggcgtgaagcagaccctgaatttcgacctgctgaagctggctggcgacgtggaatccaacccaggcccttctagaggccatatgaccgagtacaagcccacggtgcgcctcgccacccgcgacgacgtccccagggccgtacgcaccctcgccgccgcgttcgccgactaccccgccacgcgccacaccgtcgatccggaccgccacatcgagcgggtcaccgagctgcaagaactcttcctcacgcgcgtcgggctcgacatcggcaaggtgtgggtcgcggacgacggcgccgcggtggcggtctggaccacgccggagagcgtcgaagcgggggcggtgttcgccgagatcggcccgcgcatggccgagttgagcggttcccggctggccgcgcagcaacagatggaaggcctcctggcgccgcaccggcccaaggagcccgcgtggttcctggccaccgtcggcgtctcgcccgaccaccagggcaagggtctgggcagcgccgtcgtgctccccggagtggaggcggccgagcgcgccggggtgcccgccttcctggagacctccgcgccccgcaacctccccttctacgagcggctcggcttcaccgtcaccgccgacgtcgaggtgcccgaaggaccgcgcacctggtgcatgacccgcaagcccggtgcctga

SEQ ID NO: 5709 - DNA, 2805 bp, Artificial Sequence
  Synthetic Polynucloetide
atggccttaccagtgaccgccttgctcctgccgctggccttgctgctccacgccgccaggccggaggttcagctgcttgagtctggcggaggactggttcaacctggcggaagcctgagactgtcttgtgccgccagcggcttcacctttagcagctacgccatgagctgggtccgacaggctcctggcaaaggactggaatgggtgtccagcatcagcggcagcggcgactacatctactacgccgatagcgtgaagggcagattcaccatcagccgggacatcagcaagaacaccctgtacctccagatgaacagcctgagagccgaggacaccgccgtgtactactgtgccaaagaaggcaccggcgctaacagcagcctggccgattatagaggccagggcacactggtcaccgtgtctagtggcggaggaagcggcggaggatctgaagtgcaactggtggaatctggagggggaagcgtgcaggcaggcggatctctgagactgtcctgcaccacatctggcagagccctgaatatgtacgtgatgggatggtttcggcaggctcccggcaacgagcgggaatttgtggccgctacaagcagcagcggcggcagcacaagctaccccgattctgtgaagggcagattcacaatctcccgcgataatgccaagaatactgtgtacctgcagatgaatagtctgaagcctgaagatacagccgcctacagatgtgccgccagcccctacgtgtccacccccaccatgaacatcctggaagagtacagatactggggcctgggaacacaagtgacagtgtccagcctcgagggatctggcagagccgattgcggctttaccagcgagagctaccagcagggcgtgctgagcgccaccatcctgtacgagatcctgctgggcaaggccaccctgtacgccgtgctggtgtctgccctggtgctgatggctatggtcaagcggaaggacagccggggaagggccaagcgatctggatctggagcaacaaacttctcactactcaaacaagcaggtgacgtggaggagaatcccgggcctactagtatggactggatttggcgcatccttttccttgtcggcgctgctaccggcgcgcattcccagctccagttgcaagagagcggccctggcttggtaaaaccttccgagacccttagcctcacatgcacggttagtgggggcagcatttcctcaggtgattactattggggatggattcggcaacccccgggtaaaggattggagtggattggtcatatttattatagtggagcgacgtactacaacccaagtctcaaatccagggttacaatatccgtcgatacgagcaggaaccaattcagcttgaaactttctagtgtcaccgcagcagacacagccgtctattactgtacgcgggatgactccagtaattggcggtcccgagggcaagggacactggtcacggtctcctcatctggaggcggtggaagcggtggaggaggatctcaggttcagctgcaagagtctggcggaggacttgctcaagctggcggaagcctgagactgtcttgtgccgcctctggcagaaccttcagcatgggctggtttagacaggcccctggcaaagagagagagttcgtcgccgccatcacatacagcggcggcagcccttactacgcctcttctgtcagaggccggttcaccatcagccgggacaacgccaagaacaccgtgtacctccagatgaacagcctgaagccagaggacaccgccgtgtactactgtgccgccaatccaacctacggcagcgactggaatgccgagaattggggccagggcacccaagtgacagtgtctagtacgcgtgataaaactcatacctgtccgccatgcccggcaatccccgaggacacattcttcccaagccccgagagcagctgcgacgtgaagctggtggaaaagagcttcgagacagacaccaacctgaacttccagaacctgagcgtgatcggcttcagaatcctgctgctgaaagtggccggctttaacctgctgatgaccctgcggctgtggtccagccgcgccaagagaagcggatctggcgtgaagcagaccctgaatttcgacctgctgaagctggctggcgacgtggaatccaacccaggcccttctagaggccatatgaccgagtacaagcccacggtgcgcctcgccacccgcgacgacgtccccagggccgtacgcaccctcgccgccgcgttcgccgactaccccgccacgcgccacaccgtcgatccggaccgccacatcgagcgggtcaccgagctgcaagaactcttcctcacgcgcgtcgggctcgacatcggcaaggtgtgggtcgcggacgacggcgccgcggtggcggtctggaccacgccggagagcgtcgaagcgggggcggtgttcgccgagatcggcccgcgcatggccgagttgagcggttcccggctggccgcgcagcaacagatggaaggcctcctggcgccgcaccggcccaaggagcccgcgtggttcctggccaccgtcggcgtctcgcccgaccaccagggcaagggtctgggcagcgccgtcgtgctccccggagtggaggcggccgagcgcgccggggtgcccgccttcctggagacctccgcgccccgcaacctccccttctacgagcggctcggcttcaccgtcaccgccgacgtcgaggtgcccgaaggaccgcgcacctggtgcatgacccgcaagcccggtgcctga

SEQ ID NO: 5710 - DNA, 2832 bp, Artificial Sequence
  Synthetic Polynucloetide
atggccttaccagtgaccgccttgctcctgccgctggccttgctgctccacgccgccaggccggaggttcagctgcttgagtctggcggaggactggttcaacctggcggaagcctgagactgtcttgtgccgccagcggcttcacctttagcagctacgccatgagctgggtccgacaggctcctggcaaaggactggaatgggtgtccagcatcagcggcagcggcgactacatctactacgccgatagcgtgaagggcagattcaccatcagccgggacatcagcaagaacaccctgtacctccagatgaacagcctgagagccgaggacaccgccgtgtactactgtgccaaagaaggcaccggcgctaacagcagcctggccgattatagaggccagggcacactggtcaccgtgtctagtggcggaggaagcggcggaggatctgaagtgcaactggtggaatctggagggggaagcgtgcaggcaggcggatctctgagactgtcctgcaccacatctggcagagccctgaatatgtacgtgatgggatggtttcggcaggctcccggcaacgagcgggaatttgtggccgctacaagcagcagcggcggcagcacaagctaccccgattctgtgaagggcagattcacaatctcccgcgataatgccaagaatactgtgtacctgcagatgaatagtctgaagcctgaagatacagccgcctacagatgtgccgccagcccctacgtgtccacccccaccatgaacatcctggaagagtacagatactggggcctgggaacacaagtgacagtgtccagcctcgaggacaaaactcacacatgcccaccgtgcccagcaggcagagccgattgcggctttaccagcgagagctaccagcagggcgtgctgagcgccaccatcctgtacgagatcctgctgggcaaggccaccctgtacgccgtgctggtgtctgccctggtgctgatggctatggtcaagcggaaggacagccggggaagggccaagcgatctggatctggagcaacaaacttctcactactcaaacaagcaggtgacgtggaggagaatcccgggcctactagtatggactggatttggcgcatccttttccttgtcggcgctgctaccggcgcgcattcccagctccagttgcaagagagcggccctggcttggtaaaaccttccgagacccttagcctcacatgcacggttagtgggggcagcatttcctcaggtgattactattggggatggattcggcaacccccgggtaaaggattggagtggattggtcatatttattatagtggagcgacgtactacaacccaagtctcaaatccagggttacaatatccgtcgatacgagcaggaaccaattcagcttgaaactttctagtgtcaccgcagcagacacagccgtctattactgtacgcgggatgactccagtaattggcggtcccgagggcaagggacactggtcacggtctcctcatctggaggcggtggaagcggtggaggaggatctcaggttcagctgcaagagtctggcggaggacttgctcaagctggcggaagcctgagactgtcttgtgccgcctctggcagaaccttcagcatgggctggtttagacaggcccctggcaaagagagagagttcgtcgccgccatcacatacagcggcggcagcccttactacgcctcttctgtcagaggccggttcaccatcagccgggacaacgccaagaacaccgtgtacctccagatgaacagcctgaagccagaggacaccgccgtgtactactgtgccgccaatccaacctacggcagcgactggaatgccgagaattggggccagggcacccaagtgacagtgtctagtacgcgtgataaaactcatacctgtccgccatgcccggcaatccccgaggacacattcttcccaagccccgagagcagctgcgacgtgaagctggtggaaaagagcttcgagacagacaccaacctgaacttccagaacctgagcgtgatcggcttcagaatcctgctgctgaaagtggccggctttaacctgctgatgaccctgcggctgtggtccagccgcgccaagagaagcggatctggcgtgaagcagaccctgaatttcgacctgctgaagctggctggcgacgtggaatccaacccaggcccttctagaggccatatgaccgagtacaagcccacggtgcgcctcgccacccgcgacgacgtccccagggccgtacgcaccctcgccgccgcgttcgccgactaccccgccacgcgccacaccgtcgatccggaccgccacatcgagcgggtcaccgagctgcaagaactcttcctcacgcgcgtcgggctcgacatcggcaaggtgtgggtcgcggacgacggcgccgcggtggcggtctggaccacgccggagagcgtcgaagcgggggcggtgttcgccgagatcggcccgcgcatggccgagttgagcggttcccggctggccgcgcagcaacagatggaaggcctcctggcgccgcaccggcccaaggagcccgcgtggttcctggccaccgtcggcgtctcgcccgaccaccagggcaagggtctgggcagcgccgtcgtgctccccggagtggaggcggccgagcgcgccggggtgcccgccttcctggagacctccgcgccccgcaacctccccttctacgagcggctcggcttcaccgtcaccgccgacgtcgaggtgcccgaaggaccgcgcacctggtgcatgacccgcaagcccggtgcctga

SEQ ID NO: 5711 - DNA, 2130 bp, Artificial Sequence
  Synthetic Polynucloetide
atggccttaccagtgaccgccttgctcctgccgctggccttgctgctccacgccgccaggccggaggttcagctgcttgagtctggcggaggactggttcaacctggcggaagcctgagactgtcttgtgccgccagcggcttcacctttagcagctacgccatgagctgggtccgacaggctcctggcaaaggactggaatgggtgtccagcatcagcggcagcggcgactacatctactacgccgatagcgtgaagggcagattcaccatcagccgggacatcagcaagaacaccctgtacctccagatgaacagcctgagagccgaggacaccgccgtgtactactgtgccaaagaaggcaccggcgctaacagcagcctggccgattatagaggccagggcacactggtcaccgtgtctagtggcggaggaagcggcggaggatctgaagtgcaactggtggaatctggagggggaagcgtgcaggcaggcggatctctgagactgtcctgcaccacatctggcagagccctgaatatgtacgtgatgggatggtttcggcaggctcccggcaacgagcgggaatttgtggccgctacaagcagcagcggcggcagcacaagctaccccgattctgtgaagggcagattcacaatctcccgcgataatgccaagaatactgtgtacctgcagatgaatagtctgaagcctgaagatacagccgcctacagatgtgccgccagcccctacgtgtccacccccaccatgaacatcctggaagagtacagatactggggcctgggaacacaagtgacagtgtccagcctcgaggacaaaactcacacatgcccaccgtgcccagcaggcagagccgattgcggctttaccagcgagagctaccagcagggcgtgctgagcgccaccatcctgtacgagatcctgctgggcaaggccaccctgtacgccgtgctggtgtctgccctggtgctgatggctatggtcaagcggaaggacagccggggaagggccaagcgatctggatctggagcaacaaacttctcactactcaaacaagcaggtgacgtggaggagaatcccgggcctactagtatggactggatttggcgcatccttttccttgtcggcgctgctaccggcgcgcattcccagctccagttgcaagagagcggccctggcttggtaaaaccttccgagacccttagcctcacatgcacggttagtgggggcagcatttcctcaggtgattactattggggatggattcggcaacccccgggtaaaggattggagtggattggtcatatttattatagtggagcgacgtactacaacccaagtctcaaatccagggttacaatatccgtcgatacgagcaggaaccaattcagcttgaaactttctagtgtcaccgcagcagacacagccgtctattactgtacgcgggatgactccagtaattggcggtcccgagggcaagggacactggtcacggtctcctcatctggaggcggtggaagcggtggaggaggatctcaggttcagctgcaagagtctggcggaggacttgctcaagctggcggaagcctgagactgtcttgtgccgcctctggcagaaccttcagcatgggctggtttagacaggcccctggcaaagagagagagttcgtcgccgccatcacatacagcggcggcagcccttactacgcctcttctgtcagaggccggttcaccatcagccgggacaacgccaagaacaccgtgtacctccagatgaacagcctgaagccagaggacaccgccgtgtactactgtgccgccaatccaacctacggcagcgactggaatgccgagaattggggccagggcacccaagtgacagtgtctagtacgcgtgataaaactcatacctgtccgccatgcccggcaatccccgaggacacattcttcccaagccccgagagcagctgcgacgtgaagctggtggaaaagagcttcgagacagacaccaacctgaacttccagaacctgagcgtgatcggcttcagaatcctgctgctgaaagtggccggctttaacctgctgatgaccctgcggctgtggtccagc

SEQ ID NO: 5712 - DNA, 2103 bp, Artificial Sequence
  Synthetic Polynucloetide
atggccttaccagtgaccgccttgctcctgccgctggccttgctgctccacgccgccaggccggaggttcagctgcttgagtctggcggaggactggttcaacctggcggaagcctgagactgtcttgtgccgccagcggcttcacctttagcagctacgccatgagctgggtccgacaggctcctggcaaaggactggaatgggtgtccagcatcagcggcagcggcgactacatctactacgccgatagcgtgaagggcagattcaccatcagccgggacatcagcaagaacaccctgtacctccagatgaacagcctgagagccgaggacaccgccgtgtactactgtgccaaagaaggcaccggcgctaacagcagcctggccgattatagaggccagggcacactggtcaccgtgtctagtggcggaggaagcggcggaggatctgaagtgcaactggtggaatctggagggggaagcgtgcaggcaggcggatctctgagactgtcctgcaccacatctggcagagccctgaatatgtacgtgatgggatggtttcggcaggctcccggcaacgagcgggaatttgtggccgctacaagcagcagcggcggcagcacaagctaccccgattctgtgaagggcagattcacaatctcccgcgataatgccaagaatactgtgtacctgcagatgaatagtctgaagcctgaagatacagccgcctacagatgtgccgccagcccctacgtgtccacccccaccatgaacatcctggaagagtacagatactggggcctgggaacacaagtgacagtgtccagcctcgagggatctggcagagccgattgcggctttaccagcgagagctaccagcagggcgtgctgagcgccaccatcctgtacgagatcctgctgggcaaggccaccctgtacgccgtgctggtgtctgccctggtgctgatggctatggtcaagcggaaggacagccggggaagggccaagcgatctggatctggagcaacaaacttctcactactcaaacaagcaggtgacgtggaggagaatcccgggcctactagtatggactggatttggcgcatccttttccttgtcggcgctgctaccggcgcgcattcccagctccagttgcaagagagcggccctggcttggtaaaaccttccgagacccttagcctcacatgcacggttagtgggggcagcatttcctcaggtgattactattggggatggattcggcaacccccgggtaaaggattggagtggattggtcatatttattatagtggagcgacgtactacaacccaagtctcaaatccagggttacaatatccgtcgatacgagcaggaaccaattcagcttgaaactttctagtgtcaccgcagcagacacagccgtctattactgtacgcgggatgactccagtaattggcggtcccgagggcaagggacactggtcacggtctcctcatctggaggcggtggaagcggtggaggaggatctcaggttcagctgcaagagtctggcggaggacttgctcaagctggcggaagcctgagactgtcttgtgccgcctctggcagaaccttcagcatgggctggtttagacaggcccctggcaaagagagagagttcgtcgccgccatcacatacagcggcggcagcccttactacgcctcttctgtcagaggccggttcaccatcagccgggacaacgccaagaacaccgtgtacctccagatgaacagcctgaagccagaggacaccgccgtgtactactgtgccgccaatccaacctacggcagcgactggaatgccgagaattggggccagggcacccaagtgacagtgtctagtacgcgtgataaaactcatacctgtccgccatgcccggcaatccccgaggacacattcttcccaagccccgagagcagctgcgacgtgaagctggtggaaaagagcttcgagacagacaccaacctgaacttccagaacctgagcgtgatcggcttcagaatcctgctgctgaaagtggccggctttaacctgctgatgaccctgcggctgtggtccagc

SEQ ID NO: 5713 - DNA, 3459 bp, Artificial Sequence
  Synthetic Polynucloetide
atggccttaccagtgaccgccttgctcctgccgctggccttgctgctccacgccgccaggccggaggttcagctgcttgagtctggcggaggactggttcaacctggcggaagcctgagactgtcttgtgccgccagcggcttcacctttagcagctacgccatgagctgggtccgacaggctcctggcaaaggactggaatgggtgtccagcatcagcggcagcggcgactacatctactacgccgatagcgtgaagggcagattcaccatcagccgggacatcagcaagaacaccctgtacctccagatgaacagcctgagagccgaggacaccgccgtgtactactgtgccaaagaaggcaccggcgctaacagcagcctggccgattatagaggccagggcacactggtcaccgtgtctagtggcggaggaagcggcggaggatctgaagtgcaactggtggaatctggagggggaagcgtgcaggcaggcggatctctgagactgtcctgcaccacatctggcagagccctgaatatgtacgtgatgggatggtttcggcaggctcccggcaacgagcgggaatttgtggccgctacaagcagcagcggcggcagcacaagctaccccgattctgtgaagggcagattcacaatctcccgcgataatgccaagaatactgtgtacctgcagatgaatagtctgaagcctgaagatacagccgcctacagatgtgccgccagcccctacgtgtccacccccaccatgaacatcctggaagagtacagatactggggcctgggaacacaagtgacagtgtccagcctcgagggacagcctaaggccaatcctaccgtgacactgttccctccaagcagcgaagaactccaggccaacaaggccacacttgtgtgcctgatctccgacttctaccctggggctgtgacagtggcttggaaggccgatggatctcctgtgaaagccggcgtggaaaccaccaagccatccaagcagagcaacaacaaatacgccgccagctcctacctgagcctgacacctgagcagtggaagtcccacagatcctacagctgccaagtgacccacgaaggcagcaccgtggaaaagacagtggcccctacagagtgcagccccatcaagaccgatgtgattacaatggaccccaaggacaactgctccaaggacgccaacgataccctgctgctccagctgaccaacaccagcgcctactacatgtacttgttgctgctgctgaagtccgtggtgtacttcgccatcatcacatgctgcctgctgcggagaaccgccttctgctgcaacggcgagaagtctagggccaagcgatctggatctggagcaacaaacttctcactactcaaacaagcaggtgacgtggaggagaatcccgggcctactagtatggactggatttggcgcatccttttccttgtcggcgctgctaccggcgcgcattcccagctccagttgcaagagagcggccctggcttggtaaaaccttccgagacccttagcctcacatgcacggttagtgggggcagcatttcctcaggtgattactattggggatggattcggcaacccccgggtaaaggattggagtggattggtcatatttattatagtggagcgacgtactacaacccaagtctcaaatccagggttacaatatccgtcgatacgagcaggaaccaattcagcttgaaactttctagtgtcaccgcagcagacacagccgtctattactgtacgcgggatgactccagtaattggcggtcccgagggcaagggacactggtcacggtctcctcatctggaggcggtggaagcggtggaggaggatctcaggttcagctgcaagagtctggcggaggacttgctcaagctggcggaagcctgagactgtcttgtgccgcctctggcagaaccttcagcatgggctggtttagacaggcccctggcaaagagagagagttcgtcgccgccatcacatacagcggcggcagcccttactacgcctcttctgtcagaggccggttcaccatcagccgggacaacgccaagaacaccgtgtacctccagatgaacagcctgaagccagaggacaccgccgtgtactactgtgccgccaatccaacctacggcagcgactggaatgccgagaattggggccagggcacccaagtgacagtgtctagtacgcgtgcctctacaaagggaccctccgtgtttcctctggctcccagcagcaagtctacaagcggaggaacagccgctctgggctgcctggtcaaggattactttcccgagcctgtgaccgtgtcctggaatagcggagcactgacaagcggcgtgcacacctttccagccgtgctgcaaagcagcggcctgtactctctgagcagcgtggtcacagtgcctagctctagcctgggcacccagacctacatctgcaatgtgaaccacaagcctagcaacaccaaggtggacaagagagtggaacccaagagctgtgaagtgaaaaccgactccaccgaccacgtgaagcccaaagagacagagaacaccaagcagcccagcaagagctgccacaagcccaaggccatcgtgcacaccgagaaagtgaacatgatgagcctgaccgtgctgggcctgcggatgctgttcgccaaaaccgtggccgtgaacttcctgctgaccgccaagctgttcttcctccgcgccaagagaagcggatctggcgtgaagcagaccctgaatttcgacctgctgaagctggctggcgacgtggaatccaacccaggcccttctagaggccatatgaccgagtacaagcccacggtgcgcctcgccacccgcgacgacgtccccagggccgtacgcaccctcgccgccgcgttcgccgactaccccgccacgcgccacaccgtcgatccggaccgccacatcgagcgggtcaccgagctgcaagaactcttcctcacgcgcgtcgggctcgacatcggcaaggtgtgggtcgcggacgacggcgccgcggtggcggtctggaccacgccggagagcgtcgaagcgggggcggtgttcgccgagatcggcccgcgcatggccgagttgagcggttcccggctggccgcgcagcaacagatggaaggcctcctggcgccgcaccggcccaaggagcccgcgtggttcctggccaccgtcggcgtctcgcccgaccaccagggcaagggtctgggcagcgccgtcgtgctccccggagtggaggcggccgagcgcgccggggtgcccgccttcctggagacctccgcgccccgcaacctccccttctacgagcggctcggcttcaccgtcaccgccgacgtcgaggtgcccgaaggaccgcgcacctggtgcatgacccgcaagcccggtgcctga

SEQ ID NO: 5714 - DNA, 2757 bp, Artificial Sequence
  Synthetic Polynucloetide
atggccttaccagtgaccgccttgctcctgccgctggccttgctgctccacgccgccaggccggaggttcagctgcttgagtctggcggaggactggttcaacctggcggaagcctgagactgtcttgtgccgccagcggcttcacctttagcagctacgccatgagctgggtccgacaggctcctggcaaaggactggaatgggtgtccagcatcagcggcagcggcgactacatctactacgccgatagcgtgaagggcagattcaccatcagccgggacatcagcaagaacaccctgtacctccagatgaacagcctgagagccgaggacaccgccgtgtactactgtgccaaagaaggcaccggcgctaacagcagcctggccgattatagaggccagggcacactggtcaccgtgtctagtggcggaggaagcggcggaggatctgaagtgcaactggtggaatctggagggggaagcgtgcaggcaggcggatctctgagactgtcctgcaccacatctggcagagccctgaatatgtacgtgatgggatggtttcggcaggctcccggcaacgagcgggaatttgtggccgctacaagcagcagcggcggcagcacaagctaccccgattctgtgaagggcagattcacaatctcccgcgataatgccaagaatactgtgtacctgcagatgaatagtctgaagcctgaagatacagccgcctacagatgtgccgccagcccctacgtgtccacccccaccatgaacatcctggaagagtacagatactggggcctgggaacacaagtgacagtgtccagcctcgagggacagcctaaggccaatcctaccgtgacactgttccctccaagcagcgaagaactccaggccaacaaggccacacttgtgtgcctgatctccgacttctaccctggggctgtgacagtggcttggaaggccgatggatctcctgtgaaagccggcgtggaaaccaccaagccatccaagcagagcaacaacaaatacgccgccagctcctacctgagcctgacacctgagcagtggaagtcccacagatcctacagctgccaagtgacccacgaaggcagcaccgtggaaaagacagtggcccctacagagtgcagccccatcaagaccgatgtgattacaatggaccccaaggacaactgctccaaggacgccaacgataccctgctgctccagctgaccaacaccagcgcctactacatgtacttgttgctgctgctgaagtccgtggtgtacttcgccatcatcacatgctgcctgctgcggagaaccgccttctgctgcaacggcgagaagtctagggccaagcgatctggatctggagcaacaaacttctcactactcaaacaagcaggtgacgtggaggagaatcccgggcctactagtatggactggatttggcgcatccttttccttgtcggcgctgctaccggcgcgcattcccagctccagttgcaagagagcggccctggcttggtaaaaccttccgagacccttagcctcacatgcacggttagtgggggcagcatttcctcaggtgattactattggggatggattcggcaacccccgggtaaaggattggagtggattggtcatatttattatagtggagcgacgtactacaacccaagtctcaaatccagggttacaatatccgtcgatacgagcaggaaccaattcagcttgaaactttctagtgtcaccgcagcagacacagccgtctattactgtacgcgggatgactccagtaattggcggtcccgagggcaagggacactggtcacggtctcctcatctggaggcggtggaagcggtggaggaggatctcaggttcagctgcaagagtctggcggaggacttgctcaagctggcggaagcctgagactgtcttgtgccgcctctggcagaaccttcagcatgggctggtttagacaggcccctggcaaagagagagagttcgtcgccgccatcacatacagcggcggcagcccttactacgcctcttctgtcagaggccggttcaccatcagccgggacaacgccaagaacaccgtgtacctccagatgaacagcctgaagccagaggacaccgccgtgtactactgtgccgccaatccaacctacggcagcgactggaatgccgagaattggggccagggcacccaagtgacagtgtctagtacgcgtgcctctacaaagggaccctccgtgtttcctctggctcccagcagcaagtctacaagcggaggaacagccgctctgggctgcctggtcaaggattactttcccgagcctgtgaccgtgtcctggaatagcggagcactgacaagcggcgtgcacacctttccagccgtgctgcaaagcagcggcctgtactctctgagcagcgtggtcacagtgcctagctctagcctgggcacccagacctacatctgcaatgtgaaccacaagcctagcaacaccaaggtggacaagagagtggaacccaagagctgtgaagtgaaaaccgactccaccgaccacgtgaagcccaaagagacagagaacaccaagcagcccagcaagagctgccacaagcccaaggccatcgtgcacaccgagaaagtgaacatgatgagcctgaccgtgctgggcctgcggatgctgttcgccaaaaccgtggccgtgaacttcctgctgaccgccaagctgttcttcctc

SEQ ID NO: 5715 - DNA, 2844 bp, Artificial Sequence
  Synthetic Polynucloetide
atggccttaccagtgaccgccttgctcctgccgctggccttgctgctccacgccgccaggccggaggttcagctgcttgagtctggcggaggactggttcaacctggcggaagcctgagactgtcttgtgccgccagcggcttcacctttagcagctacgccatgagctgggtccgacaggctcctggcaaaggactggaatgggtgtccagcatcagcggcagcggcgactacatctactacgccgatagcgtgaagggcagattcaccatcagccgggacatcagcaagaacaccctgtacctccagatgaacagcctgagagccgaggacaccgccgtgtactactgtgccaaagaaggcaccggcgctaacagcagcctggccgattatagaggccagggcacactggtcaccgtgtctagtggcggaggaagcggcggaggatctgaagtgcaactggtggaatctggagggggaagcgtgcaggcaggcggatctctgagactgtcctgcaccacatctggcagagccctgaatatgtacgtgatgggatggtttcggcaggctcccggcaacgagcgggaatttgtggccgctacaagcagcagcggcggcagcacaagctaccccgattctgtgaagggcagattcacaatctcccgcgataatgccaagaatactgtgtacctgcagatgaatagtctgaagcctgaagatacagccgcctacagatgtgccgccagcccctacgtgtccacccccaccatgaacatcctggaagagtacagatactggggcctgggaacacaagtgacagtgtccagcctcgagggatctcccatcaagaccgatgtgattacaatggaccccaaggacaactgctccaaggacgccaacgataccctgctgctccagctgaccaacaccagcgcctactacatgtacttgttgctgctgctgaagtccgtggtgtacttcgccatcatcacatgctgcctgctgcggagaaccgccttctgctgcaacggcgagaagtctagggccaagcgatctggatctggagcaacaaacttctcactactcaaacaagcaggtgacgtggaggagaatcccgggcctactagtatggactggatttggcgcatccttttccttgtcggcgctgctaccggcgcgcattcccagctccagttgcaagagagcggccctggcttggtaaaaccttccgagacccttagcctcacatgcacggttagtgggggcagcatttcctcaggtgattactattggggatggattcggcaacccccgggtaaaggattggagtggattggtcatatttattatagtggagcgacgtactacaacccaagtctcaaatccagggttacaatatccgtcgatacgagcaggaaccaattcagcttgaaactttctagtgtcaccgcagcagacacagccgtctattactgtacgcgggatgactccagtaattggcggtcccgagggcaagggacactggtcacggtctcctcatctggaggcggtggaagcggtggaggaggatctcaggttcagctgcaagagtctggcggaggacttgctcaagctggcggaagcctgagactgtcttgtgccgcctctggcagaaccttcagcatgggctggtttagacaggcccctggcaaagagagagagttcgtcgccgccatcacatacagcggcggcagcccttactacgcctcttctgtcagaggccggttcaccatcagccgggacaacgccaagaacaccgtgtacctccagatgaacagcctgaagccagaggacaccgccgtgtactactgtgccgccaatccaacctacggcagcgactggaatgccgagaattggggccagggcacccaagtgacagtgtctagtacgcgtggcagcgaagtgaaaaccgactccaccgaccacgtgaagcccaaagagacagagaacaccaagcagcccagcaagagctgccacaagcccaaggccatcgtgcacaccgagaaagtgaacatgatgagcctgaccgtgctgggcctgcggatgctgttcgccaaaaccgtggccgtgaacttcctgctgaccgccaagctgttcttcctccgcgccaagagaagcggatctggcgtgaagcagaccctgaatttcgacctgctgaagctggctggcgacgtggaatccaacccaggcccttctagaggccatatgaccgagtacaagcccacggtgcgcctcgccacccgcgacgacgtccccagggccgtacgcaccctcgccgccgcgttcgccgactaccccgccacgcgccacaccgtcgatccggaccgccacatcgagcgggtcaccgagctgcaagaactcttcctcacgcgcgtcgggctcgacatcggcaaggtgtgggtcgcggacgacggcgccgcggtggcggtctggaccacgccggagagcgtcgaagcgggggcggtgttcgccgagatcggcccgcgcatggccgagttgagcggttcccggctggccgcgcagcaacagatggaaggcctcctggcgccgcaccggcccaaggagcccgcgtggttcctggccaccgtcggcgtctcgcccgaccaccagggcaagggtctgggcagcgccgtcgtgctccccggagtggaggcggccgagcgcgccggggtgcccgccttcctggagacctccgcgccccgcaacctccccttctacgagcggctcggcttcaccgtcaccgccgacgtcgaggtgcccgaaggaccgcgcacctggtgcatgacccgcaagcccggtgcctga

SEQ ID NO: 5716 - DNA, 2142 bp, Artificial Sequence
  Synthetic Polynucloetide
atggccttaccagtgaccgccttgctcctgccgctggccttgctgctccacgccgccaggccggaggttcagctgcttgagtctggcggaggactggttcaacctggcggaagcctgagactgtcttgtgccgccagcggcttcacctttagcagctacgccatgagctgggtccgacaggctcctggcaaaggactggaatgggtgtccagcatcagcggcagcggcgactacatctactacgccgatagcgtgaagggcagattcaccatcagccgggacatcagcaagaacaccctgtacctccagatgaacagcctgagagccgaggacaccgccgtgtactactgtgccaaagaaggcaccggcgctaacagcagcctggccgattatagaggccagggcacactggtcaccgtgtctagtggcggaggaagcggcggaggatctgaagtgcaactggtggaatctggagggggaagcgtgcaggcaggcggatctctgagactgtcctgcaccacatctggcagagccctgaatatgtacgtgatgggatggtttcggcaggctcccggcaacgagcgggaatttgtggccgctacaagcagcagcggcggcagcacaagctaccccgattctgtgaagggcagattcacaatctcccgcgataatgccaagaatactgtgtacctgcagatgaatagtctgaagcctgaagatacagccgcctacagatgtgccgccagcccctacgtgtccacccccaccatgaacatcctggaagagtacagatactggggcctgggaacacaagtgacagtgtccagcctcgagggatctcccatcaagaccgatgtgattacaatggaccccaaggacaactgctccaaggacgccaacgataccctgctgctccagctgaccaacaccagcgcctactacatgtacttgttgctgctgctgaagtccgtggtgtacttcgccatcatcacatgctgcctgctgcggagaaccgccttctgctgcaacggcgagaagtctagggccaagcgatctggatctggagcaacaaacttctcactactcaaacaagcaggtgacgtggaggagaatcccgggcctactagtatggactggatttggcgcatccttttccttgtcggcgctgctaccggcgcgcattcccagctccagttgcaagagagcggccctggcttggtaaaaccttccgagacccttagcctcacatgcacggttagtgggggcagcatttcctcaggtgattactattggggatggattcggcaacccccgggtaaaggattggagtggattggtcatatttattatagtggagcgacgtactacaacccaagtctcaaatccagggttacaatatccgtcgatacgagcaggaaccaattcagcttgaaactttctagtgtcaccgcagcagacacagccgtctattactgtacgcgggatgactccagtaattggcggtcccgagggcaagggacactggtcacggtctcctcatctggaggcggtggaagcggtggaggaggatctcaggttcagctgcaagagtctggcggaggacttgctcaagctggcggaagcctgagactgtcttgtgccgcctctggcagaaccttcagcatgggctggtttagacaggcccctggcaaagagagagagttcgtcgccgccatcacatacagcggcggcagcccttactacgcctcttctgtcagaggccggttcaccatcagccgggacaacgccaagaacaccgtgtacctccagatgaacagcctgaagccagaggacaccgccgtgtactactgtgccgccaatccaacctacggcagcgactggaatgccgagaattggggccagggcacccaagtgacagtgtctagtacgcgtggcagcgaagtgaaaaccgactccaccgaccacgtgaagcccaaagagacagagaacaccaagcagcccagcaagagctgccacaagcccaaggccatcgtgcacaccgagaaagtgaacatgatgagcctgaccgtgctgggcctgcggatgctgttcgccaaaaccgtggccgtgaacttcctgctgaccgccaagctgttcttcctc

SEQ ID NO: 5717 - DNA, 2196 bp, Artificial Sequence
  Synthetic Polynucloetide
atggccttaccagtgaccgccttgctcctgccgctggccttgctgctccacgccgccaggccggaggttcagctgcttgagtctggcggaggactggttcaacctggcggaagcctgagactgtcttgtgccgccagcggcttcacctttagcagctacgccatgagctgggtccgacaggctcctggcaaaggactggaatgggtgtccagcatcagcggcagcggcgactacatctactacgccgatagcgtgaagggcagattcaccatcagccgggacatcagcaagaacaccctgtacctccagatgaacagcctgagagccgaggacaccgccgtgtactactgtgccaaagaaggcaccggcgctaacagcagcctggccgattatagaggccagggcacactggtcaccgtgtctagtggcggaggaagcggcggaggatctgaagtgcaactggtggaatctggagggggaagcgtgcaggcaggcggatctctgagactgtcctgcaccacatctggcagagccctgaatatgtacgtgatgggatggtttcggcaggctcccggcaacgagcgggaatttgtggccgctacaagcagcagcggcggcagcacaagctaccccgattctgtgaagggcagattcacaatctcccgcgataatgccaagaatactgtgtacctgcagatgaatagtctgaagcctgaagatacagccgcctacagatgtgccgccagcccctacgtgtccacccccaccatgaacatcctggaagagtacagatactggggcctgggaacacaagtgacagtgtccagcctcgaggacaaaactcacacatgcccaccgtgcccagcacccatcaagaccgatgtgattacaatggaccccaaggacaactgctccaaggacgccaacgataccctgctgctccagctgaccaacaccagcgcctactacatgtacttgttgctgctgctgaagtccgtggtgtacttcgccatcatcacatgctgcctgctgcggagaaccgccttctgctgcaacggcgagaagtctagggccaagcgatctggatctggagcaacaaacttctcactactcaaacaagcaggtgacgtggaggagaatcccgggcctactagtatggactggatttggcgcatccttttccttgtcggcgctgctaccggcgcgcattcccagctccagttgcaagagagcggccctggcttggtaaaaccttccgagacccttagcctcacatgcacggttagtgggggcagcatttcctcaggtgattactattggggatggattcggcaacccccgggtaaaggattggagtggattggtcatatttattatagtggagcgacgtactacaacccaagtctcaaatccagggttacaatatccgtcgatacgagcaggaaccaattcagcttgaaactttctagtgtcaccgcagcagacacagccgtctattactgtacgcgggatgactccagtaattggcggtcccgagggcaagggacactggtcacggtctcctcatctggaggcggtggaagcggtggaggaggatctcaggttcagctgcaagagtctggcggaggacttgctcaagctggcggaagcctgagactgtcttgtgccgcctctggcagaaccttcagcatgggctggtttagacaggcccctggcaaagagagagagttcgtcgccgccatcacatacagcggcggcagcccttactacgcctcttctgtcagaggccggttcaccatcagccgggacaacgccaagaacaccgtgtacctccagatgaacagcctgaagccagaggacaccgccgtgtactactgtgccgccaatccaacctacggcagcgactggaatgccgagaattggggccagggcacccaagtgacagtgtctagtacgcgtgataaaactcatacctgtccgccatgcccggcagaagtgaaaaccgactccaccgaccacgtgaagcccaaagagacagagaacaccaagcagcccagcaagagctgccacaagcccaaggccatcgtgcacaccgagaaagtgaacatgatgagcctgaccgtgctgggcctgcggatgctgttcgccaaaaccgtggccgtgaacttcctgctgaccgccaagctgttcttcctc

SEQ ID NO: 5718 - DNA, 1293 bp, Artificial Sequence; identical to SEQ ID NO: 5222
  Synthetic Polynucloetide

SEQ ID NO: 5719 - DNA, 1317 bp, Artificial Sequence; identical to SEQ ID NO: 5223
  Synthetic Polynucloetide

SEQ ID NO: 5720 - DNA, 1920 bp, Artificial Sequence
  Synthetic Polynucloetide
atggccttaccagtgaccgccttgctcctgccgctggccttgctgctccacgccgccaggccggaagtgcaactggtggaatctggaggctctctggtgcagccagggggaagcctgagactgtcttgtgccgcttccggcttcaccttcgacgactacgccatgagctgggtgcgccaggtgccaggcaaaggcctggaatgggtgtccagcatcaactggagcggcacccacaccgattacgccgactccgtgaaaggcagattcacaatcagcagaaacaacgccaacaataccctgtacctgcagatgaactccctgaagtctgaggatacagcagtgtattattgcgccaagaactggcgggacgccggcaccacttggtttgagaaaagcggctctgccggacagggaacccaagtgacagtgtcctccggtaccggcggaggcggatctggcggcggaggtagcggtggcggaggatctgaattcgacatccagatgacacagagccctagcagcctgtctgccagcgtgggagacagagtgaccatcacatgcaaggccagcgaccacatcaacaactggctggcctggtatcagcagaagcctggacaggcccctaagctgctgatctacggcgctaccacactggaaacaggcgtgcccagcagattttctggcagcggctctggcaccgactacaccctgacaatatccagcctccagcctgaggacttcgccacctactactgtcagcagagctggaacaccccttggacattcggccagggcaccaagctggaaatcaagagaggcggaggcggaagtggaggcggaggatctggcggcggaggctctcaagttcagcttcaacagcctggcgctgagctggtcaaacctggcgcttctgtgaagatgagctgcaaagccagcggctacgccttcagcagctactggatcaactggatgaagcagaaacccggccagggactcgaatggatcggccaaatctatcccggcgacggcgacaccaactacaacggcaagttcaagggcagagccacactgaccgccgatacctctagcagcacagcctacatgcagctgagcagcctgaccagcgaagatagcgccgtgtacttctgtgcccggtccatcacaacagtcgtgggctgcgctatggactattggggccagggaacaagcgtgaccgtgtctagtacgcgtgagcagaaactgatctcggaagaggatctgaaaattgaagttatgtatcctcctccttacctagacaatgagaagagcaatggaaccattatccatgtgaaagggaaacacctttgtccaagtcccctatttcccggaccttctaagcccttttgggtgctggtggtggttgggggagtcctggcttgctatagcttgctagtaacagtggcctttattattttctgggtgaggagtaagaggagcaggctcctgcacagtgactacatgaacatgactccacgccgccccggacccacccgcaagcattaccagccctatgccccaccacgcgacttcgcagcctatcgctccagagtgaagttcagcaggagcgcagacgcccccgcgtaccagcagggccagaaccagctctataacgagctcaatctaggacgaagagaggagtacgatgttttggacaagagacgtggccgggaccctgagatggggggaaagccgagaaggaagaaccctcaggaaggcctgtacaatgaactgcagaaagataagatggcggaggcctacagtgagattgggatgaaaggcgagcgccggaggggcaaggggcacgatggcctttaccagggtctcagtacagccaccaaggacacctacgacgcccttcacatgcaggccctgccccctcgc

SEQ ID NO: 5721 - DNA, 1941 bp, Artificial Sequence
  Synthetic Polynucloetide
atggccttaccagtgaccgccttgctcctgccgctggccttgctgctccacgccgccaggccggaagtgcaactggtggaatctggaggctctctggtgcagccagggggaagcctgagactgtcttgtgccgcttccggcttcaccttcgacgactacgccatgagctgggtgcgccaggtgccaggcaaaggcctggaatgggtgtccagcatcaactggagcggcacccacaccgattacgccgactccgtgaaaggcagattcacaatcagcagaaacaacgccaacaataccctgtacctgcagatgaactccctgaagtctgaggatacagcagtgtattattgcgccaagaactggcgggacgccggcaccacttggtttgagaaaagcggctctgccggacagggaacccaagtgacagtgtcctccggtaccggcggaggcggatctggcggcggaggtagcggtggcggaggatctgaattcgacatccagatgacacagagccctagcagcctgtctgccagcgtgggagacagagtgaccatcacatgcaaggccagcgaccacatcaacaactggctggcctggtatcagcagaagcctggacaggcccctaagctgctgatctacggcgctaccacactggaaacaggcgtgcccagcagattttctggcagcggctctggcaccgactacaccctgacaatatccagcctccagcctgaggacttcgccacctactactgtcagcagagctggaacaccccttggacattcggccagggcaccaagctggaaatcaagagaggcggaggcggaagtggaggcggaggatctggcggcggaggctctcaagttcagcttcaacagcctggcgctgagctggtcaaacctggcgcttctgtgaagatgagctgcaaagccagcggctacgccttcagcagctactggatcaactggatgaagcagaaacccggccagggactcgaatggatcggccaaatctatcccggcgacggcgacaccaactacaacggcaagttcaagggcagagccacactgaccgccgatacctctagcagcacagcctacatgcagctgagcagcctgaccagcgaagatagcgccgtgtacttctgtgcccggtccatcacaacagtcgtgggctgcgctatggactattggggccagggaacaagcgtgaccgtgtctagtacgcgtgagcagaaactgatctcggaagaggatctggcgaagcccaccacgacgccagcgccgcgaccaccaacaccggcgcccaccatcgcgtcgcagcccctgtccctgcgcccagaggcgtgccggccagcggcggggggcgcagtgcacacgagggggctggacttcgcctgtgacatctacatctgggcgcccttggccgggacttgtggggtccttctcctgtcactggttatcaccctttactgcaaacggggcagaaagaaactcctgtatatattcaaacaaccatttatgagaccagtacaaactactcaagaggaagatggctgtagctgccgatttccagaagaagaagaaggaggatgtgaactgagagtgaagttcagcaggagcgcagacgcccccgcgtaccagcagggccagaaccagctctataacgagctgaatctaggacgaagagaggagtacgatgttttggacaagagacgtggccgggaccctgagatggggggaaagccgagaaggaagaaccctcaggaaggcctgtacaatgaactgcagaaagataagatggcggaggcctacagtgagattgggatgaaaggcgagcgccggaggggcaaggggcacgatggcctttaccagggtctcagtacagccaccaaggacacctacgacgcccttcacatgcaggccctgccccctcgctga

SEQ ID NO: 5722 - DNA, 3180 bp, Artificial Sequence
  Synthetic Polynucloetide
atggccttaccagtgaccgccttgctcctgccgctggccttgctgctccacgccgccaggccggaagtgcaactggtggaatctggaggctctctggtgcagccagggggaagcctgagactgtcttgtgccgcttccggcttcaccttcgacgactacgccatgagctgggtgcgccaggtgccaggcaaaggcctggaatgggtgtccagcatcaactggagcggcacccacaccgattacgccgactccgtgaaaggcagattcacaatcagcagaaacaacgccaacaataccctgtacctgcagatgaactccctgaagtctgaggatacagcagtgtattattgcgccaagaactggcgggacgccggcaccacttggtttgagaaaagcggctctgccggacagggaacccaagtgacagtgtcctccggtaccggcggaggcggatctggcggcggaggtagcggtggcggaggatctgaattcgacatccagatgacacagagccctagcagcctgtctgccagcgtgggagacagagtgaccatcacatgcaaggccagcgaccacatcaacaactggctggcctggtatcagcagaagcctggacaggcccctaagctgctgatctacggcgctaccacactggaaacaggcgtgcccagcagattttctggcagcggctctggcaccgactacaccctgacaatatccagcctccagcctgaggacttcgccacctactactgtcagcagagctggaacaccccttggacattcggccagggcaccaagctggaaatcaagagaggcggaggcggaagtggaggcggaggatctggcggcggaggctctcaagttcagcttcaacagcctggcgctgagctggtcaaacctggcgcttctgtgaagatgagctgcaaagccagcggctacgccttcagcagctactggatcaactggatgaagcagaaacccggccagggactcgaatggatcggccaaatctatcccggcgacggcgacaccaactacaacggcaagttcaagggcagagccacactgaccgccgatacctctagcagcacagcctacatgcagctgagcagcctgaccagcgaagatagcgccgtgtacttctgtgcccggtccatcacaacagtcgtgggctgcgctatggactattggggccagggaacaagcgtgaccgtgtctagtacgcgtgagcagaaactgatctcggaagaggatctggcgaagcccaccacgacgccagcgccgcgaccaccaacaccggcgcccaccatcgcgtcgcagcccctgtccctgcgcccagaggcgtgccggccagcggcggggggcgcagtgcacacgagggggctggacttcgcctgtgacatctacatctgggcgcccttggccgggacttgtggggtccttctcctgtcactggttatcaccctttactgcgggcgcgccagagtgaagttcagcaggagcgcagacgcccccgcgtaccagcagggccagaaccagctctataacgagctgaatctaggacgaagagaggagtacgatgttttggacaagagacgtggccgggaccctgagatggggggaaagccgagaaggaagaaccctcaggaaggcctgtacaatgaactgcagaaagataagatggcggaggcctacagtgagattgggatgaaaggcgagcgccggaggggcaaggggcacgatggcctttaccagggtctcagtacagccaccaaggacacctacgacgcccttcacatgcaggccctgccccctcgctctagaggatctggagcaacaaacttctcactactcaaacaagcaggtgacgtggaggagaatcccgggcctgggatccacatggccacttacgaggttctctgtgaggtggcgcggaaactgggcacggatgacagggaagtggtattgttcctcctaaacgtgttcatacctcaacccacactggcccaattaattggagctcttagagctttaaaggaggagggcaggttaacgtttcccctgttagcggaatgtctgtttcgtgcaggtcgcagagacctcttgcgcgacctgcttcacttagacccgcgttttttagagcgccacctagcgggcacaatgagttatttcagcccttatcagctcactgttctccacgtagacggggagctgtgtgcgagggatattaggtctttgatatttttaagcaaggacactatagggtctcgcagcacaccacagacattcttacactgggtgtactgtatggaaaacttagacctactgggtcccactgacgtggatgccctaatgtcaatgcttagatctttgtcaagagtagacctacagcgccaagtgcaaaccctaatgggccttcacctttccggcccatcacactcccaacactatcgccatacaccactcgagaccgatttctacgactacaaggacgacgatgacaagactagtggctccggcgagggcagaggaagtctactaacctgcggagatgtggaagaaaatcctggcccacatatgaccgagtacaagcccacggtgcgcctcgccacccgcgacgacgtccccagggccgtacgcaccctcgccgccgcgttcgccgactaccccgccacgcgccacaccgtcgatccggaccgccacatcgagcgggtcaccgagctgcaagaactcttcctcacgcgcgtcgggctcgacatcggcaaggtgtgggtcgcggacgacggcgccgcggtggcggtctggaccacgccggagagcgtcgaagcgggggcggtgttcgccgagatcggcccgcgcatggccgagttgagcggttcccggctggccgcgcagcaacagatggaaggcctcctggcgccgcaccggcccaaggagcccgcgtggttcctggccaccgtcggcgtctcgcccgaccaccagggcaagggtctgggcagcgccgtcgtgctccccggagtggaggcggccgagcgcgccggggtgcccgccttcctggagacctccgcgccccgcaacctccccttctacgagcggctcggcttcaccgtcaccgccgacgtcgaggtgcccgaaggaccgcgcacctggtgcatgacccgcaagcccggtgcctga

SEQ ID NO: 5723 - DNA, 3000 bp, Artificial Sequence
  Synthetic Polynucloetide
atggccttaccagtgaccgccttgctcctgccgctggccttgctgctccacgccgccaggccggaagtgcaactggtggaatctggaggctctctggtgcagccagggggaagcctgagactgtcttgtgccgcttccggcttcaccttcgacgactacgccatgagctgggtgcgccaggtgccaggcaaaggcctggaatgggtgtccagcatcaactggagcggcacccacaccgattacgccgactccgtgaaaggcagattcacaatcagcagaaacaacgccaacaataccctgtacctgcagatgaactccctgaagtctgaggatacagcagtgtattattgcgccaagaactggcgggacgccggcaccacttggtttgagaaaagcggctctgccggacagggaacccaagtgacagtgtcctccggtaccggcggaggcggatctggcggcggaggtagcggtggcggaggatctgaattcgacatccagatgacacagagccctagcagcctgtctgccagcgtgggagacagagtgaccatcacatgcaaggccagcgaccacatcaacaactggctggcctggtatcagcagaagcctggacaggcccctaagctgctgatctacggcgctaccacactggaaacaggcgtgcccagcagattttctggcagcggctctggcaccgactacaccctgacaatatccagcctccagcctgaggacttcgccacctactactgtcagcagagctggaacaccccttggacattcggccagggcaccaagctggaaatcaagagactcgagatccagaaccctgatcctgccgtgtaccagctgcgggatagcaagagcagcgacaagagcgtgtgtctgttcaccgacttcgacagccagaccaacgtgtcccagagcaaggactccgacgtgtacatcaccgataagtgcgtgctggacatgcggagcatggacttcaagagcaactccgccgtggcctggtccaacaagtccgatttcgcctgcgccaacgccttcaacaacagcattatccccgaggacacattcttcccaagcagcgacgtgccctgcgacgtgaagctggtggaaaagagcttcgagacagacaccaacctgaacttccagaacctgagcgtgatcggcttcagaatcctgctgctgaaagtggccggctttaacctgctgatgaccctgcggctgtggtccagccgcgccaagagaagcggatctggcgtgaagcagaccctgaatttcgacctgctgaagctggctggcgacgtggaatccaacccaggccctactagtatggactggatttggcgcatccttttccttgtcggcgctgctaccggcgcgcattccttcgaacaagttcagcttcaacagcctggcgctgagctggtcaaacctggcgcttctgtgaagatgagctgcaaagccagcggctacgccttcagcagctactggatcaactggatgaagcagaaacccggccagggactcgaatggatcggccaaatctatcccggcgacggcgacaccaactacaacggcaagttcaagggcagagccacactgaccgccgatacctctagcagcacagcctacatgcagctgagcagcctgaccagcgaagatagcgccgtgtacttctgtgcccggtccatcacaacagtcgtgggctgcgctatggactattggggccagggaacaagcgtgaccgtgtctagtacgcgtgaggacctgaagaacgtgttcccacctgaggtggccgtgttcgagcctagcaaggccgagatcgcccacacccagaaagccaccctcgtgtgcctggctaccggcttctaccccgaccatgtggaactgtcttggtgggtcaacggcaaagaggtgcacagcggcgtgtgtaccgacccccagccactgaaagaacagcccgccctgaacgacagccggtactgcctgagcagcagactgagagtgtccgccaccttctggcagaacccccggaaccacttcagatgccaggtgcagttctacggcctgagcgagaacgacgagtggacccaggacagagccaagcccgtgacccagatcgtgtctgccgaagcctggggcagagccgattgcggcatcaccagcgccagctaccaccagggcgtgctgagcgccaccatcctgtacgagatcctgctgggcaaggccaccctgtacgccgtgctggtgtctgccctggtgctgatggctatggtcaagcggaaggacagccggggaagggccaagcgatctggatctggagcaacaaacttctcactactcaaacaagcaggtgacgtggaggagaatcccgggccttctagaggccatatgaccgagtacaagcccacggtgcgcctcgccacccgcgacgacgtccccagggccgtacgcaccctcgccgccgcgttcgccgactaccccgccacgcgccacaccgtcgatccggaccgccacatcgagcgggtcaccgagctgcaagaactcttcctcacgcgcgtcgggctcgacatcggcaaggtgtgggtcgcggacgacggcgccgcggtggcggtctggaccacgccggagagcgtcgaagcgggggcggtgttcgccgagatcggcccgcgcatggccgagttgagcggttcccggctggccgcgcagcaacagatggaaggcctcctggcgccgcaccggcccaaggagcccgcgtggttcctggccaccgtcggcgtctcgcccgaccaccagggcaagggtctgggcagcgccgtcgtgctccccggagtggaggcggccgagcgcgccggggtgcccgccttcctggagacctccgcgccccgcaacctccccttctacgagcggctcggcttcaccgtcaccgccgacgtcgaggtgcccgaaggaccgcgcacctggtgcatgacccgcaagcccggtgcctga

SEQ ID NO: 5724 - DNA, 2997 bp, Artificial Sequence
  Synthetic Polynucloetide
atggccttaccagtgaccgccttgctcctgccgctggccttgctgctccacgccgccaggccggaagtgcaactggtggaatctggaggctctctggtgcagccagggggaagcctgagactgtcttgtgccgcttccggcttcaccttcgacgactacgccatgagctgggtgcgccaggtgccaggcaaaggcctggaatgggtgtccagcatcaactggagcggcacccacaccgattacgccgactccgtgaaaggcagattcacaatcagcagaaacaacgccaacaataccctgtacctgcagatgaactccctgaagtctgaggatacagcagtgtattattgcgccaagaactggcgggacgccggcaccacttggtttgagaaaagcggctctgccggacagggaacccaagtgacagtgtcctccggtaccggcggaggcggatctggcggcggaggtagcggtggcggaggatctgaattcgacatccagatgacacagagccctagcagcctgtctgccagcgtgggagacagagtgaccatcacatgcaaggccagcgaccacatcaacaactggctggcctggtatcagcagaagcctggacaggcccctaagctgctgatctacggcgctaccacactggaaacaggcgtgcccagcagattttctggcagcggctctggcaccgactacaccctgacaatatccagcctccagcctgaggacttcgccacctactactgtcagcagagctggaacaccccttggacattcggccagggcaccaagctggaaatcaagagactcgaggacctgaagaacgtgttcccacctgaggtggccgtgttcgagcctagcaaggccgagatcgcccacacccagaaagccaccctcgtgtgcctggctaccggcttctaccccgaccatgtggaactgtcttggtgggtcaacggcaaagaggtgcacagcggcgtgtgtaccgacccccagccactgaaagaacagcccgccctgaacgacagccggtactgcctgagcagcagactgagagtgtccgccaccttctggcagaacccccggaaccacttcagatgccaggtgcagttctacggcctgagcgagaacgacgagtggacccaggacagagccaagcccgtgacccagatcgtgtctgccgaagcctggggcagagccgattgcggcatcaccagcgccagctaccaccagggcgtgctgagcgccaccatcctgtacgagatcctgctgggcaaggccaccctgtacgccgtgctggtgtctgccctggtgctgatggctatggtcaagcggaaggacagccggggaagggccaagcgatctggatctggagcaacaaacttctcactactcaaacaagcaggtgacgtggaggagaatcccgggcctactagtatggactggatttggcgcatccttttccttgtcggcgctgctaccggcgcgcattccttcgaacaagttcagcttcaacagcctggcgctgagctggtcaaacctggcgcttctgtgaagatgagctgcaaagccagcggctacgccttcagcagctactggatcaactggatgaagcagaaacccggccagggactcgaatggatcggccaaatctatcccggcgacggcgacaccaactacaacggcaagttcaagggcagagccacactgaccgccgatacctctagcagcacagcctacatgcagctgagcagcctgaccagcgaagatagcgccgtgtacttctgtgcccggtccatcacaacagtcgtgggctgcgctatggactattggggccagggaacaagcgtgaccgtgtctagtacgcgtatccagaaccctgatcctgccgtgtaccagctgcgggatagcaagagcagcgacaagagcgtgtgtctgttcaccgacttcgacagccagaccaacgtgtcccagagcaaggactccgacgtgtacatcaccgataagtgcgtgctggacatgcggagcatggacttcaagagcaactccgccgtggcctggtccaacaagtccgatttcgcctgcgccaacgccttcaacaacagcattatccccgaggacacattcttcccaagcagcgacgtgccctgcgacgtgaagctggtggaaaagagcttcgagacagacaccaacctgaacttccagaacctgagcgtgatcggcttcagaatcctgctgctgaaagtggccggctttaacctgctgatgaccctgcggctgtggtccagccgcgccaagagaagcggatctggcgtgaagcagaccctgaatttcgacctgctgaagctggctggcgacgtggaatccaacccaggcccttctagaggccatatgaccgagtacaagcccacggtgcgcctcgccacccgcgacgacgtccccagggccgtacgcaccctcgccgccgcgttcgccgactaccccgccacgcgccacaccgtcgatccggaccgccacatcgagcgggtcaccgagctgcaagaactcttcctcacgcgcgtcgggctcgacatcggcaaggtgtgggtcgcggacgacggcgccgcggtggcggtctggaccacgccggagagcgtcgaagcgggggcggtgttcgccgagatcggcccgcgcatggccgagttgagcggttcccggctggccgcgcagcaacagatggaaggcctcctggcgccgcaccggcccaaggagcccgcgtggttcctggccaccgtcggcgtctcgcccgaccaccagggcaagggtctgggcagcgccgtcgtgctccccggagtggaggcggccgagcgcgccggggtgcccgccttcctggagacctccgcgccccgcaacctccccttctacgagcggctcggcttcaccgtcaccgccgacgtcgaggtgcccgaaggaccgcgcacctggtgcatgacccgcaagcccggtgcctga

SEQ ID NO: 5725 - DNA, 2295 bp, Artificial Sequence
  Synthetic Polynucloetide
atggccttaccagtgaccgccttgctcctgccgctggccttgctgctccacgccgccaggccggaagtgcaactggtggaatctggaggctctctggtgcagccagggggaagcctgagactgtcttgtgccgcttccggcttcaccttcgacgactacgccatgagctgggtgcgccaggtgccaggcaaaggcctggaatgggtgtccagcatcaactggagcggcacccacaccgattacgccgactccgtgaaaggcagattcacaatcagcagaaacaacgccaacaataccctgtacctgcagatgaactccctgaagtctgaggatacagcagtgtattattgcgccaagaactggcgggacgccggcaccacttggtttgagaaaagcggctctgccggacagggaacccaagtgacagtgtcctccggtaccggcggaggcggatctggcggcggaggtagcggtggcggaggatctgaattcgacatccagatgacacagagccctagcagcctgtctgccagcgtgggagacagagtgaccatcacatgcaaggccagcgaccacatcaacaactggctggcctggtatcagcagaagcctggacaggcccctaagctgctgatctacggcgctaccacactggaaacaggcgtgcccagcagattttctggcagcggctctggcaccgactacaccctgacaatatccagcctccagcctgaggacttcgccacctactactgtcagcagagctggaacaccccttggacattcggccagggcaccaagctggaaatcaagagactcgaggacctgaagaacgtgttcccacctgaggtggccgtgttcgagcctagcgaggccgagatcagccacacccagaaagccaccctcgtgtgcctggctaccggcttctaccccgaccatgtggaactgtcttggtgggtcaacggcaaagaggtgcacagcggcgtgtgtaccgacccccagccactgaaagaacagcccgccctgaacgacagccggtactgcctgagcagcagactgagagtgtccgccaccttctggcagaacccccggaaccacttcagatgccaggtgcagttctacggcctgagcgagaacgacgagtggacccaggacagagccaagcccgtgacccagatcgtgtctgccgaagcctggggcagagccgattgcggctttaccagcgagagctaccagcagggcgtgctgagcgccaccatcctgtacgagatcctgctgggcaaggccaccctgtacgccgtgctggtgtctgccctggtgctgatggctatggtcaagcggaaggacagccggggaagggccaagcgatctggatctggagcaacaaacttctcactactcaaacaagcaggtgacgtggaggagaatcccgggcctactagtatggactggatttggcgcatccttttccttgtcggcgctgctaccggcgcgcattccttcgaacaagttcagcttcaacagcctggcgctgagctggtcaaacctggcgcttctgtgaagatgagctgcaaagccagcggctacgccttcagcagctactggatcaactggatgaagcagaaacccggccagggactcgaatggatcggccaaatctatcccggcgacggcgacaccaactacaacggcaagttcaagggcagagccacactgaccgccgatacctctagcagcacagcctacatgcagctgagcagcctgaccagcgaagatagcgccgtgtacttctgtgcccggtccatcacaacagtcgtgggctgcgctatggactattggggccagggaacaagcgtgaccgtgtctagtacgcgtatccagaaccctgatcctgccgtgtaccagctgcgggatagcaagagcagcgacaagagcgtgtgtctgttcaccgacttcgacagccagaccaacgtgtcccagagcaaggactccgacgtgtacatcaccgataagtgcgtgctggacatgcggagcatggacttcaagagcaactccgccgtggcctggtccaacaagtccgatttcgcctgcgccaacgccttcaacaacagcattatccccgaggacacattcttcccaagccccgagagcagctgcgacgtgaagctggtggaaaagagcttcgagacagacaccaacctgaacttccagaacctgagcgtgatcggcttcagaatcctgctgctgaaagtggccggctttaacctgctgatgaccctgcggctgtggtccagc

SEQ ID NO: 5726 - DNA, 2970 bp, Artificial Sequence
  Synthetic Polynucloetide
atggccttaccagtgaccgccttgctcctgccgctggccttgctgctccacgccgccaggccggaagtgcaactggtggaatctggaggctctctggtgcagccagggggaagcctgagactgtcttgtgccgcttccggcttcaccttcgacgactacgccatgagctgggtgcgccaggtgccaggcaaaggcctggaatgggtgtccagcatcaactggagcggcacccacaccgattacgccgactccgtgaaaggcagattcacaatcagcagaaacaacgccaacaataccctgtacctgcagatgaactccctgaagtctgaggatacagcagtgtattattgcgccaagaactggcgggacgccggcaccacttggtttgagaaaagcggctctgccggacagggaacccaagtgacagtgtcctccggtaccggcggaggcggatctggcggcggaggtagcggtggcggaggatctgaattcgacatccagatgacacagagccctagcagcctgtctgccagcgtgggagacagagtgaccatcacatgcaaggccagcgaccacatcaacaactggctggcctggtatcagcagaagcctggacaggcccctaagctgctgatctacggcgctaccacactggaaacaggcgtgcccagcagattttctggcagcggctctggcaccgactacaccctgacaatatccagcctccagcctgaggacttcgccacctactactgtcagcagagctggaacaccccttggacattcggccagggcaccaagctggaaatcaagagactcgaggacctgaagaacgtgttcccacctgaggtggccgtgttcgagcctagcgaggccgagatcagccacacccagaaagccaccctcgtgtgcctggctaccggcttctaccccgaccatgtggaactgtcttggtgggtcaacggcaaagaggtgcacagcggcgtgtgtaccgacccccagccactgaaagaacagcccgccctgaacgacagccggtactgcctgagcagcagactgagagtgtccgccaccttctggcagaacccccggaaccacttcagatgccaggtgcagttctacggcctgagcgagaacgacgagtggacccaggacagagccaagcccgtgacccagatcgtgtctgccgaagcctggggcagagccgattgcggctttaccagcgagagctaccagcagggcgtgctgagcgccaccatcctgtacgagatcctgctgggcaaggccaccctgtacgccgtgctggtgtctgccctggtgctgatggctatggtcaagcggaaggacagccggggaagggccaagcgatctggatctggagcaacaaacttctcactactcaaacaagcaggtgacgtggaggagaatcccgggcctactagtatggactggatttggcgcatccttttccttgtcggcgctgctaccggcgcgcattccttcgaacaagttcagcttcaacagcctggcgctgagctggtcaaacctggcgcttctgtgaagatgagctgcaaagccagcggctacgccttcagcagctactggatcaactggatgaagcagaaacccggccagggactcgaatggatcggccaaatctatcccggcgacggcgacaccaactacaacggcaagttcaagggcagagccacactgaccgccgatacctctagcagcacagcctacatgcagctgagcagcctgaccagcgaagatagcgccgtgtacttctgtgcccggtccatcacaacagtcgtgggctgcgctatggactattggggccagggaacaagcgtgaccgtgtctagtacgcgtatccagaaccctgatcctgccgtgtaccagctgcgggatagcaagagcagcgacaagagcgtgtgtctgttcaccgacttcgacagccagaccaacgtgtcccagagcaaggactccgacgtgtacatcaccgataagtgcgtgctggacatgcggagcatggacttcaagagcaactccgccgtggcctggtccaacaagtccgatttcgcctgcgccaacgccttcaacaacagcattatccccgaggacacattcttcccaagccccgagagcagctgcgacgtgaagctggtggaaaagagcttcgagacagacaccaacctgaacttccagaacctgagcgtgatcggcttcagaatcctgctgctgaaagtggccggctttaacctgctgatgaccctgcggctgtggtccagccgcgccaagagaagcggatctggcgtgaagcagaccctgaatttcgacctgctgaagctggctggcgacgtggaatccaacccaggcccttctagaggcgggatccacaccatggctacctacgaggtgctgtgcgaggtggcaagaaagctgggcaccgacgacagagaagtggtgctgttcctgctgaacgtgttcatccctcagcctacactggcccagctgatcggtgcactgagagccctgaaagaggaaggccggctgacctttcctctgctggccgaatgcctgttcagagccggaagaagggatctgctgcgggacctgctgcatctggaccccagatttctggaaagacacctggccggcaccatgagctacttcagcccttaccagctgaccgtgctgcacgttgacggcgaactgtgcgccagagatattcggagcctgatcttcctgagcaaggacaccatcggcagccggtctacccctcagacatttctgcactgggtgtactgcatggaaaacctggacctgctcggccccacagatgtggatgccctgatgtccatgctgagaagcctgagcagagtggacctccagagacaggtgcagacactgatgggactgcacctgagcggacctagccacagccagcactacagacacacccct

SEQ ID NO: 5727 - DNA, 2307 bp, Artificial Sequence
  Synthetic Polynucloetide
atggccttaccagtgaccgccttgctcctgccgctggccttgctgctccacgccgccaggccggaagtgcaactggtggaatctggaggctctctggtgcagccagggggaagcctgagactgtcttgtgccgcttccggcttcaccttcgacgactacgccatgagctgggtgcgccaggtgccaggcaaaggcctggaatgggtgtccagcatcaactggagcggcacccacaccgattacgccgactccgtgaaaggcagattcacaatcagcagaaacaacgccaacaataccctgtacctgcagatgaactccctgaagtctgaggatacagcagtgtattattgcgccaagaactggcgggacgccggcaccacttggtttgagaaaagcggctctgccggacagggaacccaagtgacagtgtcctccggtaccggcggaggcggatctggcggcggaggtagcggtggcggaggatctgaattcgacatccagatgacacagagccctagcagcctgtctgccagcgtgggagacagagtgaccatcacatgcaaggccagcgaccacatcaacaactggctggcctggtatcagcagaagcctggacaggcccctaagctgctgatctacggcgctaccacactggaaacaggcgtgcccagcagattttctggcagcggctctggcaccgactacaccctgacaatatccagcctccagcctgaggacttcgccacctactactgtcagcagagctggaacaccccttggacattcggccagggcaccaagctggaaatcaagagactcgagatccagaaccctgatcctgccgtgtaccagctgcgggatagcaagagcagcgacaagagcgtgtgtctgttcaccgacttcgacagccagaccaacgtgtcccagagcaaggactccgacgtgtacatcaccgataagtgcgtgctggacatgcggagcatggacttcaagagcaactccgccgtggcctggtccaacaagtccgatttcgcctgcgccaacgccttcaacaacagcattatccccgaggacacattcttcccaagccccgagagcagctgcgacgtgaagctggtggaaaagagcttcgagacagacaccaacctgaacttccagaacctgagcgtgatcggcttcagaatcctgctgctgaaagtggccggctttaacctgctgatgaccctgcggctgtggtccagccgcgccaagagaagcggatctggcgtgaagcagaccctgaatttcgacctgctgaagctggctggcgacgtggaatccaacccaggccctactagtatggactggatttggcgcatccttttccttgtcggcgctgctaccggcgcgcattccttcgaacaagttcagcttcaacagcctggcgctgagctggtcaaacctggcgcttctgtgaagatgagctgcaaagccagcggctacgccttcagcagctactggatcaactggatgaagcagaaacccggccagggactcgaatggatcggccaaatctatcccggcgacggcgacaccaactacaacggcaagttcaagggcagagccacactgaccgccgatacctctagcagcacagcctacatgcagctgagcagcctgaccagcgaagatagcgccgtgtacttctgtgcccggtccatcacaacagtcgtgggctgcgctatggactattggggccagggaacaagcgtgaccgtgtctagtacgcgtgaggacctgaagaacgtgttcccacctgaggtggccgtgttcgagcctagcgaggccgagatcagccacacccagaaagccaccctcgtgtgcctggctaccggcttctaccccgaccatgtggaactgtcttggtgggtcaacggcaaagaggtgcacagcggcgtgtgtaccgacccccagccactgaaagaacagcccgccctgaacgacagccggtactgcctgagcagcagactgagagtgtccgccaccttctggcagaacccccggaaccacttcagatgccaggtgcagttctacggcctgagcgagaacgacgagtggacccaggacagagccaagcccgtgacccagatcgtgtctgccgaagcctggggcagagccgattgcggctttaccagcgagagctaccagcagggcgtgctgagcgccaccatcctgtacgagatcctgctgggcaaggccaccctgtacgccgtgctggtgtctgccctggtgctgatggctatggtcaagcggaaggacagccgggga

SEQ ID NO: 5728 - DNA, 2973 bp, Artificial Sequence
  Synthetic Polynucloetide
atggccttaccagtgaccgccttgctcctgccgctggccttgctgctccacgccgccaggccggaagtgcaactggtggaatctggaggctctctggtgcagccagggggaagcctgagactgtcttgtgccgcttccggcttcaccttcgacgactacgccatgagctgggtgcgccaggtgccaggcaaaggcctggaatgggtgtccagcatcaactggagcggcacccacaccgattacgccgactccgtgaaaggcagattcacaatcagcagaaacaacgccaacaataccctgtacctgcagatgaactccctgaagtctgaggatacagcagtgtattattgcgccaagaactggcgggacgccggcaccacttggtttgagaaaagcggctctgccggacagggaacccaagtgacagtgtcctccggtaccggcggaggcggatctggcggcggaggtagcggtggcggaggatctgaattcgacatccagatgacacagagccctagcagcctgtctgccagcgtgggagacagagtgaccatcacatgcaaggccagcgaccacatcaacaactggctggcctggtatcagcagaagcctggacaggcccctaagctgctgatctacggcgctaccacactggaaacaggcgtgcccagcagattttctggcagcggctctggcaccgactacaccctgacaatatccagcctccagcctgaggacttcgccacctactactgtcagcagagctggaacaccccttggacattcggccagggcaccaagctggaaatcaagagactcgagatccagaaccctgatcctgccgtgtaccagctgcgggatagcaagagcagcgacaagagcgtgtgtctgttcaccgacttcgacagccagaccaacgtgtcccagagcaaggactccgacgtgtacatcaccgataagtgcgtgctggacatgcggagcatggacttcaagagcaactccgccgtggcctggtccaacaagtccgatttcgcctgcgccaacgccttcaacaacagcattatccccgaggacacattcttcccaagccccgagagcagctgcgacgtgaagctggtggaaaagagcttcgagacagacaccaacctgaacttccagaacctgagcgtgatcggcttcagaatcctgctgctgaaagtggccggctttaacctgctgatgaccctgcggctgtggtccagccgcgccaagagaagcggatctggcgtgaagcagaccctgaatttcgacctgctgaagctggctggcgacgtggaatccaacccaggccctactagtatggactggatttggcgcatccttttccttgtcggcgctgctaccggcgcgcattccttcgaacaagttcagcttcaacagcctggcgctgagctggtcaaacctggcgcttctgtgaagatgagctgcaaagccagcggctacgccttcagcagctactggatcaactggatgaagcagaaacccggccagggactcgaatggatcggccaaatctatcccggcgacggcgacaccaactacaacggcaagttcaagggcagagccacactgaccgccgatacctctagcagcacagcctacatgcagctgagcagcctgaccagcgaagatagcgccgtgtacttctgtgcccggtccatcacaacagtcgtgggctgcgctatggactattggggccagggaacaagcgtgaccgtgtctagtacgcgtgaggacctgaagaacgtgttcccacctgaggtggccgtgttcgagcctagcgaggccgagatcagccacacccagaaagccaccctcgtgtgcctggctaccggcttctaccccgaccatgtggaactgtcttggtgggtcaacggcaaagaggtgcacagcggcgtgtgtaccgacccccagccactgaaagaacagcccgccctgaacgacagccggtactgcctgagcagcagactgagagtgtccgccaccttctggcagaacccccggaaccacttcagatgccaggtgcagttctacggcctgagcgagaacgacgagtggacccaggacagagccaagcccgtgacccagatcgtgtctgccgaagcctggggcagagccgattgcggctttaccagcgagagctaccagcagggcgtgctgagcgccaccatcctgtacgagatcctgctgggcaaggccaccctgtacgccgtgctggtgtctgccctggtgctgatggctatggtcaagcggaaggacagccggggaagggccaagcgatctggatctggagcaacaaacttctcactactcaaacaagcaggtgacgtggaggagaatcccgggccttctagaggcgggatccacaccatggctacctacgaggtgctgtgcgaggtggcaagaaagctgggcaccgacgacagagaagtggtgctgttcctgctgaacgtgttcatccctcagcctacactggcccagctgatcggtgcactgagagccctgaaagaggaaggccggctgacctttcctctgctggccgaatgcctgttcagagccggaagaagggatctgctgcgggacctgctgcatctggaccccagatttctggaaagacacctggccggcaccatgagctacttcagcccttaccagctgaccgtgctgcacgttgacggcgaactgtgcgccagagatattcggagcctgatcttcctgagcaaggacaccatcggcagccggtctacccctcagacatttctgcactgggtgtactgcatggaaaacctggacctgctcggccccacagatgtggatgccctgatgtccatgctgagaagcctgagcagagtggacctccagagacaggtgcagacactgatgggactgcacctgagcggacctagccacagccagcactacagacacacccct

SEQ ID NO: 5729 - DNA, 3132 bp, Artificial Sequence
  Synthetic Polynucloetide
atggccttaccagtgaccgccttgctcctgccgctggccttgctgctccacgccgccaggccgctcgaggggaaaccaattcccaaccctcttctgggactggattcaaccggcagcggcgaggacctgaagaacgtgttcccacctgaggtggccgtgttcgagcctagcaaggccgagatcgcccacacccagaaagccaccctcgtgtgcctggctaccggcttctaccccgaccatgtggaactgtcttggtgggtcaacggcaaagaggtgcacagcggcgtgtgtaccgacccccagccactgaaagaacagcccgccctgaacgacagccggtactgcctgagcagcagactgagagtgtccgccaccttctggcagaacccccggaaccacttcagatgccaggtgcagttctacggcctgagcgagaacgacgagtggacccaggacagagccaagcccgtgacccagatcgtgtctgccgaagcctggggcagagccgattgcggcatcaccagcgccagctaccaccagggcgtgctgagcgccaccatcctgtacgagatcctgctgggcaaggccaccctgtacgccgtgctggtgtctgccctggtgctgatggctatggtcaagcggaaggacagccggggaagggccaagcgatctggatctggagcaacaaacttctcactactcaaacaagcaggtgacgtggaggagaatcccgggcctactagcatggccttaccagtgaccgccttgctcctgccgctggccttgctgctccacgccgccaggccggaagtgcaactggtggaatctggaggctctctggtgcagccagggggaagcctgagactgtcttgtgccgcttccggcttcaccttcgacgactacgccatgagctgggtgcgccaggtgccaggcaaaggcctggaatgggtgtccagcatcaactggagcggcacccacaccgattacgccgactccgtgaaaggcagattcacaatcagcagaaacaacgccaacaataccctgtacctgcagatgaactccctgaagtctgaggatacagcagtgtattattgcgccaagaactggcgggacgccggcaccacttggtttgagaaaagcggctctgccggacagggaacccaagtgacagtgtcctccggtaccggcggaggcggatctggcggcggaggtagcggtggcggaggatctgaattcgacatccagatgacacagagccctagcagcctgtctgccagcgtgggagacagagtgaccatcacatgcaaggccagcgaccacatcaacaactggctggcctggtatcagcagaagcctggacaggcccctaagctgctgatctacggcgctaccacactggaaacaggcgtgcccagcagattttctggcagcggctctggcaccgactacaccctgacaatatccagcctccagcctgaggacttcgccacctactactgtcagcagagctggaacaccccttggacattcggccagggcaccaagctggaaatcaagagaggcggaggcggaagtggaggcggaggatctggcggcggaggctctcaagttcagcttcaacagcctggcgctgagctggtcaaacctggcgcttctgtgaagatgagctgcaaagccagcggctacgccttcagcagctactggatcaactggatgaagcagaaacccggccagggactcgaatggatcggccaaatctatcccggcgacggcgacaccaactacaacggcaagttcaagggcagagccacactgaccgccgatacctctagcagcacagcctacatgcagctgagcagcctgaccagcgaagatagcgccgtgtacttctgtgcccggtccatcacaacagtcgtgggctgcgctatggactattggggccagggaacaagcgtgaccgtgtctagtacgcgtgagcagaaactgatctcggaagaggatgggagcggcatccagaaccctgatcctgccgtgtaccagctgcgggatagcaagagcagcgacaagagcgtgtgtctgttcaccgacttcgacagccagaccaacgtgtcccagagcaaggactccgacgtgtacatcaccgataagtgcgtgctggacatgcggagcatggacttcaagagcaactccgccgtggcctggtccaacaagtccgatttcgcctgcgccaacgccttcaacaacagcattatccccgaggacacattcttcccaagcagcgacgtgccctgcgacgtgaagctggtggaaaagagcttcgagacagacaccaacctgaacttccagaacctgagcgtgatcggcttcagaatcctgctgctgaaagtggccggctttaacctgctgatgaccctgcggctgtggtccagccgcgccaagagaagcggatctggcgtgaagcagaccctgaatttcgacctgctgaagctggctggcgacgtggaatccaacccaggcccttctagaggccatatgaccgagtacaagcccacggtgcgcctcgccacccgcgacgacgtccccagggccgtacgcaccctcgccgccgcgttcgccgactaccccgccacgcgccacaccgtcgatccggaccgccacatcgagcgggtcaccgagctgcaagaactcttcctcacgcgcgtcgggctcgacatcggcaaggtgtgggtcgcggacgacggcgccgcggtggcggtctggaccacgccggagagcgtcgaagcgggggcggtgttcgccgagatcggcccgcgcatggccgagttgagcggttcccggctggccgcgcagcaacagatggaaggcctcctggcgccgcaccggcccaaggagcccgcgtggttcctggccaccgtcggcgtctcgcccgaccaccagggcaagggtctgggcagcgccgtcgtgctccccggagtggaggcggccgagcgcgccggggtgcccgccttcctggagacctccgcgccccgcaacctccccttctacgagcggctcggcttcaccgtcaccgccgacgtcgaggtgcccgaaggaccgcgcacctggtgcatgacccgcaagcccggtgcctga

SEQ ID NO: 5730 - DNA, 3135 bp, Artificial Sequence
  Synthetic Polynucloetide
atggccttaccagtgaccgccttgctcctgccgctggccttgctgctccacgccgccaggccgctcgagcagaaactgatctcggaagaggatctgggctccggcgatcgccctgatcctgccgtgtaccagctgcgggatagcaagagcagcgacaagagcgtgtgtctgttcaccgacttcgacagccagaccaacgtgtcccagagcaaggactccgacgtgtacatcaccgataagtgcgtgctggacatgcggagcatggacttcaagagcaactccgccgtggcctggtccaacaagtccgatttcgcctgcgccaacgccttcaacaacagcattatccccgaggacacattcttcccaagccccgagagcagctgcgacgtgaagctggtggaaaagagcttcgagacagacaccaacctgaacttccagaacctgagcgtgatcggcttcagaatcctgctgctgaaagtggccggctttaacctgctgatgaccctgcggctgtggtccagctctagtcgcgccaagagaagcggatctggcgtgaagcagaccctgaatttcgacctgctgaagctggctggcgacgtggaatccaacccaggccccactagcatggccttaccagtgaccgccttgctcctgccgctggccttgctgctccacgccgccaggccggaagtgcaactggtggaatctggaggctctctggtgcagccagggggaagcctgagactgtcttgtgccgcttccggcttcaccttcgacgactacgccatgagctgggtgcgccaggtgccaggcaaaggcctggaatgggtgtccagcatcaactggagcggcacccacaccgattacgccgactccgtgaaaggcagattcacaatcagcagaaacaacgccaacaataccctgtacctgcagatgaactccctgaagtctgaggatacagcagtgtattattgcgccaagaactggcgggacgccggcaccacttggtttgagaaaagcggctctgccggacagggaacccaagtgacagtgtcctccggtaccggcggaggcggatctggcggcggaggtagcggtggcggaggatctgaattcgacatccagatgacacagagccctagcagcctgtctgccagcgtgggagacagagtgaccatcacatgcaaggccagcgaccacatcaacaactggctggcctggtatcagcagaagcctggacaggcccctaagctgctgatctacggcgctaccacactggaaacaggcgtgcccagcagattttctggcagcggctctggcaccgactacaccctgacaatatccagcctccagcctgaggacttcgccacctactactgtcagcagagctggaacaccccttggacattcggccagggcaccaagctggaaatcaagagaggcggaggcggaagtggaggcggaggatctggcggcggaggctctcaagttcagcttcaacagcctggcgctgagctggtcaaacctggcgcttctgtgaagatgagctgcaaagccagcggctacgccttcagcagctactggatcaactggatgaagcagaaacccggccagggactcgaatggatcggccaaatctatcccggcgacggcgacaccaactacaacggcaagttcaagggcagagccacactgaccgccgatacctctagcagcacagcctacatgcagctgagcagcctgaccagcgaagatagcgccgtgtacttctgtgcccggtccatcacaacagtcgtgggctgcgctatggactattggggccagggaacaagcgtgaccgtgtctagtacgcgtgggaaaccaattcccaaccctcttctgggactggattcaaccggcagcggcgaggacctgaagaacgtgttcccacctgaggtggccgtgttcgagcctagcgaggccgagatcagccacacccagaaagccaccctcgtgtgcctggctaccggcttctaccccgaccatgtggaactgtcttggtgggtcaacggcaaagaggtgcacagcggcgtgtgtaccgacccccagccactgaaagaacagcccgccctgaacgacagccggtactgcctgagcagcagactgagagtgtccgccaccttctggcagaacccccggaaccacttcagatgccaggtgcagttctacggcctgagcgagaacgacgagtggacccaggacagagccaagcccgtgacccagatcgtgtctgccgaagcctggggcagagccgattgcggctttaccagcgagagctaccagcagggcgtgctgagcgccaccatcctgtacgagatcctgctgggcaaggccaccctgtacgccgtgctggtgtctgccctggtgctgatggctatggtcaagcggaaggacagccggggaagggccaagcgatctggatctggagcaacaaacttctcactactcaaacaagcaggtgacgtggaggagaatcccgggccttctagaggccatatgaccgagtacaagcccacggtgcgcctcgccacccgcgacgacgtccccagggccgtacgcaccctcgccgccgcgttcgccgactaccccgccacgcgccacaccgtcgatccggaccgccacatcgagcgggtcaccgagctgcaagaactcttcctcacgcgcgtcgggctcgacatcggcaaggtgtgggtcgcggacgacggcgccgcggtggcggtctggaccacgccggagagcgtcgaagcgggggcggtgttcgccgagatcggcccgcgcatggccgagttgagcggttcccggctggccgcgcagcaacagatggaaggcctcctggcgccgcaccggcccaaggagcccgcgtggttcctggccaccgtcggcgtctcgcccgaccaccagggcaagggtctgggcagcgccgtcgtgctccccggagtggaggcggccgagcgcgccggggtgcccgccttcctggagacctccgcgccccgcaacctccccttctacgagcggctcggcttcaccgtcaccgccgacgtcgaggtgcccgaaggaccgcgcacctggtgcatgacccgcaagcccggtgcctga

SEQ ID NO: 5731 - DNA, 2997 bp, Artificial Sequence
  Synthetic Polynucloetide
atggccttaccagtgaccgccttgctcctgccgctggccttgctgctccacgccgccaggccggaagtgcaactggtggaatctggaggctctctggtgcagccagggggaagcctgagactgtcttgtgccgcttccggcttcaccttcgacgactacgccatgagctgggtgcgccaggtgccaggcaaaggcctggaatgggtgtccagcatcaactggagcggcacccacaccgattacgccgactccgtgaaaggcagattcacaatcagcagaaacaacgccaacaataccctgtacctgcagatgaactccctgaagtctgaggatacagcagtgtattattgcgccaagaactggcgggacgccggcaccacttggtttgagaaaagcggctctgccggacagggaacccaagtgacagtgtcctccggtaccggcggaggcggatctggcggcggaggtagcggtggcggaggatctgaattcgacatccagatgacacagagccctagcagcctgtctgccagcgtgggagacagagtgaccatcacatgcaaggccagcgaccacatcaacaactggctggcctggtatcagcagaagcctggacaggcccctaagctgctgatctacggcgctaccacactggaaacaggcgtgcccagcagattttctggcagcggctctggcaccgactacaccctgacaatatccagcctccagcctgaggacttcgccacctactactgtcagcagagctggaacaccccttggacattcggccagggcaccaagctggaaatcaagagactcgaggacctgaagaacgtgttcccacctgaggtggccgtgttcgagcctagcgaggccgagatcagccacacccagaaagccaccctcgtgtgcctggctaccggcttctaccccgaccatgtggaactgtcttggtgggtcaacggcaaagaggtgcacagcggcgtgtctaccgacccccagccactgaaagaacagcccgccctgaacgacagccggtactgcctgagcagcagactgagagtgtccgccaccttctggcagaacccccggaaccacttcagatgccaggtgcagttctacggcctgagcgagaacgacgagtggacccaggacagagccaagcccgtgacccagatcgtgtctgccgaagcctggggcagagccgattgcggctttaccagcgagagctaccagcagggcgtgctgagcgccaccatcctgtacgagatcctgctgggcaaggccaccctgtacgccgtgctggtgtctgccctggtgctgatggctatggtcaagcggaaggacagccggggaagggccaagcgatctggatctggagcaacaaacttctcactactcaaacaagcaggtgacgtggaggagaatcccgggcctactagtatggactggatttggcgcatccttttccttgtcggcgctgctaccggcgcgcattccttcgaacaagttcagcttcaacagcctggcgctgagctggtcaaacctggcgcttctgtgaagatgagctgcaaagccagcggctacgccttcagcagctactggatcaactggatgaagcagaaacccggccagggactcgaatggatcggccaaatctatcccggcgacggcgacaccaactacaacggcaagttcaagggcagagccacactgaccgccgatacctctagcagcacagcctacatgcagctgagcagcctgaccagcgaagatagcgccgtgtacttctgtgcccggtccatcacaacagtcgtgggctgcgctatggactattggggccagggaacaagcgtgaccgtgtctagtacgcgtatccagaaccctgatcctgccgtgtaccagctgcgggatagcaagagcagcgacaagagcgtgtgtctgttcaccgacttcgacagccagaccaacgtgtcccagagcaaggactccgacgtgtacatcaccgataagaccgtgctggacatgcggagcatggacttcaagagcaactccgccgtggcctggtccaacaagtccgatttcgcctgcgccaacgccttcaacaacagcattatccccgaggacacattcttcccaagccccgagagcagctgcgacgtgaagctggtggaaaagagcttcgagacagacaccaacctgaacttccagaacctgagcgtgatcggcttcagaatcctgctgctgaaagtggccggctttaacctgctgatgaccctgcggctgtggtccagccgcgccaagagaagcggatctggcgtgaagcagaccctgaatttcgacctgctgaagctggctggcgacgtggaatccaacccaggcccttctagaggccatatgaccgagtacaagcccacggtgcgcctcgccacccgcgacgacgtccccagggccgtacgcaccctcgccgccgcgttcgccgactaccccgccacgcgccacaccgtcgatccggaccgccacatcgagcgggtcaccgagctgcaagaactcttcctcacgcgcgtcgggctcgacatcggcaaggtgtgggtcgcggacgacggcgccgcggtggcggtctggaccacgccggagagcgtcgaagcgggggcggtgttcgccgagatcggcccgcgcatggccgagttgagcggttcccggctggccgcgcagcaacagatggaaggcctcctggcgccgcaccggcccaaggagcccgcgtggttcctggccaccgtcggcgtctcgcccgaccaccagggcaagggtctgggcagcgccgtcgtgctccccggagtggaggcggccgagcgcgccggggtgcccgccttcctggagacctccgcgccccgcaacctccccttctacgagcggctcggcttcaccgtcaccgccgacgtcgaggtgcccgaaggaccgcgcacctggtgcatgacccgcaagcccggtgcctga

SEQ ID NO: 5732 - DNA, 3243 bp, Artificial Sequence
  Synthetic Polynucloetide
atggccttaccagtgaccgccttgctcctgccgctggccttgctgctccacgccgccaggccggaagtgcaactggtggaatctggaggctctctggtgcagccagggggaagcctgagactgtcttgtgccgcttccggcttcaccttcgacgactacgccatgagctgggtgcgccaggtgccaggcaaaggcctggaatgggtgtccagcatcaactggagcggcacccacaccgattacgccgactccgtgaaaggcagattcacaatcagcagaaacaacgccaacaataccctgtacctgcagatgaactccctgaagtctgaggatacagcagtgtattattgcgccaagaactggcgggacgccggcaccacttggtttgagaaaagcggctctgccggacagggaacccaagtgacagtgtcctccggtaccggcggaggcggatctggcggcggaggtagcggtggcggaggatctgaattcgacatccagatgacacagagccctagcagcctgtctgccagcgtgggagacagagtgaccatcacatgcaaggccagcgaccacatcaacaactggctggcctggtatcagcagaagcctggacaggcccctaagctgctgatctacggcgctaccacactggaaacaggcgtgcccagcagattttctggcagcggctctggcaccgactacaccctgacaatatccagcctccagcctgaggacttcgccacctactactgtcagcagagctggaacaccccttggacattcggccagggcaccaagctggaaatcaagagactcgaggacctgaagaacgtgttcccacctgaggtggccgtgttcgagcctagcgaggccgagatcagccacacccagaaagccaccctcgtgtgcctggctaccggcttctaccccgaccatgtggaactgtcttggtgggtcaacggcaaagaggtgcacagcggcgtgtctaccgacccccagccactgaaagaacagcccgccctgaacgacagccggtactgcctgagcagcagactgagagtgtccgccaccttctggcagaacccccggaaccacttcagatgccaggtgcagttctacggcctgagcgagaacgacgagtggacccaggacagagccaagcccgtgacccagatcgtgtctgccgaagcctggggcagagccgattgcggctttaccagcgagagctaccagcagggcgtgctgagcgccaccatcctgtacgagatcctgctgggcaaggccaccctgtacgccgtgctggtgtctgccctggtgctgatggctatggtcaagcggaaggacagccggggaagggccaagcgatctggatctggagcaacaaacttctcactactcaaacaagcaggtgacgtggaggagaatcccgggcctactagtatggactggatttggcgcatccttttccttgtcggcgctgctaccggcgcgcattccttcgaacaagttcagcttcaacagcctggcgctgagctggtcaaacctggcgcttctgtgaagatgagctgcaaagccagcggctacgccttcagcagctactggatcaactggatgaagcagaaacccggccagggactcgaatggatcggccaaatctatcccggcgacggcgacaccaactacaacggcaagttcaagggcagagccacactgaccgccgatacctctagcagcacagcctacatgcagctgagcagcctgaccagcgaagatagcgccgtgtacttctgtgcccggtccatcacaacagtcgtgggctgcgctatggactattggggccagggaacaagcgtgaccgtgtctagtacgcgtgagcagaaactgatctcggaagaggatgggagcggcaccccattcccttctctggcccctcccatcatgctgctggtggacggcaagcagcagatggtggtcgtgtgcctggtgctggatgtggccccacctggactggacagccccatctggtttagcgccggcaatggctctgccctggacgcctttacctacggcccaagccctgccaccgatggcacctggacaaatctggcccacctgagcctgcccagcgaggaactggcttcttgggagcctctcgtgtgccacacaggacctggcgctgagggacacagcagatccacccagcctatgcacctgtctggcgaggccagcaccgccagaacctgtcctcaggaacctctgagaggcacccctggcggagcactgtggctgggagtgctgagactgctgctgttcaagctgctgctgtttgacctgctgctgacctgctcctgtctgtgcgatcctgccggccctctgccttctcctgccaccaccacaagactgagagccctgggcagccacagactgcaccctgccacagagacaggcggcagagaggccacaagcagccctagaccccagcccagagacagaagatggggcgataccccccctggcagaaagcctggatctccagtccgcgccaagagaagcggatctggcgtgaagcagaccctgaatttcgacctgctgaagctggctggcgacgtggaatccaacccaggcccttctagaggccatatgaccgagtacaagcccacggtgcgcctcgccacccgcgacgacgtccccagggccgtacgcaccctcgccgccgcgttcgccgactaccccgccacgcgccacaccgtcgatccggaccgccacatcgagcgggtcaccgagctgcaagaactcttcctcacgcgcgtcgggctcgacatcggcaaggtgtgggtcgcggacgacggcgccgcggtggcggtctggaccacgccggagagcgtcgaagcgggggcggtgttcgccgagatcggcccgcgcatggccgagttgagcggttcccggctggccgcgcagcaacagatggaaggcctcctggcgccgcaccggcccaaggagcccgcgtggttcctggccaccgtcggcgtctcgcccgaccaccagggcaagggtctgggcagcgccgtcgtgctccccggagtggaggcggccgagcgcgccggggtgcccgccttcctggagacctccgcgccccgcaacctccccttctacgagcggctcggcttcaccgtcaccgccgacgtcgaggtgcccgaaggaccgcgcacctggtgcatgacccgcaagcccggtgcctga

SEQ ID NO: 5733 - DNA, 3297 bp, Artificial Sequence
  Synthetic Polynucloetide
atggccttaccagtgaccgccttgctcctgccgctggccttgctgctccacgccgccaggccgctcgaggacctgaagaacgtgttcccacctgaggtggccgtgttcgagcctagcgaggccgagatcagccacacccagaaagccaccctcgtgtgcctggctaccggcttctaccccgaccatgtggaactgtcttggtgggtcaacggcaaagaggtgcacagcggcgtgtctaccgacccccagccactgaaagaacagcccgccctgaacgacagccggtactgcctgagcagcagactgagagtgtccgccaccttctggcagaacccccggaaccacttcagatgccaggtgcagttctacggcctgagcgagaacgacgagtggacccaggacagagccaagcccgtgacccagatcgtgtctgccgaagcctggggcagagccgattgcggctttaccagcgagagctaccagcagggcgtgctgagcgccaccatcctgtacgagatcctgctgggcaaggccaccctgtacgccgtgctggtgtctgccctggtgctgatggctatggtcaagcggaaggacagccggggaagggccaagcgatctggatctggagcaacaaacttctcactactcaaacaagcaggtgacgtggaggagaatcccgggcctactagcatggccttaccagtgaccgccttgctcctgccgctggccttgctgctccacgccgccaggccggaagtgcaactggtggaatctggaggctctctggtgcagccagggggaagcctgagactgtcttgtgccgcttccggcttcaccttcgacgactacgccatgagctgggtgcgccaggtgccaggcaaaggcctggaatgggtgtccagcatcaactggagcggcacccacaccgattacgccgactccgtgaaaggcagattcacaatcagcagaaacaacgccaacaataccctgtacctgcagatgaactccctgaagtctgaggatacagcagtgtattattgcgccaagaactggcgggacgccggcaccacttggtttgagaaaagcggctctgccggacagggaacccaagtgacagtgtcctccggtaccggcggaggcggatctggcggcggaggtagcggtggcggaggatctgaattcgacatccagatgacacagagccctagcagcctgtctgccagcgtgggagacagagtgaccatcacatgcaaggccagcgaccacatcaacaactggctggcctggtatcagcagaagcctggacaggcccctaagctgctgatctacggcgctaccacactggaaacaggcgtgcccagcagattttctggcagcggctctggcaccgactacaccctgacaatatccagcctccagcctgaggacttcgccacctactactgtcagcagagctggaacaccccttggacattcggccagggcaccaagctggaaatcaagagaggcggaggcggaagtggaggcggaggatctggcggcggaggctctcaagttcagcttcaacagcctggcgctgagctggtcaaacctggcgcttctgtgaagatgagctgcaaagccagcggctacgccttcagcagctactggatcaactggatgaagcagaaacccggccagggactcgaatggatcggccaaatctatcccggcgacggcgacaccaactacaacggcaagttcaagggcagagccacactgaccgccgatacctctagcagcacagcctacatgcagctgagcagcctgaccagcgaagatagcgccgtgtacttctgtgcccggtccatcacaacagtcgtgggctgcgctatggactattggggccagggaacaagcgtgaccgtgtctagtacgcgtgagcagaaactgatctcggaagaggatctggggagcggcaccccattcccttctctggcccctcccatcatgctgctggtggacggcaagcagcagatggtggtcgtgtgcctggtgctggatgtggccccacctggactggacagccccatctggtttagcgccggcaatggctctgccctggacgcctttacctacggcccaagccctgccaccgatggcacctggacaaatctggcccacctgagcctgcccagcgaggaactggcttcttgggagcctctcgtgtgccacacaggacctggcgctgagggacacagcagatccacccagcctatgcacctgtctggcgaggccagcaccgccagaacctgtcctcaggaacctctgagaggcacccctggcggagcactgtggctgggagtgctgagactgctgctgttcaagctgctgctgtttgacctgctgctgacctgctcctgtctgtgcgatcctgccggccctctgccttctcctgccaccaccacaagactgagagccctgggcagccacagactgcaccctgccacagagacaggcggcagagaggccacaagcagccctagaccccagcccagagacagaagatggggcgataccccccctggcagaaagcctggatctccagtccgcgccaagagaagcggatctggcgtgaagcagaccctgaatttcgacctgctgaagctggctggcgacgtggaatccaacccaggcccttctagatctagaggccatatgaccgagtacaagcccacggtgcgcctcgccacccgcgacgacgtccccagggccgtacgcaccctcgccgccgcgttcgccgactaccccgccacgcgccacaccgtcgatccggaccgccacatcgagcgggtcaccgagctgcaagaactcttcctcacgcgcgtcgggctcgacatcggcaaggtgtgggtcgcggacgacggcgccgcggtggcggtctggaccacgccggagagcgtcgaagcgggggcggtgttcgccgagatcggcccgcgcatggccgagttgagcggttcccggctggccgcgcagcaacagatggaaggcctcctggcgccgcaccggcccaaggagcccgcgtggttcctggccaccgtcggcgtctcgcccgaccaccagggcaagggtctgggcagcgccgtcgtgctccccggagtggaggcggccgagcgcgccggggtgcccgccttcctggagacctccgcgccccgcaacctccccttctacgagcggctcggcttcaccgtcaccgccgacgtcgaggtgcccgaaggaccgcgcacctggtgcatgacccgcaagcccggtgcctga

SEQ ID NO: 5734 - DNA, 3108 bp, Artificial Sequence
  Synthetic Polynucloetide
atggccttaccagtgaccgccttgctcctgccgctggccttgctgctccacgccgccaggccggaagtgcaactggtggaatctggaggctctctggtgcagccagggggaagcctgagactgtcttgtgccgcttccggcttcaccttcgacgactacgccatgagctgggtgcgccaggtgccaggcaaaggcctggaatgggtgtccagcatcaactggagcggcacccacaccgattacgccgactccgtgaaaggcagattcacaatcagcagaaacaacgccaacaataccctgtacctgcagatgaactccctgaagtctgaggatacagcagtgtattattgcgccaagaactggcgggacgccggcaccacttggtttgagaaaagcggctctgccggacagggaacccaagtgacagtgtcctccggtaccggcggaggcggatctggcggcggaggtagcggtggcggaggatctgaattcgacatccagatgacacagagccctagcagcctgtctgccagcgtgggagacagagtgaccatcacatgcaaggccagcgaccacatcaacaactggctggcctggtatcagcagaagcctggacaggcccctaagctgctgatctacggcgctaccacactggaaacaggcgtgcccagcagattttctggcagcggctctggcaccgactacaccctgacaatatccagcctccagcctgaggacttcgccacctactactgtcagcagagctggaacaccccttggacattcggccagggcaccaagctggaaatcaagagactcgaggggaaaccaattcccaaccctcttctgggactggattcaaccggcagcggcgacaagcagctggacgccgacgtgtcccccaagcctaccatcttcctgccctctatcgccgagacaaagctccagaaggccggcacctacctgtgcctgctggaaaagttcttcccagatgtgattaagatccactggcaggaaaagaagtccaacaccatcctgggcagccaggaaggcaacaccatgaagaccaacgacacctacatgaagttcagctggctgaccgtgcccgagaagtccctggacaaagaacacagatgcatcgtgcggcacgaaaacaacaagaacggcgtggaccaggaaatcatcttcccacccatcaagaccgatgtgattacaatggaccccaaggacaactgctccaaggacgccaacgataccctgctgctccagctgaccaacaccagcgcctactacatgtacttgttgctgctgctgaagtccgtggtgtacttcgccatcatcacatgctgcctgctgcggagaaccgccttctgctgcaacggcgagaagtctagggccaagcgatctggatctggagcaacaaacttctcactactcaaacaagcaggtgacgtggaggagaatcccgggcctactagtatggactggatttggcgcatccttttccttgtcggcgctgctaccggcgcgcattccttcgaacaagttcagcttcaacagcctggcgctgagctggtcaaacctggcgcttctgtgaagatgagctgcaaagccagcggctacgccttcagcagctactggatcaactggatgaagcagaaacccggccagggactcgaatggatcggccaaatctatcccggcgacggcgacaccaactacaacggcaagttcaagggcagagccacactgaccgccgatacctctagcagcacagcctacatgcagctgagcagcctgaccagcgaagatagcgccgtgtacttctgtgcccggtccatcacaacagtcgtgggctgcgctatggactattggggccagggaacaagcgtgaccgtgtctagtacgcgtgagcagaaactgatctcggaagaggatgggagcggcagccagcctcacaccaagcccagcgtgttcgtgatgaagaacggcaccaacgtggcctgcctcgtgaaagagttctaccccaaggacatcaggatcaacctggtgtccagcaagaagatcaccgagttcgaccccgccatcgtgatctcccccagcggcaagtacaacgccgtgaagctggggaagtacgaggacagcaacagcgtgacctgctccgtgcagcacgacaacaagaccgtgcacagcaccgactttgaagtgaaaaccgactccaccgaccacgtgaagcccaaagagacagagaacaccaagcagcccagcaagagctgccacaagcccaaggccatcgtgcacaccgagaaagtgaacatgatgagcctgaccgtgctgggcctgcggatgctgttcgccaaaaccgtggccgtgaacttcctgctgaccgccaagctgttcttcctccgcgccaagagaagcggatctggcgtgaagcagaccctgaatttcgacctgctgaagctggctggcgacgtggaatccaacccaggcccttctagaggccatatgaccgagtacaagcccacggtgcgcctcgccacccgcgacgacgtccccagggccgtacgcaccctcgccgccgcgttcgccgactaccccgccacgcgccacaccgtcgatccggaccgccacatcgagcgggtcaccgagctgcaagaactcttcctcacgcgcgtcgggctcgacatcggcaaggtgtgggtcgcggacgacggcgccgcggtggcggtctggaccacgccggagagcgtcgaagcgggggcggtgttcgccgagatcggcccgcgcatggccgagttgagcggttcccggctggccgcgcagcaacagatggaaggcctcctggcgccgcaccggcccaaggagcccgcgtggttcctggccaccgtcggcgtctcgcccgaccaccagggcaagggtctgggcagcgccgtcgtgctccccggagtggaggcggccgagcgcgccggggtgcccgccttcctggagacctccgcgccccgcaacctccccttctacgagcggctcggcttcaccgtcaccgccgacgtcgaggtgcccgaaggaccgcgcacctggtgcatgacccgcaagcccggtgcctga

SEQ ID NO: 5735 - DNA, 2319 bp, Artificial Sequence
  Synthetic Polynucloetide
atggccttaccagtgaccgccttgctcctgccgctggccttgctgctccacgccgccaggccggaagtgcaactggtggaatctggaggctctctggtgcagccagggggaagcctgagactgtcttgtgccgcttccggcttcaccttcgacgactacgccatgagctgggtgcgccaggtgccaggcaaaggcctggaatgggtgtccagcatcaactggagcggcacccacaccgattacgccgactccgtgaaaggcagattcacaatcagcagaaacaacgccaacaataccctgtacctgcagatgaactccctgaagtctgaggatacagcagtgtattattgcgccaagaactggcgggacgccggcaccacttggtttgagaaaagcggctctgccggacagggaacccaagtgacagtgtcctccggtaccggcggaggcggatctggcggcggaggtagcggtggcggaggatctgaattcgacatccagatgacacagagccctagcagcctgtctgccagcgtgggagacagagtgaccatcacatgcaaggccagcgaccacatcaacaactggctggcctggtatcagcagaagcctggacaggcccctaagctgctgatctacggcgctaccacactggaaacaggcgtgcccagcagattttctggcagcggctctggcaccgactacaccctgacaatatccagcctccagcctgaggacttcgccacctactactgtcagcagagctggaacaccccttggacattcggccagggcaccaagctggaaatcaagagactcgagagccagcctcacaccaagcccagcgtgttcgtgatgaagaacggcaccaacgtggcctgcctcgtgaaagagttctaccccaaggacatcaggatcaacctggtgtccagcaagaagatcaccgagttcgaccccgccatcgtgatctcccccagcggcaagtacaacgccgtgaagctggggaagtacgaggacagcaacagcgtgacctgctccgtgcagcacgacaacaagaccgtgcacagcaccgactttgaagtgaaaaccgactccaccgaccacgtgaagcccaaagagacagagaacaccaagcagcccagcaagagctgccacaagcccaaggccatcgtgcacaccgagaaagtgaacatgatgagcctgaccgtgctgggcctgcggatgctgttcgccaaaaccgtggccgtgaacttcctgctgaccgccaagctgttcttcctcagggccaagcgatctggatctggagcaacaaacttctcactactcaaacaagcaggtgacgtggaggagaatcccgggcctactagtatggactggatttggcgcatccttttccttgtcggcgctgctaccggcgcgcattccttcgaacaagttcagcttcaacagcctggcgctgagctggtcaaacctggcgcttctgtgaagatgagctgcaaagccagcggctacgccttcagcagctactggatcaactggatgaagcagaaacccggccagggactcgaatggatcggccaaatctatcccggcgacggcgacaccaactacaacggcaagttcaagggcagagccacactgaccgccgatacctctagcagcacagcctacatgcagctgagcagcctgaccagcgaagatagcgccgtgtacttctgtgcccggtccatcacaacagtcgtgggctgcgctatggactattggggccagggaacaagcgtgaccgtgtctagtacgcgtgacaagcagctggacgccgacgtgtcccccaagcctaccatcttcctgccctctatcgccgagacaaagctccagaaggccggcacctacctgtgcctgctggaaaagttcttcccagatgtgattaagatccactggcaggaaaagaagtccaacaccatcctgggcagccaggaaggcaacaccatgaagaccaacgacacctacatgaagttcagctggctgaccgtgcccgagaagtccctggacaaagaacacagatgcatcgtgcggcacgaaaacaacaagaacggcgtggaccaggaaatcatcttcccacccatcaagaccgatgtgattacaatggaccccaaggacaactgctccaaggacgccaacgataccctgctgctccagctgaccaacaccagcgcctactacatgtacttgttgctgctgctgaagtccgtggtgtacttcgccatcatcacatgctgcctgctgcggagaaccgccttctgctgcaacggcgagaagtct

SEQ ID NO: 5736 - DNA, 3153 bp, Artificial Sequence
  Synthetic Polynucloetide
atggccttaccagtgaccgccttgctcctgccgctggccttgctgctccacgccgccaggccgctcgaggggaaaccaattcccaaccctcttctgggactggattcaaccggcagcggcgacaagcagctggacgccgacgtgtcccccaagcctaccatcttcctgccctctatcgccgagacaaagctccagaaggccggcacctacctgtgcctgctggaaaagttcttcccagatgtgattaagatccactggcaggaaaagaagtccaacaccatcctgggcagccaggaaggcaacaccatgaagaccaacgacacctacatgaagttcagctggctgaccgtgcccgagaagtccctggacaaagaacacagatgcatcgtgcggcacgaaaacaacaagaacggcgtggaccaggaaatcatcttcccacccatcaagaccgatgtgattacaatggaccccaaggacaactgctccaaggacgccaacgataccctgctgctccagctgaccaacaccagcgcctactacatgtacttgttgctgctgctgaagtccgtggtgtacttcgccatcatcacatgctgcctgctgcggagaaccgccttctgctgcaacggcgagaagtctagggccaagcgatctggatctggagcaacaaacttctcactactcaaacaagcaggtgacgtggaggagaatcccgggcctactagcatggccttaccagtgaccgccttgctcctgccgctggccttgctgctccacgccgccaggccggaagtgcaactggtggaatctggaggctctctggtgcagccagggggaagcctgagactgtcttgtgccgcttccggcttcaccttcgacgactacgccatgagctgggtgcgccaggtgccaggcaaaggcctggaatgggtgtccagcatcaactggagcggcacccacaccgattacgccgactccgtgaaaggcagattcacaatcagcagaaacaacgccaacaataccctgtacctgcagatgaactccctgaagtctgaggatacagcagtgtattattgcgccaagaactggcgggacgccggcaccacttggtttgagaaaagcggctctgccggacagggaacccaagtgacagtgtcctccggtaccggcggaggcggatctggcggcggaggtagcggtggcggaggatctgaattcgacatccagatgacacagagccctagcagcctgtctgccagcgtgggagacagagtgaccatcacatgcaaggccagcgaccacatcaacaactggctggcctggtatcagcagaagcctggacaggcccctaagctgctgatctacggcgctaccacactggaaacaggcgtgcccagcagattttctggcagcggctctggcaccgactacaccctgacaatatccagcctccagcctgaggacttcgccacctactactgtcagcagagctggaacaccccttggacattcggccagggcaccaagctggaaatcaagagaggcggaggcggaagtggaggcggaggatctggcggcggaggctctcaagttcagcttcaacagcctggcgctgagctggtcaaacctggcgcttctgtgaagatgagctgcaaagccagcggctacgccttcagcagctactggatcaactggatgaagcagaaacccggccagggactcgaatggatcggccaaatctatcccggcgacggcgacaccaactacaacggcaagttcaagggcagagccacactgaccgccgatacctctagcagcacagcctacatgcagctgagcagcctgaccagcgaagatagcgccgtgtacttctgtgcccggtccatcacaacagtcgtgggctgcgctatggactattggggccagggaacaagcgtgaccgtgtctagtacgcgtgagcagaaactgatctcggaagaggatgggagcggcagccagcctcacaccaagcccagcgtgttcgtgatgaagaacggcaccaacgtggcctgcctcgtgaaagagttctaccccaaggacatcaggatcaacctggtgtccagcaagaagatcaccgagttcgaccccgccatcgtgatctcccccagcggcaagtacaacgccgtgaagctggggaagtacgaggacagcaacagcgtgacctgctccgtgcagcacgacaacaagaccgtgcacagcaccgactttgaagtgaaaaccgactccaccgaccacgtgaagcccaaagagacagagaacaccaagcagcccagcaagagctgccacaagcccaaggccatcgtgcacaccgagaaagtgaacatgatgagcctgaccgtgctgggcctgcggatgctgttcgccaaaaccgtggccgtgaacttcctgctgaccgccaagctgttcttcctccgcgccaagagaagcggatctggcgtgaagcagaccctgaatttcgacctgctgaagctggctggcgacgtggaatccaacccaggcccttctagaggccatatgaccgagtacaagcccacggtgcgcctcgccacccgcgacgacgtccccagggccgtacgcaccctcgccgccgcgttcgccgactaccccgccacgcgccacaccgtcgatccggaccgccacatcgagcgggtcaccgagctgcaagaactcttcctcacgcgcgtcgggctcgacatcggcaaggtgtgggtcgcggacgacggcgccgcggtggcggtctggaccacgccggagagcgtcgaagcgggggcggtgttcgccgagatcggcccgcgcatggccgagttgagcggttcccggctggccgcgcagcaacagatggaaggcctcctggcgccgcaccggcccaaggagcccgcgtggttcctggccaccgtcggcgtctcgcccgaccaccagggcaagggtctgggcagcgccgtcgtgctccccggagtggaggcggccgagcgcgccggggtgcccgccttcctggagacctccgcgccccgcaacctccccttctacgagcggctcggcttcaccgtcaccgccgacgtcgaggtgcccgaaggaccgcgcacctggtgcatgacccgcaagcccggtgcctga

SEQ ID NO: 5737 - DNA, 3528 bp, Artificial Sequence
  Synthetic Polynucloetide
atggccttaccagtgaccgccttgctcctgccgctggccttgctgctccacgccgccaggccggaagtgcaactggtggaatctggaggctctctggtgcagccagggggaagcctgagactgtcttgtgccgcttccggcttcaccttcgacgactacgccatgagctgggtgcgccaggtgccaggcaaaggcctggaatgggtgtccagcatcaactggagcggcacccacaccgattacgccgactccgtgaaaggcagattcacaatcagcagaaacaacgccaacaataccctgtacctgcagatgaactccctgaagtctgaggatacagcagtgtattattgcgccaagaactggcgggacgccggcaccacttggtttgagaaaagcggctctgccggacagggaacccaagtgacagtgtcctccggtaccggcggaggcggatctggcggcggaggtagcggtggcggaggatctgaattcgacatccagatgacacagagccctagcagcctgtctgccagcgtgggagacagagtgaccatcacatgcaaggccagcgaccacatcaacaactggctggcctggtatcagcagaagcctggacaggcccctaagctgctgatctacggcgctaccacactggaaacaggcgtgcccagcagattttctggcagcggctctggcaccgactacaccctgacaatatccagcctccagcctgaggacttcgccacctactactgtcagcagagctggaacaccccttggacattcggccagggcaccaagctggaaatcaagagaggacagcctaaggccaatcctaccgtgacactgttccctccaagcagcgaagaactccaggccaacaaggccacacttgtgtgcctgatctccgacttctaccctggggctgtgacagtggcttggaaggccgatggatctcctgtgaaagccggcgtggaaaccaccaagccatccaagcagagcaacaacaaatacgccgccagctcctacctgagcctgacacctgagcagtggaagtcccacagatcctacagctgccaagtgacccacgaaggcagcaccgtggaaaagacagtggcccctacagagtgcagcggatcccagagcttcggcctgctggaccccaagctgtgctacctgctggatggcatcctgttcatctacggcgtgatcctgaccgccctgttcctgagagtgaagttcagcagaagcgccgacgcccctgcctaccagcagggacagaaccaactgtacaacgagctgaacctgggcagacgggaagagtacgacgtgctggacaagcggagaggcagggaccctgagatgggcggaaagccccagcggagaaagaacccccaggaaggactgtataacgaactccagaaagacaagatggccgaagcctacagcgagatcggcatgaagggcgagcggagaagaggcaagggccacgatggcctgtaccagggcctgagcaccgccaccaaggacacctatgacgccctgcacatgcaggccctgcctccaagaagggccaagcgatctggatctggagcaacaaacttctcactactcaaacaagcaggtgacgtggaggagaatcccgggcctactagtatggactggatttggcgcatccttttccttgtcggcgctgctaccggcgcgcattccttcgaacaagttcagcttcaacagcctggcgctgagctggtcaaacctggcgcttctgtgaagatgagctgcaaagccagcggctacgccttcagcagctactggatcaactggatgaagcagaaacccggccagggactcgaatggatcggccaaatctatcccggcgacggcgacaccaactacaacggcaagttcaagggcagagccacactgaccgccgatacctctagcagcacagcctacatgcagctgagcagcctgaccagcgaagatagcgccgtgtacttctgtgcccggtccatcacaacagtcgtgggctgcgctatggactattggggccagggaacaagcgtgaccgtgtctagtgcctctacaaagggaccctccgtgtttcctctggctcccagcagcaagtctacaagcggaggaacagccgctctgggctgcctggtcaaggattactttcccgagcctgtgaccgtgtcctggaatagcggagcactgacaagcggcgtgcacacctttccagccgtgctgcaaagcagcggcctgtactctctgagcagcgtggtcacagtgcctagctctagcctgggcacccagacctacatctgcaatgtgaaccacaagcctagcaacaccaaggtggacaagagagtggaacccaagagctgtggtacccagagttttgggttgttggaccctaaattgtgctatctgttggacggaatcctgttcatttacggagtgatcctgaccgcattgttcctgcgggttaagttttccagatccgcagacgcacccgcttaccaacaagggcagaaccaactctacaatgaacttaatttggggcggagggaagagtacgacgttctggacaaaaggaggggacgagatcccgagatgggcggaaagcctcagcgaaggaagaatccgcaagaggggctttataacgaactccagaaagataaaatggcagaagcctatagtgagattgggatgaagggagaaaggaggaggggtaaaggtcacgatgggttgtaccaaggattgagcacagccactaaagatacctatgatgcgctccacatgcaggccctgccgccaagacgcgccaagagaagcggatctggcgtgaagcagaccctgaatttcgacctgctgaagctggctggcgacgtggaatccaacccaggcccttctagaggccatatgaccgagtacaagcccacggtgcgcctcgccacccgcgacgacgtccccagggccgtacgcaccctcgccgccgcgttcgccgactaccccgccacgcgccacaccgtcgatccggaccgccacatcgagcgggtcaccgagctgcaagaactcttcctcacgcgcgtcgggctcgacatcggcaaggtgtgggtcgcggacgacggcgccgcggtggcggtctggaccacgccggagagcgtcgaagcgggggcggtgttcgccgagatcggcccgcgcatggccgagttgagcggttcccggctggccgcgcagcaacagatggaaggcctcctggcgccgcaccggcccaaggagcccgcgtggttcctggccaccgtcggcgtctcgcccgaccaccagggcaagggtctgggcagcgccgtcgtgctccccggagtggaggcggccgagcgcgccggggtgcccgccttcctggagacctccgcgccccgcaacctccccttctacgagcggctcggcttcaccgtcaccgccgacgtcgaggtgcccgaaggaccgcgcacctggtgcatgacccgcaagcccggtgcctga

SEQ ID NO: 5738 - DNA, 2883 bp, Artificial Sequence
  Synthetic Polynucloetide
atggccttaccagtgaccgccttgctcctgccgctggccttgctgctccacgccgccaggccggaagtgcaactggtggaatctggaggctctctggtgcagccagggggaagcctgagactgtcttgtgccgcttccggcttcaccttcgacgactacgccatgagctgggtgcgccaggtgccaggcaaaggcctggaatgggtgtccagcatcaactggagcggcacccacaccgattacgccgactccgtgaaaggcagattcacaatcagcagaaacaacgccaacaataccctgtacctgcagatgaactccctgaagtctgaggatacagcagtgtattattgcgccaagaactggcgggacgccggcaccacttggtttgagaaaagcggctctgccggacagggaacccaagtgacagtgtcctccggtaccggcggaggcggatctggcggcggaggtagcggtggcggaggatctgaattcgacatccagatgacacagagccctagcagcctgtctgccagcgtgggagacagagtgaccatcacatgcaaggccagcgaccacatcaacaactggctggcctggtatcagcagaagcctggacaggcccctaagctgctgatctacggcgctaccacactggaaacaggcgtgcccagcagattttctggcagcggctctggcaccgactacaccctgacaatatccagcctccagcctgaggacttcgccacctactactgtcagcagagctggaacaccccttggacattcggccagggcaccaagctggaaatcaagagactcgaggacctgaagaacgtgttcccacctgaggtggccgtgttcgagcctagcgaggccgagatcagccacacccagaaagccaccctcgtgtgcctggctaccggcttctaccccgaccatgtggaactgtcttggtgggtcaacggcaaagaggtgcacagcggcgtgtctaccgacccccagccactgaaagaacagcccgccctgaacgacagccggtactgcctgagcagcagactgagagtgtccgccaccttctggcagaacccccggaaccacttcagatgccaggtgcagttctacggcctgagcgagaacgacgagtggacccaggacagagccaagcccgtgacccagatcgtgtctgccgaagcctggggcagagccgattgcggatcccagagcttcggcctgctggaccccaagctgtgctacctgctggatggcatcctgttcatctacggcgtgatcctgaccgccctgttcctgagagtgaagttcagcagaagcgccgacgcccctgcctaccagcagggacagaaccaactgtacaacgagctgaacctgggcagacgggaagagtacgacgtgctggacaagcggagaggcagggaccctgagatgggcggaaagccccagcggagaaagaacccccaggaaggactgtataacgaactccagaaagacaagatggccgaagcctacagcgagatcggcatgaagggcgagcggagaagaggcaagggccacgatggcctgtaccagggcctgagcaccgccaccaaggacacctatgacgccctgcacatgcaggccctgcctccaagaagggccaagcgatctggatctggagcaacaaacttctcactactcaaacaagcaggtgacgtggaggagaatcccgggcctactagtatggactggatttggcgcatccttttccttgtcggcgctgctaccggcgcgcattccttcgaacaagttcagcttcaacagcctggcgctgagctggtcaaacctggcgcttctgtgaagatgagctgcaaagccagcggctacgccttcagcagctactggatcaactggatgaagcagaaacccggccagggactcgaatggatcggccaaatctatcccggcgacggcgacaccaactacaacggcaagttcaagggcagagccacactgaccgccgatacctctagcagcacagcctacatgcagctgagcagcctgaccagcgaagatagcgccgtgtacttctgtgcccggtccatcacaacagtcgtgggctgcgctatggactattggggccagggaacaagcgtgaccgtgtctagtacgcgtatccagaaccctgatcctgccgtgtaccagctgcgggatagcaagagcagcgacaagagcgtgtgtctgttcaccgacttcgacagccagaccaacgtgtcccagagcaaggactccgacgtgtacatcaccgataagaccgtgctggacatgcggagcatggacttcaagagcaactccgccgtggcctggtccaacaagtccgatttcgcctgcgccaacgccttcaacaacagcattatccccgaggacacattcttcccaagccccgagagcagctgcggtacccagagttttgggttgttggaccctaaattgtgctatctgttggacggaatcctgttcatttacggagtgatcctgaccgcattgttcctgcgggttaagttttccagatccgcagacgcacccgcttaccaacaagggcagaaccaactctacaatgaacttaatttggggcggagggaagagtacgacgttctggacaaaaggaggggacgagatcccgagatgggcggaaagcctcagcgaaggaagaatccgcaagaggggctttataacgaactccagaaagataaaatggcagaagcctatagtgagattgggatgaagggagaaaggaggaggggtaaaggtcacgatgggttgtaccaaggattgagcacagccactaaagatacctatgatgcgctccacatgcaggccctgccgccaaga

SEQ ID NO: 5739 - DNA, 2883 bp, Artificial Sequence
  Synthetic Polynucloetide
atggccttaccagtgaccgccttgctcctgccgctggccttgctgctccacgccgccaggccggaagtgcaactggtggaatctggaggctctctggtgcagccagggggaagcctgagactgtcttgtgccgcttccggcttcaccttcgacgactacgccatgagctgggtgcgccaggtgccaggcaaaggcctggaatgggtgtccagcatcaactggagcggcacccacaccgattacgccgactccgtgaaaggcagattcacaatcagcagaaacaacgccaacaataccctgtacctgcagatgaactccctgaagtctgaggatacagcagtgtattattgcgccaagaactggcgggacgccggcaccacttggtttgagaaaagcggctctgccggacagggaacccaagtgacagtgtcctccggtaccggcggaggcggatctggcggcggaggtagcggtggcggaggatctgaattcgacatccagatgacacagagccctagcagcctgtctgccagcgtgggagacagagtgaccatcacatgcaaggccagcgaccacatcaacaactggctggcctggtatcagcagaagcctggacaggcccctaagctgctgatctacggcgctaccacactggaaacaggcgtgcccagcagattttctggcagcggctctggcaccgactacaccctgacaatatccagcctccagcctgaggacttcgccacctactactgtcagcagagctggaacaccccttggacattcggccagggcaccaagctggaaatcaagagactcgaggacctgaagaacgtgttcccacctgaggtggccgtgttcgagcctagcaaggccgagatcgcccacacccagaaagccaccctcgtgtgcctggctaccggcttctaccccgaccatgtggaactgtcttggtgggtcaacggcaaagaggtgcacagcggcgtgtgtaccgacccccagccactgaaagaacagcccgccctgaacgacagccggtactgcctgagcagcagactgagagtgtccgccaccttctggcagaacccccggaaccacttcagatgccaggtgcagttctacggcctgagcgagaacgacgagtggacccaggacagagccaagcccgtgacccagatcgtgtctgccgaagcctggggcagagccgattgcggatcccagagcttcggcctgctggaccccaagctgtgctacctgctggatggcatcctgttcatctacggcgtgatcctgaccgccctgttcctgagagtgaagttcagcagaagcgccgacgcccctgcctaccagcagggacagaaccaactgtacaacgagctgaacctgggcagacgggaagagtacgacgtgctggacaagcggagaggcagggaccctgagatgggcggaaagccccagcggagaaagaacccccaggaaggactgtataacgaactccagaaagacaagatggccgaagcctacagcgagatcggcatgaagggcgagcggagaagaggcaagggccacgatggcctgtaccagggcctgagcaccgccaccaaggacacctatgacgccctgcacatgcaggccctgcctccaagaagggccaagcgatctggatctggagcaacaaacttctcactactcaaacaagcaggtgacgtggaggagaatcccgggcctactagtatggactggatttggcgcatccttttccttgtcggcgctgctaccggcgcgcattccttcgaacaagttcagcttcaacagcctggcgctgagctggtcaaacctggcgcttctgtgaagatgagctgcaaagccagcggctacgccttcagcagctactggatcaactggatgaagcagaaacccggccagggactcgaatggatcggccaaatctatcccggcgacggcgacaccaactacaacggcaagttcaagggcagagccacactgaccgccgatacctctagcagcacagcctacatgcagctgagcagcctgaccagcgaagatagcgccgtgtacttctgtgcccggtccatcacaacagtcgtgggctgcgctatggactattggggccagggaacaagcgtgaccgtgtctagtacgcgtatccagaaccctgatcctgccgtgtaccagctgcgggatagcaagagcagcgacaagagcgtgtgtctgttcaccgacttcgacagccagaccaacgtgtcccagagcaaggactccgacgtgtacatcaccgataagtgcgtgctggacatgcggagcatggacttcaagagcaactccgccgtggcctggtccaacaagtccgatttcgcctgcgccaacgccttcaacaacagcattatccccgaggacacattcttcccaagcagcgacgtgccctgcggtacccagagttttgggttgttggaccctaaattgtgctatctgttggacggaatcctgttcatttacggagtgatcctgaccgcattgttcctgcgggttaagttttccagatccgcagacgcacccgcttaccaacaagggcagaaccaactctacaatgaacttaatttggggcggagggaagagtacgacgttctggacaaaaggaggggacgagatcccgagatgggcggaaagcctcagcgaaggaagaatccgcaagaggggctttataacgaactccagaaagataaaatggcagaagcctatagtgagattgggatgaagggagaaaggaggaggggtaaaggtcacgatgggttgtaccaaggattgagcacagccactaaagatacctatgatgcgctccacatgcaggccctgccgccaaga

SEQ ID NO: 5740 - DNA, 3096 bp, Artificial Sequence
  Synthetic Polynucloetide
atggccttaccagtgaccgccttgctcctgccgctggccttgctgctccacgccgccaggccggaagtgcaactggtggaatctggaggctctctggtgcagccagggggaagcctgagactgtcttgtgccgcttccggcttcaccttcgacgactacgccatgagctgggtgcgccaggtgccaggcaaaggcctggaatgggtgtccagcatcaactggagcggcacccacaccgattacgccgactccgtgaaaggcagattcacaatcagcagaaacaacgccaacaataccctgtacctgcagatgaactccctgaagtctgaggatacagcagtgtattattgcgccaagaactggcgggacgccggcaccacttggtttgagaaaagcggctctgccggacagggaacccaagtgacagtgtcctccggtaccggcggaggcggatctggcggcggaggtagcggtggcggaggatctgaattcgacatccagatgacacagagccctagcagcctgtctgccagcgtgggagacagagtgaccatcacatgcaaggccagcgaccacatcaacaactggctggcctggtatcagcagaagcctggacaggcccctaagctgctgatctacggcgctaccacactggaaacaggcgtgcccagcagattttctggcagcggctctggcaccgactacaccctgacaatatccagcctccagcctgaggacttcgccacctactactgtcagcagagctggaacaccccttggacattcggccagggcaccaagctggaaatcaagagactcgaggggaaaccaattcccaaccctcttctgggactggattcaaccggcagcggcgaggacctgaagaacgtgttcccacctgaggtggccgtgttcgagcctagcgaggccgagatcagccacacccagaaagccaccctcgtgtgcctggctaccggcttctaccccgaccatgtggaactgtcttggtgggtcaacggcaaagaggtgcacagcggcgtgtctaccgacccccagccactgaaagaacagcccgccctgaacgacagccggtactgcctgagcagcagactgagagtgtccgccaccttctggcagaacccccggaaccacttcagatgccaggtgcagttctacggcctgagcgagaacgacgagtggacccaggacagagccaagcccgtgacccagatcgtgtctgccgaagcctggggcagagccgattgcggatcccagagcttcggcctgctggaccccaagctgtgctacctgctggatggcatcctgttcatctacggcgtgatcctgaccgccctgttcctgagagtgaagttcagcagaagcgccgacgcccctgcctaccagcagggacagaaccaactgtacaacgagctgaacctgggcagacgggaagagtacgacgtgctggacaagcggagaggcagggaccctgagatgggcggaaagccccagcggagaaagaacccccaggaaggactgtataacgaactccagaaagacaagatggccgaagcctacagcgagatcggcatgaagggcgagcggagaagaggcaagggccacgatggcctgtaccagggcctgagcaccgccaccaaggacacctatgacgccctgcacatgcaggccctgcctccaagaagggccaagcgatctggatctggagcaacaaacttctcactactcaaacaagcaggtgacgtggaggagaatcccgggcctactagtatggactggatttggcgcatccttttccttgtcggcgctgctaccggcgcgcattccttcgaacaagttcagcttcaacagcctggcgctgagctggtcaaacctggcgcttctgtgaagatgagctgcaaagccagcggctacgccttcagcagctactggatcaactggatgaagcagaaacccggccagggactcgaatggatcggccaaatctatcccggcgacggcgacaccaactacaacggcaagttcaagggcagagccacactgaccgccgatacctctagcagcacagcctacatgcagctgagcagcctgaccagcgaagatagcgccgtgtacttctgtgcccggtccatcacaacagtcgtgggctgcgctatggactattggggccagggaacaagcgtgaccgtgtctagtacgcgtgagcagaaactgatctcggaagaggatgggagcggcatccagaaccctgatcctgccgtgtaccagctgcgggatagcaagagcagcgacaagagcgtgtgtctgttcaccgacttcgacagccagaccaacgtgtcccagagcaaggactccgacgtgtacatcaccgataagaccgtgctggacatgcggagcatggacttcaagagcaactccgccgtggcctggtccaacaagtccgatttcgcctgcgccaacgccttcaacaacagcattatccccgaggacacattcttcccaagccccgagagcagctgcggtacccagagttttgggttgttggaccctaaattgtgctatctgttggacggaatcctgttcatttacggagtgatcctgaccgcattgttcctgaggagcaagcggtcacggctgctccacagcgattacatgaatatgacaccacgaagaccgggtcctactcgcaaacactaccaaccctacgcacctccccgcgactttgcagcgtaccgatctcgggttaagttttccagatccgcagacgcacccgcttaccaacaagggcagaaccaactctacaatgaacttaatttggggcggagggaagagtacgacgttctggacaaaaggaggggacgagatcccgagatgggcggaaagcctcagcgaaggaagaatccgcaagaggggctttataacgaactccagaaagataaaatggcagaagcctatagtgagattgggatgaagggagaaaggaggaggggtaaaggtcacgatgggttgtaccaaggattgagcacagccactaaagatacctatgatgcgctccacatgcaggccctgccgccaaga

SEQ ID NO: 5741 - DNA, 3219 bp, Artificial Sequence
  Synthetic Polynucloetide
atggccttaccagtgaccgccttgctcctgccgctggccttgctgctccacgccgccaggccggaagtgcaactggtggaatctggaggctctctggtgcagccagggggaagcctgagactgtcttgtgccgcttccggcttcaccttcgacgactacgccatgagctgggtgcgccaggtgccaggcaaaggcctggaatgggtgtccagcatcaactggagcggcacccacaccgattacgccgactccgtgaaaggcagattcacaatcagcagaaacaacgccaacaataccctgtacctgcagatgaactccctgaagtctgaggatacagcagtgtattattgcgccaagaactggcgggacgccggcaccacttggtttgagaaaagcggctctgccggacagggaacccaagtgacagtgtcctccggtaccggcggaggcggatctggcggcggaggtagcggtggcggaggatctgaattcgacatccagatgacacagagccctagcagcctgtctgccagcgtgggagacagagtgaccatcacatgcaaggccagcgaccacatcaacaactggctggcctggtatcagcagaagcctggacaggcccctaagctgctgatctacggcgctaccacactggaaacaggcgtgcccagcagattttctggcagcggctctggcaccgactacaccctgacaatatccagcctccagcctgaggacttcgccacctactactgtcagcagagctggaacaccccttggacattcggccagggcaccaagctggaaatcaagagactcgaggggaaaccaattcccaaccctcttctgggactggattcaaccggcagcggcgaggacctgaagaacgtgttcccacctgaggtggccgtgttcgagcctagcgaggccgagatcagccacacccagaaagccaccctcgtgtgcctggctaccggcttctaccccgaccatgtggaactgtcttggtgggtcaacggcaaagaggtgcacagcggcgtgtctaccgacccccagccactgaaagaacagcccgccctgaacgacagccggtactgcctgagcagcagactgagagtgtccgccaccttctggcagaacccccggaaccacttcagatgccaggtgcagttctacggcctgagcgagaacgacgagtggacccaggacagagccaagcccgtgacccagatcgtgtctgccgaagcctggggcagagccgattgcggatcccagagcttcggcctgctggaccccaagctgtgctacctgctggatggcatcctgttcatctacggcgtgatcctgaccgccctgttcctgaggagtaagaggagcaggctcctgcacagtgactacatgaacatgactccacgccgccccggacccacccgcaagcattaccagccctatgccccaccacgcgacttcgcagcctatcgctccagagtgaagttcagcagaagcgccgacgcccctgcctaccagcagggacagaaccaactgtacaacgagctgaacctgggcagacgggaagagtacgacgtgctggacaagcggagaggcagggaccctgagatgggcggaaagccccagcggagaaagaacccccaggaaggactgtataacgaactccagaaagacaagatggccgaagcctacagcgagatcggcatgaagggcgagcggagaagaggcaagggccacgatggcctgtaccagggcctgagcaccgccaccaaggacacctatgacgccctgcacatgcaggccctgcctccaagaagggccaagcgatctggatctggagcaacaaacttctcactactcaaacaagcaggtgacgtggaggagaatcccgggcctactagtatggactggatttggcgcatccttttccttgtcggcgctgctaccggcgcgcattccttcgaacaagttcagcttcaacagcctggcgctgagctggtcaaacctggcgcttctgtgaagatgagctgcaaagccagcggctacgccttcagcagctactggatcaactggatgaagcagaaacccggccagggactcgaatggatcggccaaatctatcccggcgacggcgacaccaactacaacggcaagttcaagggcagagccacactgaccgccgatacctctagcagcacagcctacatgcagctgagcagcctgaccagcgaagatagcgccgtgtacttctgtgcccggtccatcacaacagtcgtgggctgcgctatggactattggggccagggaacaagcgtgaccgtgtctagtacgcgtgagcagaaactgatctcggaagaggatgggagcggcatccagaaccctgatcctgccgtgtaccagctgcgggatagcaagagcagcgacaagagcgtgtgtctgttcaccgacttcgacagccagaccaacgtgtcccagagcaaggactccgacgtgtacatcaccgataagaccgtgctggacatgcggagcatggacttcaagagcaactccgccgtggcctggtccaacaagtccgatttcgcctgcgccaacgccttcaacaacagcattatccccgaggacacattcttcccaagccccgagagcagctgcggtacccagagttttgggttgttggaccctaaattgtgctatctgttggacggaatcctgttcatttacggagtgatcctgaccgcattgttcctgaggagcaagcggtcacggctgctccacagcgattacatgaatatgacaccacgaagaccgggtcctactcgcaaacactaccaaccctacgcacctccccgcgactttgcagcgtaccgatctcgggttaagttttccagatccgcagacgcacccgcttaccaacaagggcagaaccaactctacaatgaacttaatttggggcggagggaagagtacgacgttctggacaaaaggaggggacgagatcccgagatgggcggaaagcctcagcgaaggaagaatccgcaagaggggctttataacgaactccagaaagataaaatggcagaagcctatagtgagattgggatgaagggagaaaggaggaggggtaaaggtcacgatgggttgtaccaaggattgagcacagccactaaagatacctatgatgcgctccacatgcaggccctgccgccaaga

SEQ ID NO: 5742 - DNA, 3102 bp, Artificial Sequence
  Synthetic Polynucloetide
atggccttaccagtgaccgccttgctcctgccgctggccttgctgctccacgccgccaggccggaagtgcaactggtggaatctggaggctctctggtgcagccagggggaagcctgagactgtcttgtgccgcttccggcttcaccttcgacgactacgccatgagctgggtgcgccaggtgccaggcaaaggcctggaatgggtgtccagcatcaactggagcggcacccacaccgattacgccgactccgtgaaaggcagattcacaatcagcagaaacaacgccaacaataccctgtacctgcagatgaactccctgaagtctgaggatacagcagtgtattattgcgccaagaactggcgggacgccggcaccacttggtttgagaaaagcggctctgccggacagggaacccaagtgacagtgtcctccggtaccggcggaggcggatctggcggcggaggtagcggtggcggaggatctgaattcgacatccagatgacacagagccctagcagcctgtctgccagcgtgggagacagagtgaccatcacatgcaaggccagcgaccacatcaacaactggctggcctggtatcagcagaagcctggacaggcccctaagctgctgatctacggcgctaccacactggaaacaggcgtgcccagcagattttctggcagcggctctggcaccgactacaccctgacaatatccagcctccagcctgaggacttcgccacctactactgtcagcagagctggaacaccccttggacattcggccagggcaccaagctggaaatcaagagactcgaggggaaaccaattcccaaccctcttctgggactggattcaaccggcagcggcgaggacctgaagaacgtgttcccacctgaggtggccgtgttcgagcctagcgaggccgagatcagccacacccagaaagccaccctcgtgtgcctggctaccggcttctaccccgaccatgtggaactgtcttggtgggtcaacggcaaagaggtgcacagcggcgtgtctaccgacccccagccactgaaagaacagcccgccctgaacgacagccggtactgcctgagcagcagactgagagtgtccgccaccttctggcagaacccccggaaccacttcagatgccaggtgcagttctacggcctgagcgagaacgacgagtggacccaggacagagccaagcccgtgacccagatcgtgtctgccgaagcctggggcagagccgattgcggatcccagagcttcggcctgctggaccccaagctgtgctacctgctggatggcatcctgttcatctacggcgtgatcctgaccgccctgttcctgagagtgaagttcagcagaagcgccgacgcccctgcctaccagcagggacagaaccaactgtacaacgagctgaacctgggcagacgggaagagtacgacgtgctggacaagcggagaggcagggaccctgagatgggcggaaagccccagcggagaaagaacccccaggaaggactgtataacgaactccagaaagacaagatggccgaagcctacagcgagatcggcatgaagggcgagcggagaagaggcaagggccacgatggcctgtaccagggcctgagcaccgccaccaaggacacctatgacgccctgcacatgcaggccctgcctccaagaagggccaagcgatctggatctggagcaacaaacttctcactactcaaacaagcaggtgacgtggaggagaatcccgggcctactagtatggactggatttggcgcatccttttccttgtcggcgctgctaccggcgcgcattccttcgaacaagttcagcttcaacagcctggcgctgagctggtcaaacctggcgcttctgtgaagatgagctgcaaagccagcggctacgccttcagcagctactggatcaactggatgaagcagaaacccggccagggactcgaatggatcggccaaatctatcccggcgacggcgacaccaactacaacggcaagttcaagggcagagccacactgaccgccgatacctctagcagcacagcctacatgcagctgagcagcctgaccagcgaagatagcgccgtgtacttctgtgcccggtccatcacaacagtcgtgggctgcgctatggactattggggccagggaacaagcgtgaccgtgtctagtacgcgtgagcagaaactgatctcggaagaggatctggggagcggcatccagaaccctgatcctgccgtgtaccagctgcgggatagcaagagcagcgacaagagcgtgtgtctgttcaccgacttcgacagccagaccaacgtgtcccagagcaaggactccgacgtgtacatcaccgataagaccgtgctggacatgcggagcatggacttcaagagcaactccgccgtggcctggtccaacaagtccgatttcgcctgcgccaacgccttcaacaacagcattatccccgaggacacattcttcccaagccccgagagcagctgcggtacccagagttttgggttgttggaccctaaattgtgctatctgttggacggaatcctgttcatttacggagtgatcctgaccgcattgttcctgaagagaggccggaagaagctgctgtacatcttcaagcagcctttcatgcggcccgtgcagaccacccaggaagaggacggctgctcctgccggttccccgaggaagaagaaggcggctgcgagctgcgggttaagttttccagatccgcagacgcacccgcttaccaacaagggcagaaccaactctacaatgaacttaatttggggcggagggaagagtacgacgttctggacaaaaggaggggacgagatcccgagatgggcggaaagcctcagcgaaggaagaatccgcaagaggggctttataacgaactccagaaagataaaatggcagaagcctatagtgagattgggatgaagggagaaaggaggaggggtaaaggtcacgatgggttgtaccaaggattgagcacagccactaaagatacctatgatgcgctccacatgcaggccctgccgccaaga

SEQ ID NO: 5743 - DNA, 3228 bp, Artificial Sequence
  Synthetic Polynucloetide
atggccttaccagtgaccgccttgctcctgccgctggccttgctgctccacgccgccaggccggaagtgcaactggtggaatctggaggctctctggtgcagccagggggaagcctgagactgtcttgtgccgcttccggcttcaccttcgacgactacgccatgagctgggtgcgccaggtgccaggcaaaggcctggaatgggtgtccagcatcaactggagcggcacccacaccgattacgccgactccgtgaaaggcagattcacaatcagcagaaacaacgccaacaataccctgtacctgcagatgaactccctgaagtctgaggatacagcagtgtattattgcgccaagaactggcgggacgccggcaccacttggtttgagaaaagcggctctgccggacagggaacccaagtgacagtgtcctccggtaccggcggaggcggatctggcggcggaggtagcggtggcggaggatctgaattcgacatccagatgacacagagccctagcagcctgtctgccagcgtgggagacagagtgaccatcacatgcaaggccagcgaccacatcaacaactggctggcctggtatcagcagaagcctggacaggcccctaagctgctgatctacggcgctaccacactggaaacaggcgtgcccagcagattttctggcagcggctctggcaccgactacaccctgacaatatccagcctccagcctgaggacttcgccacctactactgtcagcagagctggaacaccccttggacattcggccagggcaccaagctggaaatcaagagactcgaggggaaaccaattcccaaccctcttctgggactggattcaaccggcagcggcgaggacctgaagaacgtgttcccacctgaggtggccgtgttcgagcctagcgaggccgagatcagccacacccagaaagccaccctcgtgtgcctggctaccggcttctaccccgaccatgtggaactgtcttggtgggtcaacggcaaagaggtgcacagcggcgtgtctaccgacccccagccactgaaagaacagcccgccctgaacgacagccggtactgcctgagcagcagactgagagtgtccgccaccttctggcagaacccccggaaccacttcagatgccaggtgcagttctacggcctgagcgagaacgacgagtggacccaggacagagccaagcccgtgacccagatcgtgtctgccgaagcctggggcagagccgattgcggatcccagagcttcggcctgctggaccccaagctgtgctacctgctggatggcatcctgttcatctacggcgtgatcctgaccgccctgttcctgaaacggggcagaaagaaactcctgtatatattcaaacaaccatttatgagaccagtacaaactactcaagaggaagatggctgtagctgccgatttccagaagaagaagaaggaggatgtgaactgagagtgaagttcagcagaagcgccgacgcccctgcctaccagcagggacagaaccaactgtacaacgagctgaacctgggcagacgggaagagtacgacgtgctggacaagcggagaggcagggaccctgagatgggcggaaagccccagcggagaaagaacccccaggaaggactgtataacgaactccagaaagacaagatggccgaagcctacagcgagatcggcatgaagggcgagcggagaagaggcaagggccacgatggcctgtaccagggcctgagcaccgccaccaaggacacctatgacgccctgcacatgcaggccctgcctccaagaagggccaagcgatctggatctggagcaacaaacttctcactactcaaacaagcaggtgacgtggaggagaatcccgggcctactagtatggactggatttggcgcatccttttccttgtcggcgctgctaccggcgcgcattccttcgaacaagttcagcttcaacagcctggcgctgagctggtcaaacctggcgcttctgtgaagatgagctgcaaagccagcggctacgccttcagcagctactggatcaactggatgaagcagaaacccggccagggactcgaatggatcggccaaatctatcccggcgacggcgacaccaactacaacggcaagttcaagggcagagccacactgaccgccgatacctctagcagcacagcctacatgcagctgagcagcctgaccagcgaagatagcgccgtgtacttctgtgcccggtccatcacaacagtcgtgggctgcgctatggactattggggccagggaacaagcgtgaccgtgtctagtacgcgtgagcagaaactgatctcggaagaggatctggggagcggcatccagaaccctgatcctgccgtgtaccagctgcgggatagcaagagcagcgacaagagcgtgtgtctgttcaccgacttcgacagccagaccaacgtgtcccagagcaaggactccgacgtgtacatcaccgataagaccgtgctggacatgcggagcatggacttcaagagcaactccgccgtggcctggtccaacaagtccgatttcgcctgcgccaacgccttcaacaacagcattatccccgaggacacattcttcccaagccccgagagcagctgcggtacccagagttttgggttgttggaccctaaattgtgctatctgttggacggaatcctgttcatttacggagtgatcctgaccgcattgttcctgaagagaggccggaagaagctgctgtacatcttcaagcagcctttcatgcggcccgtgcagaccacccaggaagaggacggctgctcctgccggttccccgaggaagaagaaggcggctgcgagctgcgggttaagttttccagatccgcagacgcacccgcttaccaacaagggcagaaccaactctacaatgaacttaatttggggcggagggaagagtacgacgttctggacaaaaggaggggacgagatcccgagatgggcggaaagcctcagcgaaggaagaatccgcaagaggggctttataacgaactccagaaagataaaatggcagaagcctatagtgagattgggatgaagggagaaaggaggaggggtaaaggtcacgatgggttgtaccaaggattgagcacagccactaaagatacctatgatgcgctccacatgcaggccctgccgccaaga

SEQ ID NO: 5744 - DNA, 2901 bp, Artificial Sequence
  Synthetic Polynucloetide
atggccttaccagtgaccgccttgctcctgccgctggccttgctgctccacgccgccaggccggaagtgcaactggtggaatctggaggctctctggtgcagccagggggaagcctgagactgtcttgtgccgcttccggcttcaccttcgacgactacgccatgagctgggtgcgccaggtgccaggcaaaggcctggaatgggtgtccagcatcaactggagcggcacccacaccgattacgccgactccgtgaaaggcagattcacaatcagcagaaacaacgccaacaataccctgtacctgcagatgaactccctgaagtctgaggatacagcagtgtattattgcgccaagaactggcgggacgccggcaccacttggtttgagaaaagcggctctgccggacagggaacccaagtgacagtgtcctccggtaccggcggaggcggatctggcggcggaggtagcggtggcggaggatctgaattcgacatccagatgacacagagccctagcagcctgtctgccagcgtgggagacagagtgaccatcacatgcaaggccagcgaccacatcaacaactggctggcctggtatcagcagaagcctggacaggcccctaagctgctgatctacggcgctaccacactggaaacaggcgtgcccagcagattttctggcagcggctctggcaccgactacaccctgacaatatccagcctccagcctgaggacttcgccacctactactgtcagcagagctggaacaccccttggacattcggccagggcaccaagctggaaatcaagagactcgagcagagcttcggcctgctggaccccaagctgtgctacctgctggatggcatcctgttcatctacggcgtgatcctgaccgccctgttcctgagagtgaagttcagcagaagcgccgacgcccctgcctaccagcagggacagaaccaactgtacaacgagctgaacctgggcagacgggaagagtacgacgtgctggacaagcggagaggcagggaccctgagatgggcggaaagccccagcggagaaagaacccccaggaaggactgtataacgaactccagaaagacaagatggccgaagcctacagcgagatcggcatgaagggcgagcggagaagaggcaagggccacgatggcctgtaccagggcctgagcaccgccaccaaggacacctatgacgccctgcacatgcaggccctgcctccaagaagggccaagcgatctggatctggagcaacaaacttctcactactcaaacaagcaggtgacgtggaggagaatcccgggcctactagtatggactggatttggcgcatccttttccttgtcggcgctgctaccggcgcgcattccttcgaacaagttcagcttcaacagcctggcgctgagctggtcaaacctggcgcttctgtgaagatgagctgcaaagccagcggctacgccttcagcagctactggatcaactggatgaagcagaaacccggccagggactcgaatggatcggccaaatctatcccggcgacggcgacaccaactacaacggcaagttcaagggcagagccacactgaccgccgatacctctagcagcacagcctacatgcagctgagcagcctgaccagcgaagatagcgccgtgtacttctgtgcccggtccatcacaacagtcgtgggctgcgctatggactattggggccagggaacaagcgtgaccgtgtctagtacgcgtcagagttttgggttgttggaccctaaattgtgctatctgttggacggaatcctgttcatttacggagtgatcctgaccgcattgttcctgcgggttaagttttccagatccgcagacgcacccgcttaccaacaagggcagaaccaactctacaatgaacttaatttggggcggagggaagagtacgacgttctggacaaaaggaggggacgagatcccgagatgggcggaaagcctcagcgaaggaagaatccgcaagaggggctttataacgaactccagaaagataaaatggcagaagcctatagtgagattgggatgaagggagaaaggaggaggggtaaaggtcacgatgggttgtaccaaggattgagcacagccactaaagatacctatgatgcgctccacatgcaggccctgccgccaagacgcgccaagagaagcggatctggcgtgaagcagaccctgaatttcgacctgctgaagctggctggcgacgtggaatccaacccaggcccttctagaggccatatgaccgagtacaagcccacggtgcgcctcgccacccgcgacgacgtccccagggccgtacgcaccctcgccgccgcgttcgccgactaccccgccacgcgccacaccgtcgatccggaccgccacatcgagcgggtcaccgagctgcaagaactcttcctcacgcgcgtcgggctcgacatcggcaaggtgtgggtcgcggacgacggcgccgcggtggcggtctggaccacgccggagagcgtcgaagcgggggcggtgttcgccgagatcggcccgcgcatggccgagttgagcggttcccggctggccgcgcagcaacagatggaaggcctcctggcgccgcaccggcccaaggagcccgcgtggttcctggccaccgtcggcgtctcgcccgaccaccagggcaagggtctgggcagcgccgtcgtgctccccggagtggaggcggccgagcgcgccggggtgcccgccttcctggagacctccgcgccccgcaacctccccttctacgagcggctcggcttcaccgtcaccgccgacgtcgaggtgcccgaaggaccgcgcacctggtgcatgacccgcaagcccggtgcctga

SEQ ID NO: 5745 - DNA, 2373 bp, Artificial Sequence
  Synthetic Polynucloetide
atggccttaccagtgaccgccttgctcctgccgctggccttgctgctccacgccgccaggccggaagtgcaactggtggaatctggaggctctctggtgcagccagggggaagcctgagactgtcttgtgccgcttccggcttcaccttcgacgactacgccatgagctgggtgcgccaggtgccaggcaaaggcctggaatgggtgtccagcatcaactggagcggcacccacaccgattacgccgactccgtgaaaggcagattcacaatcagcagaaacaacgccaacaataccctgtacctgcagatgaactccctgaagtctgaggatacagcagtgtattattgcgccaagaactggcgggacgccggcaccacttggtttgagaaaagcggctctgccggacagggaacccaagtgacagtgtcctccggtaccggcggaggcggatctggcggcggaggtagcggtggcggaggatctgaattcgacatccagatgacacagagccctagcagcctgtctgccagcgtgggagacagagtgaccatcacatgcaaggccagcgaccacatcaacaactggctggcctggtatcagcagaagcctggacaggcccctaagctgctgatctacggcgctaccacactggaaacaggcgtgcccagcagattttctggcagcggctctggcaccgactacaccctgacaatatccagcctccagcctgaggacttcgccacctactactgtcagcagagctggaacaccccttggacattcggccagggcaccaagctggaaatcaagagactcgagggacagcctaaggccaatcctaccgtgacactgttccctccaagcagcgaagaactccaggccaacaaggccacacttgtgtgcctgatctccgacttctaccctggggctgtgacagtggcttggaaggccgatggatctcctgtgaaagccggcgtggaaaccaccaagccatccaagcagagcaacaacaaatacgccgccagctcctacctgagcctgacacctgagcagtggaagtcccacagatcctacagctgccaagtgacccacgaaggcagcaccgtggaaaagacagtggcccctacagagtgcagccccatcaagaccgatgtgattacaatggaccccaaggacaactgctccaaggacgccaacgataccctgctgctccagctgaccaacaccagcgcctactacatgtacttgttgctgctgctgaagtccgtggtgtacttcgccatcatcacatgctgcctgctgcggagaaccgccttctgctgcaacggcgagaagtctagggccaagcgatctggatctggagcaacaaacttctcactactcaaacaagcaggtgacgtggaggagaatcccgggcctactagtatggactggatttggcgcatccttttccttgtcggcgctgctaccggcgcgcattccttcgaacaagttcagcttcaacagcctggcgctgagctggtcaaacctggcgcttctgtgaagatgagctgcaaagccagcggctacgccttcagcagctactggatcaactggatgaagcagaaacccggccagggactcgaatggatcggccaaatctatcccggcgacggcgacaccaactacaacggcaagttcaagggcagagccacactgaccgccgatacctctagcagcacagcctacatgcagctgagcagcctgaccagcgaagatagcgccgtgtacttctgtgcccggtccatcacaacagtcgtgggctgcgctatggactattggggccagggaacaagcgtgaccgtgtctagtacgcgtgcctctacaaagggaccctccgtgtttcctctggctcccagcagcaagtctacaagcggaggaacagccgctctgggctgcctggtcaaggattactttcccgagcctgtgaccgtgtcctggaatagcggagcactgacaagcggcgtgcacacctttccagccgtgctgcaaagcagcggcctgtactctctgagcagcgtggtcacagtgcctagctctagcctgggcacccagacctacatctgcaatgtgaaccacaagcctagcaacaccaaggtggacaagagagtggaacccaagagctgtgaagtgaaaaccgactccaccgaccacgtgaagcccaaagagacagagaacaccaagcagcccagcaagagctgccacaagcccaaggccatcgtgcacaccgagaaagtgaacatgatgagcctgaccgtgctgggcctgcggatgctgttcgccaaaaccgtggccgtgaacttcctgctgaccgccaagctgttcttcctc

SEQ ID NO: 5746 - DNA, 2307 bp, Artificial Sequence
  Synthetic Polynucloetide
atggccttaccagtgaccgccttgctcctgccgctggccttgctgctccacgccgccaggccggaagtgcaactggtggaatctggaggctctctggtgcagccagggggaagcctgagactgtcttgtgccgcttccggcttcaccttcgacgactacgccatgagctgggtgcgccaggtgccaggcaaaggcctggaatgggtgtccagcatcaactggagcggcacccacaccgattacgccgactccgtgaaaggcagattcacaatcagcagaaacaacgccaacaataccctgtacctgcagatgaactccctgaagtctgaggatacagcagtgtattattgcgccaagaactggcgggacgccggcaccacttggtttgagaaaagcggctctgccggacagggaacccaagtgacagtgtcctccggtaccggcggaggcggatctggcggcggaggtagcggtggcggaggatctgaattcgacatccagatgacacagagccctagcagcctgtctgccagcgtgggagacagagtgaccatcacatgcaaggccagcgaccacatcaacaactggctggcctggtatcagcagaagcctggacaggcccctaagctgctgatctacggcgctaccacactggaaacaggcgtgcccagcagattttctggcagcggctctggcaccgactacaccctgacaatatccagcctccagcctgaggacttcgccacctactactgtcagcagagctggaacaccccttggacattcggccagggcaccaagctggaaatcaagagactcgagggacagcctaaggccaatcctaccgtgacactgttccctccaagcagcgaagaactccaggccaacaaggccacacttgtgtgcctgatctccgacttctaccctggggctgtgacagtggcttggaaggccgatggatctcctgtgaaagccggcgtggaaaccaccaagccatccaagcagagcaacaacaaatacgccgccagctcctacctgagcctgacacctgagcagtggaagtcccacagatcctacagctgccaagtgacccacgaaggcagcaccgtggaaaagacagtggcccctacagagtgcagcggcagagccgattgcggcatcaccagcgccagctaccaccagggcgtgctgagcgccaccatcctgtacgagatcctgctgggcaaggccaccctgtacgccgtgctggtgtctgccctggtgctgatggctatggtcaagcggaaggacagccggggaagggccaagcgatctggatctggagcaacaaacttctcactactcaaacaagcaggtgacgtggaggagaatcccgggcctactagtatggactggatttggcgcatccttttccttgtcggcgctgctaccggcgcgcattccttcgaacaagttcagcttcaacagcctggcgctgagctggtcaaacctggcgcttctgtgaagatgagctgcaaagccagcggctacgccttcagcagctactggatcaactggatgaagcagaaacccggccagggactcgaatggatcggccaaatctatcccggcgacggcgacaccaactacaacggcaagttcaagggcagagccacactgaccgccgatacctctagcagcacagcctacatgcagctgagcagcctgaccagcgaagatagcgccgtgtacttctgtgcccggtccatcacaacagtcgtgggctgcgctatggactattggggccagggaacaagcgtgaccgtgtctagtacgcgtgcctctacaaagggaccctccgtgtttcctctggctcccagcagcaagtctacaagcggaggaacagccgctctgggctgcctggtcaaggattactttcccgagcctgtgaccgtgtcctggaatagcggagcactgacaagcggcgtgcacacctttccagccgtgctgcaaagcagcggcctgtactctctgagcagcgtggtcacagtgcctagctctagcctgggcacccagacctacatctgcaatgtgaaccacaagcctagcaacaccaaggtggacaagagagtggaacccaagagctgtatccccgaggacacattcttcccaagcagcgacgtgccctgcgacgtgaagctggtggaaaagagcttcgagacagacaccaacctgaacttccagaacctgagcgtgatcggcttcagaatcctgctgctgaaagtggccggctttaacctgctgatgaccctgcggctgtggtccagc

SEQ ID NO: 5747 - DNA, 2307 bp, Artificial Sequence
  Synthetic Polynucloetide
atggccttaccagtgaccgccttgctcctgccgctggccttgctgctccacgccgccaggccggaagtgcaactggtggaatctggaggctctctggtgcagccagggggaagcctgagactgtcttgtgccgcttccggcttcaccttcgacgactacgccatgagctgggtgcgccaggtgccaggcaaaggcctggaatgggtgtccagcatcaactggagcggcacccacaccgattacgccgactccgtgaaaggcagattcacaatcagcagaaacaacgccaacaataccctgtacctgcagatgaactccctgaagtctgaggatacagcagtgtattattgcgccaagaactggcgggacgccggcaccacttggtttgagaaaagcggctctgccggacagggaacccaagtgacagtgtcctccggtaccggcggaggcggatctggcggcggaggtagcggtggcggaggatctgaattcgacatccagatgacacagagccctagcagcctgtctgccagcgtgggagacagagtgaccatcacatgcaaggccagcgaccacatcaacaactggctggcctggtatcagcagaagcctggacaggcccctaagctgctgatctacggcgctaccacactggaaacaggcgtgcccagcagattttctggcagcggctctggcaccgactacaccctgacaatatccagcctccagcctgaggacttcgccacctactactgtcagcagagctggaacaccccttggacattcggccagggcaccaagctggaaatcaagagactcgagggacagcctaaggccaatcctaccgtgacactgttccctccaagcagcgaagaactccaggccaacaaggccacacttgtgtgcctgatctccgacttctaccctggggctgtgacagtggcttggaaggccgatggatctcctgtgaaagccggcgtggaaaccaccaagccatccaagcagagcaacaacaaatacgccgccagctcctacctgagcctgacacctgagcagtggaagtcccacagatcctacagctgccaagtgacccacgaaggcagcaccgtggaaaagacagtggcccctacagagtgcagcggcagagccgattgcggctttaccagcgagagctaccagcagggcgtgctgagcgccaccatcctgtacgagatcctgctgggcaaggccaccctgtacgccgtgctggtgtctgccctggtgctgatggctatggtcaagcggaaggacagccggggaagggccaagcgatctggatctggagcaacaaacttctcactactcaaacaagcaggtgacgtggaggagaatcccgggcctactagtatggactggatttggcgcatccttttccttgtcggcgctgctaccggcgcgcattccttcgaacaagttcagcttcaacagcctggcgctgagctggtcaaacctggcgcttctgtgaagatgagctgcaaagccagcggctacgccttcagcagctactggatcaactggatgaagcagaaacccggccagggactcgaatggatcggccaaatctatcccggcgacggcgacaccaactacaacggcaagttcaagggcagagccacactgaccgccgatacctctagcagcacagcctacatgcagctgagcagcctgaccagcgaagatagcgccgtgtacttctgtgcccggtccatcacaacagtcgtgggctgcgctatggactattggggccagggaacaagcgtgaccgtgtctagtacgcgtgcctctacaaagggaccctccgtgtttcctctggctcccagcagcaagtctacaagcggaggaacagccgctctgggctgcctggtcaaggattactttcccgagcctgtgaccgtgtcctggaatagcggagcactgacaagcggcgtgcacacctttccagccgtgctgcaaagcagcggcctgtactctctgagcagcgtggtcacagtgcctagctctagcctgggcacccagacctacatctgcaatgtgaaccacaagcctagcaacaccaaggtggacaagagagtggaacccaagagctgtatccccgaggacacattcttcccaagccccgagagcagctgcgacgtgaagctggtggaaaagagcttcgagacagacaccaacctgaacttccagaacctgagcgtgatcggcttcagaatcctgctgctgaaagtggccggctttaacctgctgatgaccctgcggctgtggtccagc

SEQ ID NO: 5748 - DNA, 1785 bp, Artificial Sequence
  Synthetic Polynucloetide
atggccttaccagtgaccgccttgctcctgccgctggccttgctgctccacgccgccaggccggaagtgcaactggtggaatctggaggctctctggtgcagccagggggaagcctgagactgtcttgtgccgcttccggcttcaccttcgacgactacgccatgagctgggtgcgccaggtgccaggcaaaggcctggaatgggtgtccagcatcaactggagcggcacccacaccgattacgccgactccgtgaaaggcagattcacaatcagcagaaacaacgccaacaataccctgtacctgcagatgaactccctgaagtctgaggatacagcagtgtattattgcgccaagaactggcgggacgccggcaccacttggtttgagaaaagcggctctgccggacagggaacccaagtgacagtgtcctccggtaccggcggaggcggatctggcggcggaggtagcggtggcggaggatctgaattcgacatccagatgacacagagccctagcagcctgtctgccagcgtgggagacagagtgaccatcacatgcaaggccagcgaccacatcaacaactggctggcctggtatcagcagaagcctggacaggcccctaagctgctgatctacggcgctaccacactggaaacaggcgtgcccagcagattttctggcagcggctctggcaccgactacaccctgacaatatccagcctccagcctgaggacttcgccacctactactgtcagcagagctggaacaccccttggacattcggccagggcaccaagctggaaatcaagagaggcggaggcggaagtggaggcggaggatctggcggcggaggctctcaagttcagcttcaacagcctggcgctgagctggtcaaacctggcgcttctgtgaagatgagctgcaaagccagcggctacgccttcagcagctactggatcaactggatgaagcagaaacccggccagggactcgaatggatcggccaaatctatcccggcgacggcgacaccaactacaacggcaagttcaagggcagagccacactgaccgccgatacctctagcagcacagcctacatgcagctgagcagcctgaccagcgaagatagcgccgtgtacttctgtgcccggtccatcacaacagtcgtgggctgcgctatggactattggggccagggaacaagcgtgaccgtgtctagtacgcgtgacggtaacgaggagatgggaggaatcactcaaaccccttacaaagtctcaatttcaggaacaactgttatccttacatgtccccagtatcctggcagcgagatcctttggcagcataacgacaagaatatagggggagatgaagacgataagaatatcggatctgacgaggatcacttgagcctgaaagagttctccgagcttgaacaaagcggatattatgtgtgctatccgcgcgggtcaaagccggaagacgctaacttttacctttatctccgagccagagtgtgcgaaaattgcatggaaatggacgttatgtccgttgctacaatagttatcgtagatatatgcatcacgggtggactgcttctgctggtttattattggtccaagaatagaaaggccaaagctaaacccgtgaccagaggcgctggcgcaggcggaaggcaaaggggacaaaacaaagaacggccaccaccagtgccaaatccagattatgagcctattcggaaaggacagagggacctgtactctggcctgaatcagagaagaatc

SEQ ID NO: 5749 - DNA, 1680 bp, Artificial Sequence
  Synthetic Polynucloetide
atggccttaccagtgaccgccttgctcctgccgctggccttgctgctccacgccgccaggccggaagtgcaactggtggaatctggaggctctctggtgcagccagggggaagcctgagactgtcttgtgccgcttccggcttcaccttcgacgactacgccatgagctgggtgcgccaggtgccaggcaaaggcctggaatgggtgtccagcatcaactggagcggcacccacaccgattacgccgactccgtgaaaggcagattcacaatcagcagaaacaacgccaacaataccctgtacctgcagatgaactccctgaagtctgaggatacagcagtgtattattgcgccaagaactggcgggacgccggcaccacttggtttgagaaaagcggctctgccggacagggaacccaagtgacagtgtcctccggtaccggcggaggcggatctggcggcggaggtagcggtggcggaggatctgaattcgacatccagatgacacagagccctagcagcctgtctgccagcgtgggagacagagtgaccatcacatgcaaggccagcgaccacatcaacaactggctggcctggtatcagcagaagcctggacaggcccctaagctgctgatctacggcgctaccacactggaaacaggcgtgcccagcagattttctggcagcggctctggcaccgactacaccctgacaatatccagcctccagcctgaggacttcgccacctactactgtcagcagagctggaacaccccttggacattcggccagggcaccaagctggaaatcaagagaggcggaggcggaagtggaggcggaggatctggcggcggaggctctcaagttcagcttcaacagcctggcgctgagctggtcaaacctggcgcttctgtgaagatgagctgcaaagccagcggctacgccttcagcagctactggatcaactggatgaagcagaaacccggccagggactcgaatggatcggccaaatctatcccggcgacggcgacaccaactacaacggcaagttcaagggcagagccacactgaccgccgatacctctagcagcacagcctacatgcagctgagcagcctgaccagcgaagatagcgccgtgtacttctgtgcccggtccatcacaacagtcgtgggctgcgctatggactattggggccagggaacaagcgtgaccgtgtctagtacgcgtttcaagatccccatcgaggaactggaagatcgggtgttcgtgaactgcaacacctctatcacctgggtggaaggcaccgtgggaacactgctgagcgacatcaccagactggacctcggcaagcggattctggaccctcggggcatctacagatgcaacggcaccgacatctacaaggacaaagaaagcaccgtgcaggtccactacagaatgtgccagtcctgcgtggaactggaccctgctacagtggccggcatcatcgtgaccgatgtgatcgctactctgctgctggctctgggagtgttctgcttcgccggacacgaaacaggcagactgtctggcgctgccgatacacaggccctgctgagaaacgaccaagtgtatcagcccctgcgcgacagagatgatgcccagtattctcacctcggcggcaactgggctagaaacaag

SEQ ID NO: 5750 - DNA, 1710 bp, Artificial Sequence
  Synthetic Polynucloetide
atggccttaccagtgaccgccttgctcctgccgctggccttgctgctccacgccgccaggccggaagtgcaactggtggaatctggaggctctctggtgcagccagggggaagcctgagactgtcttgtgccgcttccggcttcaccttcgacgactacgccatgagctgggtgcgccaggtgccaggcaaaggcctggaatgggtgtccagcatcaactggagcggcacccacaccgattacgccgactccgtgaaaggcagattcacaatcagcagaaacaacgccaacaataccctgtacctgcagatgaactccctgaagtctgaggatacagcagtgtattattgcgccaagaactggcgggacgccggcaccacttggtttgagaaaagcggctctgccggacagggaacccaagtgacagtgtcctccggtaccggcggaggcggatctggcggcggaggtagcggtggcggaggatctgaattcgacatccagatgacacagagccctagcagcctgtctgccagcgtgggagacagagtgaccatcacatgcaaggccagcgaccacatcaacaactggctggcctggtatcagcagaagcctggacaggcccctaagctgctgatctacggcgctaccacactggaaacaggcgtgcccagcagattttctggcagcggctctggcaccgactacaccctgacaatatccagcctccagcctgaggacttcgccacctactactgtcagcagagctggaacaccccttggacattcggccagggcaccaagctggaaatcaagagaggcggaggcggaagtggaggcggaggatctggcggcggaggctctcaagttcagcttcaacagcctggcgctgagctggtcaaacctggcgcttctgtgaagatgagctgcaaagccagcggctacgccttcagcagctactggatcaactggatgaagcagaaacccggccagggactcgaatggatcggccaaatctatcccggcgacggcgacaccaactacaacggcaagttcaagggcagagccacactgaccgccgatacctctagcagcacagcctacatgcagctgagcagcctgaccagcgaagatagcgccgtgtacttctgtgcccggtccatcacaacagtcgtgggctgcgctatggactattggggccagggaacaagcgtgaccgtgtctagtacgcgtcagagcatcaagggcaaccacctggtcaaggtgtacgactaccaagaggacggcagcgtgctgctgacatgtgatgccgaggccaagaacatcacctggtttaaggacggcaagatgatcggcttcctgaccgaggacaagaagaagtggaacctgggcagcaacgctaaggaccccagaggcatgtatcagtgcaagggcagccagaacaagagcaagcccctccaggtgtactaccggatgtgccagaactgcatcgagctgaacgccgctaccatcagcggctttctgttcgccgagatcgtgtccatcttcgtgctggccgtgggcgtgtactttatcgctggacaggatggcgtgcggcagagcagagcttccgataagcaaaccctgctgcctaacgaccagctgtaccagcctctgaaggacagagaggacgaccagtacagccacctccagggcaatcagctgagaagaaac

SEQ ID NO: 5751 - DNA, 1659 bp, Artificial Sequence
  Synthetic Polynucloetide
atggccttaccagtgaccgccttgctcctgccgctggccttgctgctccacgccgccaggccggaagtgcaactggtggaatctggaggctctctggtgcagccagggggaagcctgagactgtcttgtgccgcttccggcttcaccttcgacgactacgccatgagctgggtgcgccaggtgccaggcaaaggcctggaatgggtgtccagcatcaactggagcggcacccacaccgattacgccgactccgtgaaaggcagattcacaatcagcagaaacaacgccaacaataccctgtacctgcagatgaactccctgaagtctgaggatacagcagtgtattattgcgccaagaactggcgggacgccggcaccacttggtttgagaaaagcggctctgccggacagggaacccaagtgacagtgtcctccggtaccggcggaggcggatctggcggcggaggtagcggtggcggaggatctgaattcgacatccagatgacacagagccctagcagcctgtctgccagcgtgggagacagagtgaccatcacatgcaaggccagcgaccacatcaacaactggctggcctggtatcagcagaagcctggacaggcccctaagctgctgatctacggcgctaccacactggaaacaggcgtgcccagcagattttctggcagcggctctggcaccgactacaccctgacaatatccagcctccagcctgaggacttcgccacctactactgtcagcagagctggaacaccccttggacattcggccagggcaccaagctggaaatcaagagaggcggaggcggaagtggaggcggaggatctggcggcggaggctctcaagttcagcttcaacagcctggcgctgagctggtcaaacctggcgcttctgtgaagatgagctgcaaagccagcggctacgccttcagcagctactggatcaactggatgaagcagaaacccggccagggactcgaatggatcggccaaatctatcccggcgacggcgacaccaactacaacggcaagttcaagggcagagccacactgaccgccgatacctctagcagcacagcctacatgcagctgagcagcctgaccagcgaagatagcgccgtgtacttctgtgcccggtccatcacaacagtcgtgggctgcgctatggactattggggccagggaacaagcgtgaccgtgtctagtacgcgtcagagttttgggttgttggaccctaaattgtgctatctgttggacggaatcctgttcatttacggagtgatcctgaccgcattgttcctgcgggttaagttttccagatccgcagacgcacccgcttaccaacaagggcagaaccaactctacaatgaacttaatttggggcggagggaagagtacgacgttctggacaaaaggaggggacgagatcccgagatgggcggaaagcctcagcgaaggaagaatccgcaagaggggctttataacgaactccagaaagataaaatggcagaagcctatagtgagattgggatgaagggagaaaggaggaggggtaaaggtcacgatgggttgtaccaaggattgagcacagccactaaagatacctatgatgcgctccacatgcaggccctgccgccaaga

SEQ ID NO: 5752 - DNA, 2361 bp, Artificial Sequence
  Synthetic Polynucloetide
atggccttaccagtgaccgccttgctcctgccgctggccttgctgctccacgccgccaggccggaagtgcaactggtggaatctggaggctctctggtgcagccagggggaagcctgagactgtcttgtgccgcttccggcttcaccttcgacgactacgccatgagctgggtgcgccaggtgccaggcaaaggcctggaatgggtgtccagcatcaactggagcggcacccacaccgattacgccgactccgtgaaaggcagattcacaatcagcagaaacaacgccaacaataccctgtacctgcagatgaactccctgaagtctgaggatacagcagtgtattattgcgccaagaactggcgggacgccggcaccacttggtttgagaaaagcggctctgccggacagggaacccaagtgacagtgtcctccggtaccggcggaggcggatctggcggcggaggtagcggtggcggaggatctgaattcgacatccagatgacacagagccctagcagcctgtctgccagcgtgggagacagagtgaccatcacatgcaaggccagcgaccacatcaacaactggctggcctggtatcagcagaagcctggacaggcccctaagctgctgatctacggcgctaccacactggaaacaggcgtgcccagcagattttctggcagcggctctggcaccgactacaccctgacaatatccagcctccagcctgaggacttcgccacctactactgtcagcagagctggaacaccccttggacattcggccagggcaccaagctggaaatcaagagaggcggaggcggaagtggaggcggaggatctggcggcggaggctctcaagttcagcttcaacagcctggcgctgagctggtcaaacctggcgcttctgtgaagatgagctgcaaagccagcggctacgccttcagcagctactggatcaactggatgaagcagaaacccggccagggactcgaatggatcggccaaatctatcccggcgacggcgacaccaactacaacggcaagttcaagggcagagccacactgaccgccgatacctctagcagcacagcctacatgcagctgagcagcctgaccagcgaagatagcgccgtgtacttctgtgcccggtccatcacaacagtcgtgggctgcgctatggactattggggccagggaacaagcgtgaccgtgtctagtacgcgtgggagcggcatccagaaccctgatcctgccgtgtaccagctgcgggatagcaagagcagcgacaagagcgtgtgtctgttcaccgacttcgacagccagaccaacgtgtcccagagcaaggactccgacgtgtacatcaccgataagaccgtgctggacatgcggagcatggacttcaagagcaactccgccgtggcctggtccaacaagtccgatttcgcctgcgccaacgccttcaacaacagcattatccccgaggacacattcttcccaagccccgagagcagctgcgacgtgaagctggtggaaaagagcttcgagacagacaccaacctgaacttccagaacctgagcgtgatcggcttcagaatcctgctgctgaaagtggccggctttaacctgctgatgaccctgcggctgtggtccagccgcgccaagagaagcggatctggcgtgaagcagaccctgaatttcgacctgctgaagctggctggcgacgtggaatccaacccaggcccttctagaggccatatgaccgagtacaagcccacggtgcgcctcgccacccgcgacgacgtccccagggccgtacgcaccctcgccgccgcgttcgccgactaccccgccacgcgccacaccgtcgatccggaccgccacatcgagcgggtcaccgagctgcaagaactcttcctcacgcgcgtcgggctcgacatcggcaaggtgtgggtcgcggacgacggcgccgcggtggcggtctggaccacgccggagagcgtcgaagcgggggcggtgttcgccgagatcggcccgcgcatggccgagttgagcggttcccggctggccgcgcagcaacagatggaaggcctcctggcgccgcaccggcccaaggagcccgcgtggttcctggccaccgtcggcgtctcgcccgaccaccagggcaagggtctgggcagcgccgtcgtgctccccggagtggaggcggccgagcgcgccggggtgcccgccttcctggagacctccgcgccccgcaacctccccttctacgagcggctcggcttcaccgtcaccgccgacgtcgaggtgcccgaaggaccgcgcacctggtgcatgacccgcaagcccggtgcctga

SEQ ID NO: 5753 - DNA, 2457 bp, Artificial Sequence
  Synthetic Polynucloetide
atggccttaccagtgaccgccttgctcctgccgctggccttgctgctccacgccgccaggccggaagtgcaactggtggaatctggaggctctctggtgcagccagggggaagcctgagactgtcttgtgccgcttccggcttcaccttcgacgactacgccatgagctgggtgcgccaggtgccaggcaaaggcctggaatgggtgtccagcatcaactggagcggcacccacaccgattacgccgactccgtgaaaggcagattcacaatcagcagaaacaacgccaacaataccctgtacctgcagatgaactccctgaagtctgaggatacagcagtgtattattgcgccaagaactggcgggacgccggcaccacttggtttgagaaaagcggctctgccggacagggaacccaagtgacagtgtcctccggtaccggcggaggcggatctggcggcggaggtagcggtggcggaggatctgaattcgacatccagatgacacagagccctagcagcctgtctgccagcgtgggagacagagtgaccatcacatgcaaggccagcgaccacatcaacaactggctggcctggtatcagcagaagcctggacaggcccctaagctgctgatctacggcgctaccacactggaaacaggcgtgcccagcagattttctggcagcggctctggcaccgactacaccctgacaatatccagcctccagcctgaggacttcgccacctactactgtcagcagagctggaacaccccttggacattcggccagggcaccaagctggaaatcaagagaggcggaggcggaagtggaggcggaggatctggcggcggaggctctcaagttcagcttcaacagcctggcgctgagctggtcaaacctggcgcttctgtgaagatgagctgcaaagccagcggctacgccttcagcagctactggatcaactggatgaagcagaaacccggccagggactcgaatggatcggccaaatctatcccggcgacggcgacaccaactacaacggcaagttcaagggcagagccacactgaccgccgatacctctagcagcacagcctacatgcagctgagcagcctgaccagcgaagatagcgccgtgtacttctgtgcccggtccatcacaacagtcgtgggctgcgctatggactattggggccagggaacaagcgtgaccgtgtctagtctcgaggacctgaagaacgtgttcccacctgaggtggccgtgttcgagcctagcgaggccgagatcagccacacccagaaagccaccctcgtgtgcctggctaccggcttctaccccgaccatgtggaactgtcttggtgggtcaacggcaaagaggtgcacagcggcgtgtctaccgacccccagccactgaaagaacagcccgccctgaacgacagccggtactgcctgagcagcagactgagagtgtccgccaccttctggcagaacccccggaaccacttcagatgccaggtgcagttctacggcctgagcgagaacgacgagtggacccaggacagagccaagcccgtgacccagatcgtgtctgccgaagcctggggcagagccgattgcggctttaccagcgagagctaccagcagggcgtgctgagcgccaccatcctgtacgagatcctgctgggcaaggccaccctgtacgccgtgctggtgtctgccctggtgctgatggctatggtcaagcggaaggacagccggggaagggccaagcgatctggatctggagcaacaaacttctcactactcaaacaagcaggtgacgtggaggagaatcccgggcctactagaggccatatgaccgagtacaagcccacggtgcgcctcgccacccgcgacgacgtccccagggccgtacgcaccctcgccgccgcgttcgccgactaccccgccacgcgccacaccgtcgatccggaccgccacatcgagcgggtcaccgagctgcaagaactcttcctcacgcgcgtcgggctcgacatcggcaaggtgtgggtcgcggacgacggcgccgcggtggcggtctggaccacgccggagagcgtcgaagcgggggcggtgttcgccgagatcggcccgcgcatggccgagttgagcggttcccggctggccgcgcagcaacagatggaaggcctcctggcgccgcaccggcccaaggagcccgcgtggttcctggccaccgtcggcgtctcgcccgaccaccagggcaagggtctgggcagcgccgtcgtgctccccggagtggaggcggccgagcgcgccggggtgcccgccttcctggagacctccgcgccccgcaacctccccttctacgagcggctcggcttcaccgtcaccgccgacgtcgaggtgcccgaaggaccgcgcacctggtgcatgacccgcaagcccggtgcctga

SEQ ID NO: 5754 - DNA, 2607 bp, Artificial Sequence
  Synthetic Polynucloetide
atggccttaccagtgaccgccttgctcctgccgctggccttgctgctccacgccgccaggccggaagtgcaactggtggaatctggaggctctctggtgcagccagggggaagcctgagactgtcttgtgccgcttccggcttcaccttcgacgactacgccatgagctgggtgcgccaggtgccaggcaaaggcctggaatgggtgtccagcatcaactggagcggcacccacaccgattacgccgactccgtgaaaggcagattcacaatcagcagaaacaacgccaacaataccctgtacctgcagatgaactccctgaagtctgaggatacagcagtgtattattgcgccaagaactggcgggacgccggcaccacttggtttgagaaaagcggctctgccggacagggaacccaagtgacagtgtcctccggtaccggcggaggcggatctggcggcggaggtagcggtggcggaggatctgaattcgacatccagatgacacagagccctagcagcctgtctgccagcgtgggagacagagtgaccatcacatgcaaggccagcgaccacatcaacaactggctggcctggtatcagcagaagcctggacaggcccctaagctgctgatctacggcgctaccacactggaaacaggcgtgcccagcagattttctggcagcggctctggcaccgactacaccctgacaatatccagcctccagcctgaggacttcgccacctactactgtcagcagagctggaacaccccttggacattcggccagggcaccaagctggaaatcaagagaggcggaggcggaagtggaggcggaggatctggcggcggaggctctcaagttcagcttcaacagcctggcgctgagctggtcaaacctggcgcttctgtgaagatgagctgcaaagccagcggctacgccttcagcagctactggatcaactggatgaagcagaaacccggccagggactcgaatggatcggccaaatctatcccggcgacggcgacaccaactacaacggcaagttcaagggcagagccacactgaccgccgatacctctagcagcacagcctacatgcagctgagcagcctgaccagcgaagatagcgccgtgtacttctgtgcccggtccatcacaacagtcgtgggctgcgctatggactattggggccagggaacaagcgtgaccgtgtctagtacgcgtgagcagaaactgatctcggaagaggatctggggagcggcaccccattcccttctctggcccctcccatcatgctgctggtggacggcaagcagcagatggtggtcgtgtgcctggtgctggatgtggccccacctggactggacagccccatctggtttagcgccggcaatggctctgccctggacgcctttacctacggcccaagccctgccaccgatggcacctggacaaatctggcccacctgagcctgcccagcgaggaactggcttcttgggagcctctcgtgtgccacacaggacctggcgctgagggacacagcagatccacccagcctatgcacctgtctggcgaggccagcaccgccagaacctgtcctcaggaacctctgagaggcacccctggcggagcactgtggctgggagtgctgagactgctgctgttcaagctgctgctgtttgacctgctgctgacctgctcctgtctgtgcgatcctgccggccctctgccttctcctgccaccaccacaagactgagagccctgggcagccacagactgcaccctgccacagagacaggcggcagagaggccacaagcagccctagaccccagcccagagacagaagatggggcgataccccccctggcagaaagcctggatctccagtccgcgccaagagaagcggatctggcgtgaagcagaccctgaatttcgacctgctgaagctggctggcgacgtggaatccaacccaggcccttctagatctagaggccatatgaccgagtacaagcccacggtgcgcctcgccacccgcgacgacgtccccagggccgtacgcaccctcgccgccgcgttcgccgactaccccgccacgcgccacaccgtcgatccggaccgccacatcgagcgggtcaccgagctgcaagaactcttcctcacgcgcgtcgggctcgacatcggcaaggtgtgggtcgcggacgacggcgccgcggtggcggtctggaccacgccggagagcgtcgaagcgggggcggtgttcgccgagatcggcccgcgcatggccgagttgagcggttcccggctggccgcgcagcaacagatggaaggcctcctggcgccgcaccggcccaaggagcccgcgtggttcctggccaccgtcggcgtctcgcccgaccaccagggcaagggtctgggcagcgccgtcgtgctccccggagtggaggcggccgagcgcgccggggtgcccgccttcctggagacctccgcgccccgcaacctccccttctacgagcggctcggcttcaccgtcaccgccgacgtcgaggtgcccgaaggaccgcgcacctggtgcatgacccgcaagcccggtgcctga

SEQ ID NO: 5755 - DNA, 2049 bp, Artificial Sequence
  Synthetic Polynucloetide
atggccttaccagtgaccgccttgctcctgccgctggccttgctgctccacgccgccaggccggaagtgcaactggtggaatctggaggctctctggtgcagccagggggaagcctgagactgtcttgtgccgcttccggcttcaccttcgacgactacgccatgagctgggtgcgccaggtgccaggcaaaggcctggaatgggtgtccagcatcaactggagcggcacccacaccgattacgccgactccgtgaaaggcagattcacaatcagcagaaacaacgccaacaataccctgtacctgcagatgaactccctgaagtctgaggatacagcagtgtattattgcgccaagaactggcgggacgccggcaccacttggtttgagaaaagcggctctgccggacagggaacccaagtgacagtgtcctccggtaccggcggaggcggatctggcggcggaggtagcggtggcggaggatctgaattcgacatccagatgacacagagccctagcagcctgtctgccagcgtgggagacagagtgaccatcacatgcaaggccagcgaccacatcaacaactggctggcctggtatcagcagaagcctggacaggcccctaagctgctgatctacggcgctaccacactggaaacaggcgtgcccagcagattttctggcagcggctctggcaccgactacaccctgacaatatccagcctccagcctgaggacttcgccacctactactgtcagcagagctggaacaccccttggacattcggccagggcaccaagctggaaatcaagagactcgaggacctgaagaacgtgttcccacctgaggtggccgtgttcgagcctagcgaggccgagatcagccacacccagaaagccaccctcgtgtgcctggctaccggcttctaccccgaccatgtggaactgtcttggtgggtcaacggcaaagaggtgcacagcggcgtgtctaccgacccccagccactgaaagaacagcccgccctgaacgacagccggtactgcctgagcagcagactgagagtgtccgccaccttctggcagaacccccggaaccacttcagatgccaggtgcagttctacggcctgagcgagaacgacgagtggacccaggacagagccaagcccgtgacccagatcgtgtctgccgaagcctggggcagagccgattgcggctttaccagcgagagctaccagcagggcgtgctgagcgccaccatcctgtacgagatcctgctgggcaaggccaccctgtacgccgtgctggtgtctgccctggtgctgatggctatggtcaagcggaaggacagccggggaagggccaagcgatctggatctggagcaacaaacttctcactactcaaacaagcaggtgacgtggaggagaatcccgggcctactagaggccatatgaccgagtacaagcccacggtgcgcctcgccacccgcgacgacgtccccagggccgtacgcaccctcgccgccgcgttcgccgactaccccgccacgcgccacaccgtcgatccggaccgccacatcgagcgggtcaccgagctgcaagaactcttcctcacgcgcgtcgggctcgacatcggcaaggtgtgggtcgcggacgacggcgccgcggtggcggtctggaccacgccggagagcgtcgaagcgggggcggtgttcgccgagatcggcccgcgcatggccgagttgagcggttcccggctggccgcgcagcaacagatggaaggcctcctggcgccgcaccggcccaaggagcccgcgtggttcctggccaccgtcggcgtctcgcccgaccaccagggcaagggtctgggcagcgccgtcgtgctccccggagtggaggcggccgagcgcgccggggtgcccgccttcctggagacctccgcgccccgcaacctccccttctacgagcggctcggcttcaccgtcaccgccgacgtcgaggtgcccgaaggaccgcgcacctggtgcatgacccgcaagcccggtgcctga

SEQ ID NO: 5756 - DNA, 1356 bp, Artificial Sequence
  Synthetic Polynucloetide
atggccttaccagtgaccgccttgctcctgccgctggccttgctgctccacgccgccaggccggaagtgcaactggtggaatctggaggctctctggtgcagccagggggaagcctgagactgtcttgtgccgcttccggcttcaccttcgacgactacgccatgagctgggtgcgccaggtgccaggcaaaggcctggaatgggtgtccagcatcaactggagcggcacccacaccgattacgccgactccgtgaaaggcagattcacaatcagcagaaacaacgccaacaataccctgtacctgcagatgaactccctgaagtctgaggatacagcagtgtattattgcgccaagaactggcgggacgccggcaccacttggtttgagaaaagcggctctgccggacagggaacccaagtgacagtgtcctccggtaccggcggaggcggatctggcggcggaggtagcggtggcggaggatctgaattcgacatccagatgacacagagccctagcagcctgtctgccagcgtgggagacagagtgaccatcacatgcaaggccagcgaccacatcaacaactggctggcctggtatcagcagaagcctggacaggcccctaagctgctgatctacggcgctaccacactggaaacaggcgtgcccagcagattttctggcagcggctctggcaccgactacaccctgacaatatccagcctccagcctgaggacttcgccacctactactgtcagcagagctggaacaccccttggacattcggccagggcaccaagctggaaatcaagagactcgaggacctgaagaacgtgttcccacctgaggtggccgtgttcgagcctagcgaggccgagatcagccacacccagaaagccaccctcgtgtgcctggctaccggcttctaccccgaccatgtggaactgtcttggtgggtcaacggcaaagaggtgcacagcggcgtgtctaccgacccccagccactgaaagaacagcccgccctgaacgacagccggtactgcctgagcagcagactgagagtgtccgccaccttctggcagaacccccggaaccacttcagatgccaggtgcagttctacggcctgagcgagaacgacgagtggacccaggacagagccaagcccgtgacccagatcgtgtctgccgaagcctggggcagagccgattgcggctttaccagcgagagctaccagcagggcgtgctgagcgccaccatcctgtacgagatcctgctgggcaaggccaccctgtacgccgtgctggtgtctgccctggtgctgatggctatggtcaagcggaaggacagccgggga

SEQ ID NO: 5757 - DNA, 2103 bp, Artificial Sequence
  Synthetic Polynucloetide
atggccttaccagtgaccgccttgctcctgccgctggccttgctgctccacgccgccaggccggaagtgcaactggtggaatctggaggctctctggtgcagccagggggaagcctgagactgtcttgtgccgcttccggcttcaccttcgacgactacgccatgagctgggtgcgccaggtgccaggcaaaggcctggaatgggtgtccagcatcaactggagcggcacccacaccgattacgccgactccgtgaaaggcagattcacaatcagcagaaacaacgccaacaataccctgtacctgcagatgaactccctgaagtctgaggatacagcagtgtattattgcgccaagaactggcgggacgccggcaccacttggtttgagaaaagcggctctgccggacagggaacccaagtgacagtgtcctccggtaccggcggaggcggatctggcggcggaggtagcggtggcggaggatctgaattcgacatccagatgacacagagccctagcagcctgtctgccagcgtgggagacagagtgaccatcacatgcaaggccagcgaccacatcaacaactggctggcctggtatcagcagaagcctggacaggcccctaagctgctgatctacggcgctaccacactggaaacaggcgtgcccagcagattttctggcagcggctctggcaccgactacaccctgacaatatccagcctccagcctgaggacttcgccacctactactgtcagcagagctggaacaccccttggacattcggccagggcaccaagctggaaatcaagagactcgaggggaaaccaattcccaaccctcttctgggactggattcaaccggcagcggcgaggacctgaagaacgtgttcccacctgaggtggccgtgttcgagcctagcgaggccgagatcagccacacccagaaagccaccctcgtgtgcctggctaccggcttctaccccgaccatgtggaactgtcttggtgggtcaacggcaaagaggtgcacagcggcgtgtgtaccgacccccagccactgaaagaacagcccgccctgaacgacagccggtactgcctgagcagcagactgagagtgtccgccaccttctggcagaacccccggaaccacttcagatgccaggtgcagttctacggcctgagcgagaacgacgagtggacccaggacagagccaagcccgtgacccagatcgtgtctgccgaagcctggggcagagccgattgcggctttaccagcgagagctaccagcagggcgtgctgagcgccaccatcctgtacgagatcctgctgggcaaggccaccctgtacgccgtgctggtgtctgccctggtgctgatggctatggtcaagcggaaggacagccggggaagggccaagcgatctggatctggagcaacaaacttctcactactcaaacaagcaggtgacgtggaggagaatcccgggcctactagaggccatatgaccgagtacaagcccacggtgcgcctcgccacccgcgacgacgtccccagggccgtacgcaccctcgccgccgcgttcgccgactaccccgccacgcgccacaccgtcgatccggaccgccacatcgagcgggtcaccgagctgcaagaactcttcctcacgcgcgtcgggctcgacatcggcaaggtgtgggtcgcggacgacggcgccgcggtggcggtctggaccacgccggagagcgtcgaagcgggggcggtgttcgccgagatcggcccgcgcatggccgagttgagcggttcccggctggccgcgcagcaacagatggaaggcctcctggcgccgcaccggcccaaggagcccgcgtggttcctggccaccgtcggcgtctcgcccgaccaccagggcaagggtctgggcagcgccgtcgtgctccccggagtggaggcggccgagcgcgccggggtgcccgccttcctggagacctccgcgccccgcaacctccccttctacgagcggctcggcttcaccgtcaccgccgacgtcgaggtgcccgaaggaccgcgcacctggtgcatgacccgcaagcccggtgcctga

SEQ ID NO: 5758 - DNA, 1413 bp, Artificial Sequence
  Synthetic Polynucloetide
atggccttaccagtgaccgccttgctcctgccgctggccttgctgctccacgccgccaggccggaagtgcaactggtggaatctggaggctctctggtgcagccagggggaagcctgagactgtcttgtgccgcttccggcttcaccttcgacgactacgccatgagctgggtgcgccaggtgccaggcaaaggcctggaatgggtgtccagcatcaactggagcggcacccacaccgattacgccgactccgtgaaaggcagattcacaatcagcagaaacaacgccaacaataccctgtacctgcagatgaactccctgaagtctgaggatacagcagtgtattattgcgccaagaactggcgggacgccggcaccacttggtttgagaaaagcggctctgccggacagggaacccaagtgacagtgtcctccggtaccggcggaggcggatctggcggcggaggtagcggtggcggaggatctgaattcgacatccagatgacacagagccctagcagcctgtctgccagcgtgggagacagagtgaccatcacatgcaaggccagcgaccacatcaacaactggctggcctggtatcagcagaagcctggacaggcccctaagctgctgatctacggcgctaccacactggaaacaggcgtgcccagcagattttctggcagcggctctggcaccgactacaccctgacaatatccagcctccagcctgaggacttcgccacctactactgtcagcagagctggaacaccccttggacattcggccagggcaccaagctggaaatcaagagactcgaggggaaaccaattcccaaccctcttctgggactggattcaaccggcagcggcgaggacctgaagaacgtgttcccacctgaggtggccgtgttcgagcctagcgaggccgagatcagccacacccagaaagccaccctcgtgtgcctggctaccggcttctaccccgaccatgtggaactgtcttggtgggtcaacggcaaagaggtgcacagcggcgtgtgtaccgacccccagccactgaaagaacagcccgccctgaacgacagccggtactgcctgagcagcagactgagagtgtccgccaccttctggcagaacccccggaaccacttcagatgccaggtgcagttctacggcctgagcgagaacgacgagtggacccaggacagagccaagcccgtgacccagatcgtgtctgccgaagcctggggcagagccgattgcggctttaccagcgagagctaccagcagggcgtgctgagcgccaccatcctgtacgagatcctgctgggcaaggccaccctgtacgccgtgctggtgtctgccctggtgctgatggctatggtcaagcggaaggacagccggggatga

SEQ ID NO: 5759 - DNA, 2361 bp, Artificial Sequence
  Synthetic Polynucloetide
atggccttaccagtgaccgccttgctcctgccgctggccttgctgctccacgccgccaggccggaagtgcaactggtggaatctggaggctctctggtgcagccagggggaagcctgagactgtcttgtgccgcttccggcttcaccttcgacgactacgccatgagctgggtgcgccaggtgccaggcaaaggcctggaatgggtgtccagcatcaactggagcggcacccacaccgattacgccgactccgtgaaaggcagattcacaatcagcagaaacaacgccaacaataccctgtacctgcagatgaactccctgaagtctgaggatacagcagtgtattattgcgccaagaactggcgggacgccggcaccacttggtttgagaaaagcggctctgccggacagggaacccaagtgacagtgtcctccggtaccggcggaggcggatctggcggcggaggtagcggtggcggaggatctgaattcgacatccagatgacacagagccctagcagcctgtctgccagcgtgggagacagagtgaccatcacatgcaaggccagcgaccacatcaacaactggctggcctggtatcagcagaagcctggacaggcccctaagctgctgatctacggcgctaccacactggaaacaggcgtgcccagcagattttctggcagcggctctggcaccgactacaccctgacaatatccagcctccagcctgaggacttcgccacctactactgtcagcagagctggaacaccccttggacattcggccagggcaccaagctggaaatcaagagaggcggaggcggaagtggaggcggaggatctggcggcggaggctctcaagttcagcttcaacagcctggcgctgagctggtcaaacctggcgcttctgtgaagatgagctgcaaagccagcggctacgccttcagcagctactggatcaactggatgaagcagaaacccggccagggactcgaatggatcggccaaatctatcccggcgacggcgacaccaactacaacggcaagttcaagggcagagccacactgaccgccgatacctctagcagcacagcctacatgcagctgagcagcctgaccagcgaagatagcgccgtgtacttctgtgcccggtccatcacaacagtcgtgggctgcgctatggactattggggccagggaacaagcgtgaccgtgtctagtacgcgtgggagcggcatccagaaccctgatcctgccgtgtaccagctgcgggatagcaagagcagcgacaagagcgtgtgtctgttcaccgacttcgacagccagaccaacgtgtcccagagcaaggactccgacgtgtacatcaccgataagaccgtgctggacatgcggagcatggacttcaagagcaactccgccgtggcctggtccaacaagtccgatttcgcctgcgccaacgccttcaacaacagcattatccccgaggacacattcttcccaagcagcgacgtgccctgcgacgtgaagctggtggaaaagagcttcgagacagacaccaacctgaacttccagaacctgagcgtgatcggcttcagaatcctgctgctgaaagtggccggctttaacctgctgatgaccctgcggctgtggtccagccgcgccaagagaagcggatctggcgtgaagcagaccctgaatttcgacctgctgaagctggctggcgacgtggaatccaacccaggcccttctagaggccatatgaccgagtacaagcccacggtgcgcctcgccacccgcgacgacgtccccagggccgtacgcaccctcgccgccgcgttcgccgactaccccgccacgcgccacaccgtcgatccggaccgccacatcgagcgggtcaccgagctgcaagaactcttcctcacgcgcgtcgggctcgacatcggcaaggtgtgggtcgcggacgacggcgccgcggtggcggtctggaccacgccggagagcgtcgaagcgggggcggtgttcgccgagatcggcccgcgcatggccgagttgagcggttcccggctggccgcgcagcaacagatggaaggcctcctggcgccgcaccggcccaaggagcccgcgtggttcctggccaccgtcggcgtctcgcccgaccaccagggcaagggtctgggcagcgccgtcgtgctccccggagtggaggcggccgagcgcgccggggtgcccgccttcctggagacctccgcgccccgcaacctccccttctacgagcggctcggcttcaccgtcaccgccgacgtcgaggtgcccgaaggaccgcgcacctggtgcatgacccgcaagcccggtgcctga

SEQ ID NO: 5760 - DNA, 2457 bp, Artificial Sequence
  Synthetic Polynucloetide
atggccttaccagtgaccgccttgctcctgccgctggccttgctgctccacgccgccaggccggaagtgcaactggtggaatctggaggctctctggtgcagccagggggaagcctgagactgtcttgtgccgcttccggcttcaccttcgacgactacgccatgagctgggtgcgccaggtgccaggcaaaggcctggaatgggtgtccagcatcaactggagcggcacccacaccgattacgccgactccgtgaaaggcagattcacaatcagcagaaacaacgccaacaataccctgtacctgcagatgaactccctgaagtctgaggatacagcagtgtattattgcgccaagaactggcgggacgccggcaccacttggtttgagaaaagcggctctgccggacagggaacccaagtgacagtgtcctccggtaccggcggaggcggatctggcggcggaggtagcggtggcggaggatctgaattcgacatccagatgacacagagccctagcagcctgtctgccagcgtgggagacagagtgaccatcacatgcaaggccagcgaccacatcaacaactggctggcctggtatcagcagaagcctggacaggcccctaagctgctgatctacggcgctaccacactggaaacaggcgtgcccagcagattttctggcagcggctctggcaccgactacaccctgacaatatccagcctccagcctgaggacttcgccacctactactgtcagcagagctggaacaccccttggacattcggccagggcaccaagctggaaatcaagagaggcggaggcggaagtggaggcggaggatctggcggcggaggctctcaagttcagcttcaacagcctggcgctgagctggtcaaacctggcgcttctgtgaagatgagctgcaaagccagcggctacgccttcagcagctactggatcaactggatgaagcagaaacccggccagggactcgaatggatcggccaaatctatcccggcgacggcgacaccaactacaacggcaagttcaagggcagagccacactgaccgccgatacctctagcagcacagcctacatgcagctgagcagcctgaccagcgaagatagcgccgtgtacttctgtgcccggtccatcacaacagtcgtgggctgcgctatggactattggggccagggaacaagcgtgaccgtgtctagtctcgaggacctgaagaacgtgttcccacctgaggtggccgtgttcgagcctagcaaggccgagatcgcccacacccagaaagccaccctcgtgtgcctggctaccggcttctaccccgaccatgtggaactgtcttggtgggtcaacggcaaagaggtgcacagcggcgtgtctaccgacccccagccactgaaagaacagcccgccctgaacgacagccggtactgcctgagcagcagactgagagtgtccgccaccttctggcagaacccccggaaccacttcagatgccaggtgcagttctacggcctgagcgagaacgacgagtggacccaggacagagccaagcccgtgacccagatcgtgtctgccgaagcctggggcagagccgattgcggcatcaccagcgccagctaccaccagggcgtgctgagcgccaccatcctgtacgagatcctgctgggcaaggccaccctgtacgccgtgctggtgtctgccctggtgctgatggctatggtcaagcggaaggacagccggggaagggccaagcgatctggatctggagcaacaaacttctcactactcaaacaagcaggtgacgtggaggagaatcccgggcctactagaggccatatgaccgagtacaagcccacggtgcgcctcgccacccgcgacgacgtccccagggccgtacgcaccctcgccgccgcgttcgccgactaccccgccacgcgccacaccgtcgatccggaccgccacatcgagcgggtcaccgagctgcaagaactcttcctcacgcgcgtcgggctcgacatcggcaaggtgtgggtcgcggacgacggcgccgcggtggcggtctggaccacgccggagagcgtcgaagcgggggcggtgttcgccgagatcggcccgcgcatggccgagttgagcggttcccggctggccgcgcagcaacagatggaaggcctcctggcgccgcaccggcccaaggagcccgcgtggttcctggccaccgtcggcgtctcgcccgaccaccagggcaagggtctgggcagcgccgtcgtgctccccggagtggaggcggccgagcgcgccggggtgcccgccttcctggagacctccgcgccccgcaacctccccttctacgagcggctcggcttcaccgtcaccgccgacgtcgaggtgcccgaaggaccgcgcacctggtgcatgacccgcaagcccggtgcctga

SEQ ID NO: 5761 - DNA, 1743 bp, Artificial Sequence
  Synthetic Polynucloetide
atggactggatttggcgcatccttttccttgtcggcgctgctaccggcgcccattccgggcccgtggacaacaagttcaacaaagagcggtacagcgcctactacgagatttggcaactgcccaacctgaacgtgcggcagaaggccgccttcatcggatctctgcaggacgaccctagccagagcgccaatctgctggccgaggccaagaagctgaacgacgcccaggcccctaaaggatccggcggcggaggatctggcggaggcggatctgggggcggaggctctttcgaacaagttcagcttcaacagcctggcgctgagctggtcaaacctggcgcttctgtgaagatgagctgcaaagccagcggctacgccttcagcagctactggatcaactggatgaagcagaaacccggccagggactcgaatggatcggccaaatctatcccggcgacggcgacaccaactacaacggcaagttcaagggcagagccacactgaccgccgatacctctagcagcacagcctacatgcagctgagcagcctgaccagcgaagatagcgccgtgtacttctgtgcccggtccatcacaacagtcgtgggctgcgctatggactattggggccagggaacaagcgtgaccgtgtctagtggcggaggcggaagtggaggcggaggatctggcggcggaggctctgacatccagatgacacagagccctagcagcctgtctgccagcgtgggagacagagtgaccatcacatgcaaggccagcgaccacatcaacaactggctggcctggtatcagcagaagcctggacaggcccctaagctgctgatctacggcgctaccacactggaaacaggcgtgcccagcagattttctggcagcggctctggcaccgactacaccctgacaatatccagcctccagcctgaggacttcgccacctactactgtcagcagagctggaacaccccttggacattcggccagggcaccaagctggaaatcaagagaacgcgtgagcagaaactgatctcggaagaggatctggcgaagcccaccacgacgccagcgccgcgaccaccaacaccggcgcccaccatcgcgtcgcagcccctgtccctgcgcccagaggcgtgccggccagcggcggggggcgcagtgcacacgagggggctggacttcgcctgtgacatctacatctgggcgcccttggccgggacttgtggggtccttctcctgtcactggttatcaccctttactgcaaacggggcagaaagaaactcctgtatatattcaaacaaccatttatgagaccagtacaaactactcaagaggaagatggctgtagctgccgatttccagaagaagaagaaggaggatgtgaactgagagtgaagttcagcaggagcgcagacgcccccgcgtaccagcagggccagaaccagctctataacgagctgaatctaggacgaagagaggagtacgatgttttggacaagagacgtggccgggaccctgagatggggggaaagccgagaaggaagaaccctcaggaaggcctgtacaatgaactgcagaaagataagatggcggaggcctacagtgagattgggatgaaaggcgagcgccggaggggcaaggggcacgatggcctttaccagggtctcagtacagccaccaaggacacctacgacgcccttcacatgcaggccctgccccctcgctga

SEQ ID NO: 5762 - DNA, 2802 bp, Artificial Sequence
  Synthetic Polynucloetide
atggccttaccagtgaccgccttgctcctgccgctggccttgctgctccacgccgccaggccggacatccagatgacacagagccctagcagcctgtctgccagcgtgggagacagagtgaccatcacatgcaaggccagcgaccacatcaacaactggctggcctggtatcagcagaagcctggacaggcccctaagctgctgatctacggcgctaccacactggaaacaggcgtgcccagcagattttctggcagcggctctggcaccgactacaccctgacaatatccagcctccagcctgaggacttcgccacctactactgtcagcagagctggaacaccccttggacattcggccagggcaccaagctggaaatcaagagactcgagatccagaaccctgatcctgccgtgtaccagctgcgggatagcaagagcagcgacaagagcgtgtgtctgttcaccgacttcgacagccagaccaacgtgtcccagagcaaggactccgacgtgtacatcaccgataagtgcgtgctggacatgcggagcatggacttcaagagcaactccgccgtggcctggtccaacaagtccgatttcgcctgcgccaacgccttcaacaacagcattatccccgaggacacattcttcccaagcagcgacgtgccctgcgacgtgaagctggtggaaaagagcttcgagacagacaccaacctgaacttccagaacctgagcgtgatcggcttcagaatcctgctgctgaaagtggccggctttaacctgctgatgaccctgcggctgtggtccagccgcgccaagagaagcggatctggcgtgaagcagaccctgaatttcgacctgctgaagctggctggcgacgtggaatccaacccaggccctactagtatggactggatttggcgcatccttttccttgtcggcgctgctaccggcgcccattccgggcccgtggacaacaagttcaacaaagagcggtacagcgcctactacgagatttggcaactgcccaacctgaacgtgcggcagaaggccgccttcatcggatctctgcaggacgaccctagccagagcgccaatctgctggccgaggccaagaagctgaacgacgcccaggcccctaaaggatccggcggcggaggatctggcggaggcggatctgggggcggaggctctttcgaacaagttcagcttcaacagcctggcgctgagctggtcaaacctggcgcttctgtgaagatgagctgcaaagccagcggctacgccttcagcagctactggatcaactggatgaagcagaaacccggccagggactcgaatggatcggccaaatctatcccggcgacggcgacaccaactacaacggcaagttcaagggcagagccacactgaccgccgatacctctagcagcacagcctacatgcagctgagcagcctgaccagcgaagatagcgccgtgtacttctgtgcccggtccatcacaacagtcgtgggctgcgctatggactattggggccagggaacaagcgtgaccgtgtctagtacgcgtgaggacctgaagaacgtgttcccacctgaggtggccgtgttcgagcctagcaaggccgagatcgcccacacccagaaagccaccctcgtgtgcctggctaccggcttctaccccgaccatgtggaactgtcttggtgggtcaacggcaaagaggtgcacagcggcgtgtgtaccgacccccagccactgaaagaacagcccgccctgaacgacagccggtactgcctgagcagcagactgagagtgtccgccaccttctggcagaacccccggaaccacttcagatgccaggtgcagttctacggcctgagcgagaacgacgagtggacccaggacagagccaagcccgtgacccagatcgtgtctgccgaagcctggggcagagccgattgcggcatcaccagcgccagctaccaccagggcgtgctgagcgccaccatcctgtacgagatcctgctgggcaaggccaccctgtacgccgtgctggtgtctgccctggtgctgatggctatggtcaagcggaaggacagccggggaagggccaagcgatctggatctggagcaacaaacttctcactactcaaacaagcaggtgacgtggaggagaatcccgggccttctagaggccatatgaccgagtacaagcccacggtgcgcctcgccacccgcgacgacgtccccagggccgtacgcaccctcgccgccgcgttcgccgactaccccgccacgcgccacaccgtcgatccggaccgccacatcgagcgggtcaccgagctgcaagaactcttcctcacgcgcgtcgggctcgacatcggcaaggtgtgggtcgcggacgacggcgccgcggtggcggtctggaccacgccggagagcgtcgaagcgggggcggtgttcgccgagatcggcccgcgcatggccgagttgagcggttcccggctggccgcgcagcaacagatggaaggcctcctggcgccgcaccggcccaaggagcccgcgtggttcctggccaccgtcggcgtctcgcccgaccaccagggcaagggtctgggcagcgccgtcgtgctccccggagtggaggcggccgagcgcgccggggtgcccgccttcctggagacctccgcgccccgcaacctccccttctacgagcggctcggcttcaccgtcaccgccgacgtcgaggtgcccgaaggaccgcgcacctggtgcatgacccgcaagcccggtgcctga

SEQ ID NO: 5763 - DNA, 2799 bp, Artificial Sequence
  Synthetic Polynucloetide
atggccttaccagtgaccgccttgctcctgccgctggccttgctgctccacgccgccaggccggacatccagatgacacagagccctagcagcctgtctgccagcgtgggagacagagtgaccatcacatgcaaggccagcgaccacatcaacaactggctggcctggtatcagcagaagcctggacaggcccctaagctgctgatctacggcgctaccacactggaaacaggcgtgcccagcagattttctggcagcggctctggcaccgactacaccctgacaatatccagcctccagcctgaggacttcgccacctactactgtcagcagagctggaacaccccttggacattcggccagggcaccaagctggaaatcaagagactcgaggacctgaagaacgtgttcccacctgaggtggccgtgttcgagcctagcaaggccgagatcgcccacacccagaaagccaccctcgtgtgcctggctaccggcttctaccccgaccatgtggaactgtcttggtgggtcaacggcaaagaggtgcacagcggcgtgtgtaccgacccccagccactgaaagaacagcccgccctgaacgacagccggtactgcctgagcagcagactgagagtgtccgccaccttctggcagaacccccggaaccacttcagatgccaggtgcagttctacggcctgagcgagaacgacgagtggacccaggacagagccaagcccgtgacccagatcgtgtctgccgaagcctggggcagagccgattgcggcatcaccagcgccagctaccaccagggcgtgctgagcgccaccatcctgtacgagatcctgctgggcaaggccaccctgtacgccgtgctggtgtctgccctggtgctgatggctatggtcaagcggaaggacagccggggaagggccaagcgatctggatctggagcaacaaacttctcactactcaaacaagcaggtgacgtggaggagaatcccgggcctactagtatggactggatttggcgcatccttttccttgtcggcgctgctaccggcgcccattccgggcccgtggacaacaagttcaacaaagagcggtacagcgcctactacgagatttggcaactgcccaacctgaacgtgcggcagaaggccgccttcatcggatctctgcaggacgaccctagccagagcgccaatctgctggccgaggccaagaagctgaacgacgcccaggcccctaaaggatccggcggcggaggatctggcggaggcggatctgggggcggaggctctttcgaacaagttcagcttcaacagcctggcgctgagctggtcaaacctggcgcttctgtgaagatgagctgcaaagccagcggctacgccttcagcagctactggatcaactggatgaagcagaaacccggccagggactcgaatggatcggccaaatctatcccggcgacggcgacaccaactacaacggcaagttcaagggcagagccacactgaccgccgatacctctagcagcacagcctacatgcagctgagcagcctgaccagcgaagatagcgccgtgtacttctgtgcccggtccatcacaacagtcgtgggctgcgctatggactattggggccagggaacaagcgtgaccgtgtctagtacgcgtatccagaaccctgatcctgccgtgtaccagctgcgggatagcaagagcagcgacaagagcgtgtgtctgttcaccgacttcgacagccagaccaacgtgtcccagagcaaggactccgacgtgtacatcaccgataagtgcgtgctggacatgcggagcatggacttcaagagcaactccgccgtggcctggtccaacaagtccgatttcgcctgcgccaacgccttcaacaacagcattatccccgaggacacattcttcccaagcagcgacgtgccctgcgacgtgaagctggtggaaaagagcttcgagacagacaccaacctgaacttccagaacctgagcgtgatcggcttcagaatcctgctgctgaaagtggccggctttaacctgctgatgaccctgcggctgtggtccagccgcgccaagagaagcggatctggcgtgaagcagaccctgaatttcgacctgctgaagctggctggcgacgtggaatccaacccaggcccttctagaggccatatgaccgagtacaagcccacggtgcgcctcgccacccgcgacgacgtccccagggccgtacgcaccctcgccgccgcgttcgccgactaccccgccacgcgccacaccgtcgatccggaccgccacatcgagcgggtcaccgagctgcaagaactcttcctcacgcgcgtcgggctcgacatcggcaaggtgtgggtcgcggacgacggcgccgcggtggcggtctggaccacgccggagagcgtcgaagcgggggcggtgttcgccgagatcggcccgcgcatggccgagttgagcggttcccggctggccgcgcagcaacagatggaaggcctcctggcgccgcaccggcccaaggagcccgcgtggttcctggccaccgtcggcgtctcgcccgaccaccagggcaagggtctgggcagcgccgtcgtgctccccggagtggaggcggccgagcgcgccggggtgcccgccttcctggagacctccgcgccccgcaacctccccttctacgagcggctcggcttcaccgtcaccgccgacgtcgaggtgcccgaaggaccgcgcacctggtgcatgacccgcaagcccggtgcctga

SEQ ID NO: 5764 - DNA, 2799 bp, Artificial Sequence
  Synthetic Polynucloetide
atggccttaccagtgaccgccttgctcctgccgctggccttgctgctccacgccgccaggccggacatccagatgacacagagccctagcagcctgtctgccagcgtgggagacagagtgaccatcacatgcaaggccagcgaccacatcaacaactggctggcctggtatcagcagaagcctggacaggcccctaagctgctgatctacggcgctaccacactggaaacaggcgtgcccagcagattttctggcagcggctctggcaccgactacaccctgacaatatccagcctccagcctgaggacttcgccacctactactgtcagcagagctggaacaccccttggacattcggccagggcaccaagctggaaatcaagagactcgaggacctgaagaacgtgttcccacctgaggtggccgtgttcgagcctagcgaggccgagatcagccacacccagaaagccaccctcgtgtgcctggctaccggcttctaccccgaccatgtggaactgtcttggtgggtcaacggcaaagaggtgcacagcggcgtgtgtaccgacccccagccactgaaagaacagcccgccctgaacgacagccggtactgcctgagcagcagactgagagtgtccgccaccttctggcagaacccccggaaccacttcagatgccaggtgcagttctacggcctgagcgagaacgacgagtggacccaggacagagccaagcccgtgacccagatcgtgtctgccgaagcctggggcagagccgattgcggctttaccagcgagagctaccagcagggcgtgctgagcgccaccatcctgtacgagatcctgctgggcaaggccaccctgtacgccgtgctggtgtctgccctggtgctgatggctatggtcaagcggaaggacagccggggaagggccaagcgatctggatctggagcaacaaacttctcactactcaaacaagcaggtgacgtggaggagaatcccgggcctactagtatggactggatttggcgcatccttttccttgtcggcgctgctaccggcgcccattccgggcccgtggacaacaagttcaacaaagagcggtacagcgcctactacgagatttggcaactgcccaacctgaacgtgcggcagaaggccgccttcatcggatctctgcaggacgaccctagccagagcgccaatctgctggccgaggccaagaagctgaacgacgcccaggcccctaaaggatccggcggcggaggatctggcggaggcggatctgggggcggaggctctttcgaacaagttcagcttcaacagcctggcgctgagctggtcaaacctggcgcttctgtgaagatgagctgcaaagccagcggctacgccttcagcagctactggatcaactggatgaagcagaaacccggccagggactcgaatggatcggccaaatctatcccggcgacggcgacaccaactacaacggcaagttcaagggcagagccacactgaccgccgatacctctagcagcacagcctacatgcagctgagcagcctgaccagcgaagatagcgccgtgtacttctgtgcccggtccatcacaacagtcgtgggctgcgctatggactattggggccagggaacaagcgtgaccgtgtctagtacgcgtatccagaaccctgatcctgccgtgtaccagctgcgggatagcaagagcagcgacaagagcgtgtgtctgttcaccgacttcgacagccagaccaacgtgtcccagagcaaggactccgacgtgtacatcaccgataagtgcgtgctggacatgcggagcatggacttcaagagcaactccgccgtggcctggtccaacaagtccgatttcgcctgcgccaacgccttcaacaacagcattatccccgaggacacattcttcccaagccccgagagcagctgcgacgtgaagctggtggaaaagagcttcgagacagacaccaacctgaacttccagaacctgagcgtgatcggcttcagaatcctgctgctgaaagtggccggctttaacctgctgatgaccctgcggctgtggtccagccgcgccaagagaagcggatctggcgtgaagcagaccctgaatttcgacctgctgaagctggctggcgacgtggaatccaacccaggcccttctagaggccatatgaccgagtacaagcccacggtgcgcctcgccacccgcgacgacgtccccagggccgtacgcaccctcgccgccgcgttcgccgactaccccgccacgcgccacaccgtcgatccggaccgccacatcgagcgggtcaccgagctgcaagaactcttcctcacgcgcgtcgggctcgacatcggcaaggtgtgggtcgcggacgacggcgccgcggtggcggtctggaccacgccggagagcgtcgaagcgggggcggtgttcgccgagatcggcccgcgcatggccgagttgagcggttcccggctggccgcgcagcaacagatggaaggcctcctggcgccgcaccggcccaaggagcccgcgtggttcctggccaccgtcggcgtctcgcccgaccaccagggcaagggtctgggcagcgccgtcgtgctccccggagtggaggcggccgagcgcgccggggtgcccgccttcctggagacctccgcgccccgcaacctccccttctacgagcggctcggcttcaccgtcaccgccgacgtcgaggtgcccgaaggaccgcgcacctggtgcatgacccgcaagcccggtgcctga

SEQ ID NO: 5765 - DNA, 2097 bp, Artificial Sequence
  Synthetic Polynucloetide
atggccttaccagtgaccgccttgctcctgccgctggccttgctgctccacgccgccaggccggacatccagatgacacagagccctagcagcctgtctgccagcgtgggagacagagtgaccatcacatgcaaggccagcgaccacatcaacaactggctggcctggtatcagcagaagcctggacaggcccctaagctgctgatctacggcgctaccacactggaaacaggcgtgcccagcagattttctggcagcggctctggcaccgactacaccctgacaatatccagcctccagcctgaggacttcgccacctactactgtcagcagagctggaacaccccttggacattcggccagggcaccaagctggaaatcaagagactcgaggacctgaagaacgtgttcccacctgaggtggccgtgttcgagcctagcgaggccgagatcagccacacccagaaagccaccctcgtgtgcctggctaccggcttctaccccgaccatgtggaactgtcttggtgggtcaacggcaaagaggtgcacagcggcgtgtgtaccgacccccagccactgaaagaacagcccgccctgaacgacagccggtactgcctgagcagcagactgagagtgtccgccaccttctggcagaacccccggaaccacttcagatgccaggtgcagttctacggcctgagcgagaacgacgagtggacccaggacagagccaagcccgtgacccagatcgtgtctgccgaagcctggggcagagccgattgcggctttaccagcgagagctaccagcagggcgtgctgagcgccaccatcctgtacgagatcctgctgggcaaggccaccctgtacgccgtgctggtgtctgccctggtgctgatggctatggtcaagcggaaggacagccggggaagggccaagcgatctggatctggagcaacaaacttctcactactcaaacaagcaggtgacgtggaggagaatcccgggcctactagtatggactggatttggcgcatccttttccttgtcggcgctgctaccggcgcccattccgggcccgtggacaacaagttcaacaaagagcggtacagcgcctactacgagatttggcaactgcccaacctgaacgtgcggcagaaggccgccttcatcggatctctgcaggacgaccctagccagagcgccaatctgctggccgaggccaagaagctgaacgacgcccaggcccctaaaggatccggcggcggaggatctggcggaggcggatctgggggcggaggctctttcgaacaagttcagcttcaacagcctggcgctgagctggtcaaacctggcgcttctgtgaagatgagctgcaaagccagcggctacgccttcagcagctactggatcaactggatgaagcagaaacccggccagggactcgaatggatcggccaaatctatcccggcgacggcgacaccaactacaacggcaagttcaagggcagagccacactgaccgccgatacctctagcagcacagcctacatgcagctgagcagcctgaccagcgaagatagcgccgtgtacttctgtgcccggtccatcacaacagtcgtgggctgcgctatggactattggggccagggaacaagcgtgaccgtgtctagtacgcgtatccagaaccctgatcctgccgtgtaccagctgcgggatagcaagagcagcgacaagagcgtgtgtctgttcaccgacttcgacagccagaccaacgtgtcccagagcaaggactccgacgtgtacatcaccgataagtgcgtgctggacatgcggagcatggacttcaagagcaactccgccgtggcctggtccaacaagtccgatttcgcctgcgccaacgccttcaacaacagcattatccccgaggacacattcttcccaagccccgagagcagctgcgacgtgaagctggtggaaaagagcttcgagacagacaccaacctgaacttccagaacctgagcgtgatcggcttcagaatcctgctgctgaaagtggccggctttaacctgctgatgaccctgcggctgtggtccagc

SEQ ID NO: 5766 - DNA, 2772 bp, Artificial Sequence
  Synthetic Polynucloetide
atggccttaccagtgaccgccttgctcctgccgctggccttgctgctccacgccgccaggccggacatccagatgacacagagccctagcagcctgtctgccagcgtgggagacagagtgaccatcacatgcaaggccagcgaccacatcaacaactggctggcctggtatcagcagaagcctggacaggcccctaagctgctgatctacggcgctaccacactggaaacaggcgtgcccagcagattttctggcagcggctctggcaccgactacaccctgacaatatccagcctccagcctgaggacttcgccacctactactgtcagcagagctggaacaccccttggacattcggccagggcaccaagctggaaatcaagagactcgaggacctgaagaacgtgttcccacctgaggtggccgtgttcgagcctagcgaggccgagatcagccacacccagaaagccaccctcgtgtgcctggctaccggcttctaccccgaccatgtggaactgtcttggtgggtcaacggcaaagaggtgcacagcggcgtgtgtaccgacccccagccactgaaagaacagcccgccctgaacgacagccggtactgcctgagcagcagactgagagtgtccgccaccttctggcagaacccccggaaccacttcagatgccaggtgcagttctacggcctgagcgagaacgacgagtggacccaggacagagccaagcccgtgacccagatcgtgtctgccgaagcctggggcagagccgattgcggctttaccagcgagagctaccagcagggcgtgctgagcgccaccatcctgtacgagatcctgctgggcaaggccaccctgtacgccgtgctggtgtctgccctggtgctgatggctatggtcaagcggaaggacagccggggaagggccaagcgatctggatctggagcaacaaacttctcactactcaaacaagcaggtgacgtggaggagaatcccgggcctactagtatggactggatttggcgcatccttttccttgtcggcgctgctaccggcgcccattccgggcccgtggacaacaagttcaacaaagagcggtacagcgcctactacgagatttggcaactgcccaacctgaacgtgcggcagaaggccgccttcatcggatctctgcaggacgaccctagccagagcgccaatctgctggccgaggccaagaagctgaacgacgcccaggcccctaaaggatccggcggcggaggatctggcggaggcggatctgggggcggaggctctttcgaacaagttcagcttcaacagcctggcgctgagctggtcaaacctggcgcttctgtgaagatgagctgcaaagccagcggctacgccttcagcagctactggatcaactggatgaagcagaaacccggccagggactcgaatggatcggccaaatctatcccggcgacggcgacaccaactacaacggcaagttcaagggcagagccacactgaccgccgatacctctagcagcacagcctacatgcagctgagcagcctgaccagcgaagatagcgccgtgtacttctgtgcccggtccatcacaacagtcgtgggctgcgctatggactattggggccagggaacaagcgtgaccgtgtctagtacgcgtatccagaaccctgatcctgccgtgtaccagctgcgggatagcaagagcagcgacaagagcgtgtgtctgttcaccgacttcgacagccagaccaacgtgtcccagagcaaggactccgacgtgtacatcaccgataagtgcgtgctggacatgcggagcatggacttcaagagcaactccgccgtggcctggtccaacaagtccgatttcgcctgcgccaacgccttcaacaacagcattatccccgaggacacattcttcccaagccccgagagcagctgcgacgtgaagctggtggaaaagagcttcgagacagacaccaacctgaacttccagaacctgagcgtgatcggcttcagaatcctgctgctgaaagtggccggctttaacctgctgatgaccctgcggctgtggtccagccgcgccaagagaagcggatctggcgtgaagcagaccctgaatttcgacctgctgaagctggctggcgacgtggaatccaacccaggcccttctagaggcgggatccacaccatggctacctacgaggtgctgtgcgaggtggcaagaaagctgggcaccgacgacagagaagtggtgctgttcctgctgaacgtgttcatccctcagcctacactggcccagctgatcggtgcactgagagccctgaaagaggaaggccggctgacctttcctctgctggccgaatgcctgttcagagccggaagaagggatctgctgcgggacctgctgcatctggaccccagatttctggaaagacacctggccggcaccatgagctacttcagcccttaccagctgaccgtgctgcacgttgacggcgaactgtgcgccagagatattcggagcctgatcttcctgagcaaggacaccatcggcagccggtctacccctcagacatttctgcactgggtgtactgcatggaaaacctggacctgctcggccccacagatgtggatgccctgatgtccatgctgagaagcctgagcagagtggacctccagagacaggtgcagacactgatgggactgcacctgagcggacctagccacagccagcactacagacacacccct

SEQ ID NO: 5767 - DNA, 2109 bp, Artificial Sequence
  Synthetic Polynucloetide
atggccttaccagtgaccgccttgctcctgccgctggccttgctgctccacgccgccaggccggacatccagatgacacagagccctagcagcctgtctgccagcgtgggagacagagtgaccatcacatgcaaggccagcgaccacatcaacaactggctggcctggtatcagcagaagcctggacaggcccctaagctgctgatctacggcgctaccacactggaaacaggcgtgcccagcagattttctggcagcggctctggcaccgactacaccctgacaatatccagcctccagcctgaggacttcgccacctactactgtcagcagagctggaacaccccttggacattcggccagggcaccaagctggaaatcaagagactcgagatccagaaccctgatcctgccgtgtaccagctgcgggatagcaagagcagcgacaagagcgtgtgtctgttcaccgacttcgacagccagaccaacgtgtcccagagcaaggactccgacgtgtacatcaccgataagtgcgtgctggacatgcggagcatggacttcaagagcaactccgccgtggcctggtccaacaagtccgatttcgcctgcgccaacgccttcaacaacagcattatccccgaggacacattcttcccaagccccgagagcagctgcgacgtgaagctggtggaaaagagcttcgagacagacaccaacctgaacttccagaacctgagcgtgatcggcttcagaatcctgctgctgaaagtggccggctttaacctgctgatgaccctgcggctgtggtccagccgcgccaagagaagcggatctggcgtgaagcagaccctgaatttcgacctgctgaagctggctggcgacgtggaatccaacccaggccctactagtatggactggatttggcgcatccttttccttgtcggcgctgctaccggcgcccattccgggcccgtggacaacaagttcaacaaagagcggtacagcgcctactacgagatttggcaactgcccaacctgaacgtgcggcagaaggccgccttcatcggatctctgcaggacgaccctagccagagcgccaatctgctggccgaggccaagaagctgaacgacgcccaggcccctaaaggatccggcggcggaggatctggcggaggcggatctgggggcggaggctctttcgaacaagttcagcttcaacagcctggcgctgagctggtcaaacctggcgcttctgtgaagatgagctgcaaagccagcggctacgccttcagcagctactggatcaactggatgaagcagaaacccggccagggactcgaatggatcggccaaatctatcccggcgacggcgacaccaactacaacggcaagttcaagggcagagccacactgaccgccgatacctctagcagcacagcctacatgcagctgagcagcctgaccagcgaagatagcgccgtgtacttctgtgcccggtccatcacaacagtcgtgggctgcgctatggactattggggccagggaacaagcgtgaccgtgtctagtacgcgtgaggacctgaagaacgtgttcccacctgaggtggccgtgttcgagcctagcgaggccgagatcagccacacccagaaagccaccctcgtgtgcctggctaccggcttctaccccgaccatgtggaactgtcttggtgggtcaacggcaaagaggtgcacagcggcgtgtgtaccgacccccagccactgaaagaacagcccgccctgaacgacagccggtactgcctgagcagcagactgagagtgtccgccaccttctggcagaacccccggaaccacttcagatgccaggtgcagttctacggcctgagcgagaacgacgagtggacccaggacagagccaagcccgtgacccagatcgtgtctgccgaagcctggggcagagccgattgcggctttaccagcgagagctaccagcagggcgtgctgagcgccaccatcctgtacgagatcctgctgggcaaggccaccctgtacgccgtgctggtgtctgccctggtgctgatggctatggtcaagcggaaggacagccgggga

SEQ ID NO: 5768 - DNA, 2775 bp, Artificial Sequence
  Synthetic Polynucloetide
atggccttaccagtgaccgccttgctcctgccgctggccttgctgctccacgccgccaggccggacatccagatgacacagagccctagcagcctgtctgccagcgtgggagacagagtgaccatcacatgcaaggccagcgaccacatcaacaactggctggcctggtatcagcagaagcctggacaggcccctaagctgctgatctacggcgctaccacactggaaacaggcgtgcccagcagattttctggcagcggctctggcaccgactacaccctgacaatatccagcctccagcctgaggacttcgccacctactactgtcagcagagctggaacaccccttggacattcggccagggcaccaagctggaaatcaagagactcgagatccagaaccctgatcctgccgtgtaccagctgcgggatagcaagagcagcgacaagagcgtgtgtctgttcaccgacttcgacagccagaccaacgtgtcccagagcaaggactccgacgtgtacatcaccgataagtgcgtgctggacatgcggagcatggacttcaagagcaactccgccgtggcctggtccaacaagtccgatttcgcctgcgccaacgccttcaacaacagcattatccccgaggacacattcttcccaagccccgagagcagctgcgacgtgaagctggtggaaaagagcttcgagacagacaccaacctgaacttccagaacctgagcgtgatcggcttcagaatcctgctgctgaaagtggccggctttaacctgctgatgaccctgcggctgtggtccagccgcgccaagagaagcggatctggcgtgaagcagaccctgaatttcgacctgctgaagctggctggcgacgtggaatccaacccaggccctactagtatggactggatttggcgcatccttttccttgtcggcgctgctaccggcgcccattccgggcccgtggacaacaagttcaacaaagagcggtacagcgcctactacgagatttggcaactgcccaacctgaacgtgcggcagaaggccgccttcatcggatctctgcaggacgaccctagccagagcgccaatctgctggccgaggccaagaagctgaacgacgcccaggcccctaaaggatccggcggcggaggatctggcggaggcggatctgggggcggaggctctttcgaacaagttcagcttcaacagcctggcgctgagctggtcaaacctggcgcttctgtgaagatgagctgcaaagccagcggctacgccttcagcagctactggatcaactggatgaagcagaaacccggccagggactcgaatggatcggccaaatctatcccggcgacggcgacaccaactacaacggcaagttcaagggcagagccacactgaccgccgatacctctagcagcacagcctacatgcagctgagcagcctgaccagcgaagatagcgccgtgtacttctgtgcccggtccatcacaacagtcgtgggctgcgctatggactattggggccagggaacaagcgtgaccgtgtctagtacgcgtgaggacctgaagaacgtgttcccacctgaggtggccgtgttcgagcctagcgaggccgagatcagccacacccagaaagccaccctcgtgtgcctggctaccggcttctaccccgaccatgtggaactgtcttggtgggtcaacggcaaagaggtgcacagcggcgtgtgtaccgacccccagccactgaaagaacagcccgccctgaacgacagccggtactgcctgagcagcagactgagagtgtccgccaccttctggcagaacccccggaaccacttcagatgccaggtgcagttctacggcctgagcgagaacgacgagtggacccaggacagagccaagcccgtgacccagatcgtgtctgccgaagcctggggcagagccgattgcggctttaccagcgagagctaccagcagggcgtgctgagcgccaccatcctgtacgagatcctgctgggcaaggccaccctgtacgccgtgctggtgtctgccctggtgctgatggctatggtcaagcggaaggacagccggggaagggccaagcgatctggatctggagcaacaaacttctcactactcaaacaagcaggtgacgtggaggagaatcccgggccttctagaggcgggatccacaccatggctacctacgaggtgctgtgcgaggtggcaagaaagctgggcaccgacgacagagaagtggtgctgttcctgctgaacgtgttcatccctcagcctacactggcccagctgatcggtgcactgagagccctgaaagaggaaggccggctgacctttcctctgctggccgaatgcctgttcagagccggaagaagggatctgctgcgggacctgctgcatctggaccccagatttctggaaagacacctggccggcaccatgagctacttcagcccttaccagctgaccgtgctgcacgttgacggcgaactgtgcgccagagatattcggagcctgatcttcctgagcaaggacaccatcggcagccggtctacccctcagacatttctgcactgggtgtactgcatggaaaacctggacctgctcggccccacagatgtggatgccctgatgtccatgctgagaagcctgagcagagtggacctccagagacaggtgcagacactgatgggactgcacctgagcggacctagccacagccagcactacagacacacccct

SEQ ID NO: 5769 - DNA, 2799 bp, Artificial Sequence
  Synthetic Polynucloetide
atggccttaccagtgaccgccttgctcctgccgctggccttgctgctccacgccgccaggccggacatccagatgacacagagccctagcagcctgtctgccagcgtgggagacagagtgaccatcacatgcaaggccagcgaccacatcaacaactggctggcctggtatcagcagaagcctggacaggcccctaagctgctgatctacggcgctaccacactggaaacaggcgtgcccagcagattttctggcagcggctctggcaccgactacaccctgacaatatccagcctccagcctgaggacttcgccacctactactgtcagcagagctggaacaccccttggacattcggccagggcaccaagctggaaatcaagagactcgaggacctgaagaacgtgttcccacctgaggtggccgtgttcgagcctagcgaggccgagatcagccacacccagaaagccaccctcgtgtgcctggctaccggcttctaccccgaccatgtggaactgtcttggtgggtcaacggcaaagaggtgcacagcggcgtgtctaccgacccccagccactgaaagaacagcccgccctgaacgacagccggtactgcctgagcagcagactgagagtgtccgccaccttctggcagaacccccggaaccacttcagatgccaggtgcagttctacggcctgagcgagaacgacgagtggacccaggacagagccaagcccgtgacccagatcgtgtctgccgaagcctggggcagagccgattgcggctttaccagcgagagctaccagcagggcgtgctgagcgccaccatcctgtacgagatcctgctgggcaaggccaccctgtacgccgtgctggtgtctgccctggtgctgatggctatggtcaagcggaaggacagccggggaagggccaagcgatctggatctggagcaacaaacttctcactactcaaacaagcaggtgacgtggaggagaatcccgggcctactagtatggactggatttggcgcatccttttccttgtcggcgctgctaccggcgcccattccgggcccgtggacaacaagttcaacaaagagcggtacagcgcctactacgagatttggcaactgcccaacctgaacgtgcggcagaaggccgccttcatcggatctctgcaggacgaccctagccagagcgccaatctgctggccgaggccaagaagctgaacgacgcccaggcccctaaaggatccggcggcggaggatctggcggaggcggatctgggggcggaggctctttcgaacaagttcagcttcaacagcctggcgctgagctggtcaaacctggcgcttctgtgaagatgagctgcaaagccagcggctacgccttcagcagctactggatcaactggatgaagcagaaacccggccagggactcgaatggatcggccaaatctatcccggcgacggcgacaccaactacaacggcaagttcaagggcagagccacactgaccgccgatacctctagcagcacagcctacatgcagctgagcagcctgaccagcgaagatagcgccgtgtacttctgtgcccggtccatcacaacagtcgtgggctgcgctatggactattggggccagggaacaagcgtgaccgtgtctagtacgcgtatccagaaccctgatcctgccgtgtaccagctgcgggatagcaagagcagcgacaagagcgtgtgtctgttcaccgacttcgacagccagaccaacgtgtcccagagcaaggactccgacgtgtacatcaccgataagaccgtgctggacatgcggagcatggacttcaagagcaactccgccgtggcctggtccaacaagtccgatttcgcctgcgccaacgccttcaacaacagcattatccccgaggacacattcttcccaagccccgagagcagctgcgacgtgaagctggtggaaaagagcttcgagacagacaccaacctgaacttccagaacctgagcgtgatcggcttcagaatcctgctgctgaaagtggccggctttaacctgctgatgaccctgcggctgtggtccagccgcgccaagagaagcggatctggcgtgaagcagaccctgaatttcgacctgctgaagctggctggcgacgtggaatccaacccaggcccttctagaggccatatgaccgagtacaagcccacggtgcgcctcgccacccgcgacgacgtccccagggccgtacgcaccctcgccgccgcgttcgccgactaccccgccacgcgccacaccgtcgatccggaccgccacatcgagcgggtcaccgagctgcaagaactcttcctcacgcgcgtcgggctcgacatcggcaaggtgtgggtcgcggacgacggcgccgcggtggcggtctggaccacgccggagagcgtcgaagcgggggcggtgttcgccgagatcggcccgcgcatggccgagttgagcggttcccggctggccgcgcagcaacagatggaaggcctcctggcgccgcaccggcccaaggagcccgcgtggttcctggccaccgtcggcgtctcgcccgaccaccagggcaagggtctgggcagcgccgtcgtgctccccggagtggaggcggccgagcgcgccggggtgcccgccttcctggagacctccgcgccccgcaacctccccttctacgagcggctcggcttcaccgtcaccgccgacgtcgaggtgcccgaaggaccgcgcacctggtgcatgacccgcaagcccggtgcctga

SEQ ID NO: 5770 - DNA, 3045 bp, Artificial Sequence
  Synthetic Polynucloetide
atggccttaccagtgaccgccttgctcctgccgctggccttgctgctccacgccgccaggccggacatccagatgacacagagccctagcagcctgtctgccagcgtgggagacagagtgaccatcacatgcaaggccagcgaccacatcaacaactggctggcctggtatcagcagaagcctggacaggcccctaagctgctgatctacggcgctaccacactggaaacaggcgtgcccagcagattttctggcagcggctctggcaccgactacaccctgacaatatccagcctccagcctgaggacttcgccacctactactgtcagcagagctggaacaccccttggacattcggccagggcaccaagctggaaatcaagagactcgaggacctgaagaacgtgttcccacctgaggtggccgtgttcgagcctagcgaggccgagatcagccacacccagaaagccaccctcgtgtgcctggctaccggcttctaccccgaccatgtggaactgtcttggtgggtcaacggcaaagaggtgcacagcggcgtgtctaccgacccccagccactgaaagaacagcccgccctgaacgacagccggtactgcctgagcagcagactgagagtgtccgccaccttctggcagaacccccggaaccacttcagatgccaggtgcagttctacggcctgagcgagaacgacgagtggacccaggacagagccaagcccgtgacccagatcgtgtctgccgaagcctggggcagagccgattgcggctttaccagcgagagctaccagcagggcgtgctgagcgccaccatcctgtacgagatcctgctgggcaaggccaccctgtacgccgtgctggtgtctgccctggtgctgatggctatggtcaagcggaaggacagccggggaagggccaagcgatctggatctggagcaacaaacttctcactactcaaacaagcaggtgacgtggaggagaatcccgggcctactagtatggactggatttggcgcatccttttccttgtcggcgctgctaccggcgcccattccgggcccgtggacaacaagttcaacaaagagcggtacagcgcctactacgagatttggcaactgcccaacctgaacgtgcggcagaaggccgccttcatcggatctctgcaggacgaccctagccagagcgccaatctgctggccgaggccaagaagctgaacgacgcccaggcccctaaaggatccggcggcggaggatctggcggaggcggatctgggggcggaggctctttcgaacaagttcagcttcaacagcctggcgctgagctggtcaaacctggcgcttctgtgaagatgagctgcaaagccagcggctacgccttcagcagctactggatcaactggatgaagcagaaacccggccagggactcgaatggatcggccaaatctatcccggcgacggcgacaccaactacaacggcaagttcaagggcagagccacactgaccgccgatacctctagcagcacagcctacatgcagctgagcagcctgaccagcgaagatagcgccgtgtacttctgtgcccggtccatcacaacagtcgtgggctgcgctatggactattggggccagggaacaagcgtgaccgtgtctagtacgcgtgagcagaaactgatctcggaagaggatgggagcggcaccccattcccttctctggcccctcccatcatgctgctggtggacggcaagcagcagatggtggtcgtgtgcctggtgctggatgtggccccacctggactggacagccccatctggtttagcgccggcaatggctctgccctggacgcctttacctacggcccaagccctgccaccgatggcacctggacaaatctggcccacctgagcctgcccagcgaggaactggcttcttgggagcctctcgtgtgccacacaggacctggcgctgagggacacagcagatccacccagcctatgcacctgtctggcgaggccagcaccgccagaacctgtcctcaggaacctctgagaggcacccctggcggagcactgtggctgggagtgctgagactgctgctgttcaagctgctgctgtttgacctgctgctgacctgctcctgtctgtgcgatcctgccggccctctgccttctcctgccaccaccacaagactgagagccctgggcagccacagactgcaccctgccacagagacaggcggcagagaggccacaagcagccctagaccccagcccagagacagaagatggggcgataccccccctggcagaaagcctggatctccagtccgcgccaagagaagcggatctggcgtgaagcagaccctgaatttcgacctgctgaagctggctggcgacgtggaatccaacccaggcccttctagaggccatatgaccgagtacaagcccacggtgcgcctcgccacccgcgacgacgtccccagggccgtacgcaccctcgccgccgcgttcgccgactaccccgccacgcgccacaccgtcgatccggaccgccacatcgagcgggtcaccgagctgcaagaactcttcctcacgcgcgtcgggctcgacatcggcaaggtgtgggtcgcggacgacggcgccgcggtggcggtctggaccacgccggagagcgtcgaagcgggggcggtgttcgccgagatcggcccgcgcatggccgagttgagcggttcccggctggccgcgcagcaacagatggaaggcctcctggcgccgcaccggcccaaggagcccgcgtggttcctggccaccgtcggcgtctcgcccgaccaccagggcaagggtctgggcagcgccgtcgtgctccccggagtggaggcggccgagcgcgccggggtgcccgccttcctggagacctccgcgccccgcaacctccccttctacgagcggctcggcttcaccgtcaccgccgacgtcgaggtgcccgaaggaccgcgcacctggtgcatgacccgcaagcccggtgcctga

SEQ ID NO: 5771 - DNA, 2910 bp, Artificial Sequence
  Synthetic Polynucloetide
atggccttaccagtgaccgccttgctcctgccgctggccttgctgctccacgccgccaggccggacatccagatgacacagagccctagcagcctgtctgccagcgtgggagacagagtgaccatcacatgcaaggccagcgaccacatcaacaactggctggcctggtatcagcagaagcctggacaggcccctaagctgctgatctacggcgctaccacactggaaacaggcgtgcccagcagattttctggcagcggctctggcaccgactacaccctgacaatatccagcctccagcctgaggacttcgccacctactactgtcagcagagctggaacaccccttggacattcggccagggcaccaagctggaaatcaagagactcgaggggaaaccaattcccaaccctcttctgggactggattcaaccggcagcggcgacaagcagctggacgccgacgtgtcccccaagcctaccatcttcctgccctctatcgccgagacaaagctccagaaggccggcacctacctgtgcctgctggaaaagttcttcccagatgtgattaagatccactggcaggaaaagaagtccaacaccatcctgggcagccaggaaggcaacaccatgaagaccaacgacacctacatgaagttcagctggctgaccgtgcccgagaagtccctggacaaagaacacagatgcatcgtgcggcacgaaaacaacaagaacggcgtggaccaggaaatcatcttcccacccatcaagaccgatgtgattacaatggaccccaaggacaactgctccaaggacgccaacgataccctgctgctccagctgaccaacaccagcgcctactacatgtacttgttgctgctgctgaagtccgtggtgtacttcgccatcatcacatgctgcctgctgcggagaaccgccttctgctgcaacggcgagaagtctagggccaagcgatctggatctggagcaacaaacttctcactactcaaacaagcaggtgacgtggaggagaatcccgggcctactagtatggactggatttggcgcatccttttccttgtcggcgctgctaccggcgcccattccgggcccgtggacaacaagttcaacaaagagcggtacagcgcctactacgagatttggcaactgcccaacctgaacgtgcggcagaaggccgccttcatcggatctctgcaggacgaccctagccagagcgccaatctgctggccgaggccaagaagctgaacgacgcccaggcccctaaaggatccggcggcggaggatctggcggaggcggatctgggggcggaggctctttcgaacaagttcagcttcaacagcctggcgctgagctggtcaaacctggcgcttctgtgaagatgagctgcaaagccagcggctacgccttcagcagctactggatcaactggatgaagcagaaacccggccagggactcgaatggatcggccaaatctatcccggcgacggcgacaccaactacaacggcaagttcaagggcagagccacactgaccgccgatacctctagcagcacagcctacatgcagctgagcagcctgaccagcgaagatagcgccgtgtacttctgtgcccggtccatcacaacagtcgtgggctgcgctatggactattggggccagggaacaagcgtgaccgtgtctagtacgcgtgagcagaaactgatctcggaagaggatgggagcggcagccagcctcacaccaagcccagcgtgttcgtgatgaagaacggcaccaacgtggcctgcctcgtgaaagagttctaccccaaggacatcaggatcaacctggtgtccagcaagaagatcaccgagttcgaccccgccatcgtgatctcccccagcggcaagtacaacgccgtgaagctggggaagtacgaggacagcaacagcgtgacctgctccgtgcagcacgacaacaagaccgtgcacagcaccgactttgaagtgaaaaccgactccaccgaccacgtgaagcccaaagagacagagaacaccaagcagcccagcaagagctgccacaagcccaaggccatcgtgcacaccgagaaagtgaacatgatgagcctgaccgtgctgggcctgcggatgctgttcgccaaaaccgtggccgtgaacttcctgctgaccgccaagctgttcttcctccgcgccaagagaagcggatctggcgtgaagcagaccctgaatttcgacctgctgaagctggctggcgacgtggaatccaacccaggcccttctagaggccatatgaccgagtacaagcccacggtgcgcctcgccacccgcgacgacgtccccagggccgtacgcaccctcgccgccgcgttcgccgactaccccgccacgcgccacaccgtcgatccggaccgccacatcgagcgggtcaccgagctgcaagaactcttcctcacgcgcgtcgggctcgacatcggcaaggtgtgggtcgcggacgacggcgccgcggtggcggtctggaccacgccggagagcgtcgaagcgggggcggtgttcgccgagatcggcccgcgcatggccgagttgagcggttcccggctggccgcgcagcaacagatggaaggcctcctggcgccgcaccggcccaaggagcccgcgtggttcctggccaccgtcggcgtctcgcccgaccaccagggcaagggtctgggcagcgccgtcgtgctccccggagtggaggcggccgagcgcgccggggtgcccgccttcctggagacctccgcgccccgcaacctccccttctacgagcggctcggcttcaccgtcaccgccgacgtcgaggtgcccgaaggaccgcgcacctggtgcatgacccgcaagcccggtgcctga

SEQ ID NO: 5772 - DNA, 2121 bp, Artificial Sequence
  Synthetic Polynucloetide
atggccttaccagtgaccgccttgctcctgccgctggccttgctgctccacgccgccaggccggacatccagatgacacagagccctagcagcctgtctgccagcgtgggagacagagtgaccatcacatgcaaggccagcgaccacatcaacaactggctggcctggtatcagcagaagcctggacaggcccctaagctgctgatctacggcgctaccacactggaaacaggcgtgcccagcagattttctggcagcggctctggcaccgactacaccctgacaatatccagcctccagcctgaggacttcgccacctactactgtcagcagagctggaacaccccttggacattcggccagggcaccaagctggaaatcaagagactcgagagccagcctcacaccaagcccagcgtgttcgtgatgaagaacggcaccaacgtggcctgcctcgtgaaagagttctaccccaaggacatcaggatcaacctggtgtccagcaagaagatcaccgagttcgaccccgccatcgtgatctcccccagcggcaagtacaacgccgtgaagctggggaagtacgaggacagcaacagcgtgacctgctccgtgcagcacgacaacaagaccgtgcacagcaccgactttgaagtgaaaaccgactccaccgaccacgtgaagcccaaagagacagagaacaccaagcagcccagcaagagctgccacaagcccaaggccatcgtgcacaccgagaaagtgaacatgatgagcctgaccgtgctgggcctgcggatgctgttcgccaaaaccgtggccgtgaacttcctgctgaccgccaagctgttcttcctcagggccaagcgatctggatctggagcaacaaacttctcactactcaaacaagcaggtgacgtggaggagaatcccgggcctactagtatggactggatttggcgcatccttttccttgtcggcgctgctaccggcgcccattccgggcccgtggacaacaagttcaacaaagagcggtacagcgcctactacgagatttggcaactgcccaacctgaacgtgcggcagaaggccgccttcatcggatctctgcaggacgaccctagccagagcgccaatctgctggccgaggccaagaagctgaacgacgcccaggcccctaaaggatccggcggcggaggatctggcggaggcggatctgggggcggaggctctttcgaacaagttcagcttcaacagcctggcgctgagctggtcaaacctggcgcttctgtgaagatgagctgcaaagccagcggctacgccttcagcagctactggatcaactggatgaagcagaaacccggccagggactcgaatggatcggccaaatctatcccggcgacggcgacaccaactacaacggcaagttcaagggcagagccacactgaccgccgatacctctagcagcacagcctacatgcagctgagcagcctgaccagcgaagatagcgccgtgtacttctgtgcccggtccatcacaacagtcgtgggctgcgctatggactattggggccagggaacaagcgtgaccgtgtctagtacgcgtgacaagcagctggacgccgacgtgtcccccaagcctaccatcttcctgccctctatcgccgagacaaagctccagaaggccggcacctacctgtgcctgctggaaaagttcttcccagatgtgattaagatccactggcaggaaaagaagtccaacaccatcctgggcagccaggaaggcaacaccatgaagaccaacgacacctacatgaagttcagctggctgaccgtgcccgagaagtccctggacaaagaacacagatgcatcgtgcggcacgaaaacaacaagaacggcgtggaccaggaaatcatcttcccacccatcaagaccgatgtgattacaatggaccccaaggacaactgctccaaggacgccaacgataccctgctgctccagctgaccaacaccagcgcctactacatgtacttgttgctgctgctgaagtccgtggtgtacttcgccatcatcacatgctgcctgctgcggagaaccgccttctgctgcaacggcgagaagtct

SEQ ID NO: 5773 - DNA, 3330 bp, Artificial Sequence
  Synthetic Polynucloetide
atggccttaccagtgaccgccttgctcctgccgctggccttgctgctccacgccgccaggccggacatccagatgacacagagccctagcagcctgtctgccagcgtgggagacagagtgaccatcacatgcaaggccagcgaccacatcaacaactggctggcctggtatcagcagaagcctggacaggcccctaagctgctgatctacggcgctaccacactggaaacaggcgtgcccagcagattttctggcagcggctctggcaccgactacaccctgacaatatccagcctccagcctgaggacttcgccacctactactgtcagcagagctggaacaccccttggacattcggccagggcaccaagctggaaatcaagagaggacagcctaaggccaatcctaccgtgacactgttccctccaagcagcgaagaactccaggccaacaaggccacacttgtgtgcctgatctccgacttctaccctggggctgtgacagtggcttggaaggccgatggatctcctgtgaaagccggcgtggaaaccaccaagccatccaagcagagcaacaacaaatacgccgccagctcctacctgagcctgacacctgagcagtggaagtcccacagatcctacagctgccaagtgacccacgaaggcagcaccgtggaaaagacagtggcccctacagagtgcagcggatcccagagcttcggcctgctggaccccaagctgtgctacctgctggatggcatcctgttcatctacggcgtgatcctgaccgccctgttcctgagagtgaagttcagcagaagcgccgacgcccctgcctaccagcagggacagaaccaactgtacaacgagctgaacctgggcagacgggaagagtacgacgtgctggacaagcggagaggcagggaccctgagatgggcggaaagccccagcggagaaagaacccccaggaaggactgtataacgaactccagaaagacaagatggccgaagcctacagcgagatcggcatgaagggcgagcggagaagaggcaagggccacgatggcctgtaccagggcctgagcaccgccaccaaggacacctatgacgccctgcacatgcaggccctgcctccaagaagggccaagcgatctggatctggagcaacaaacttctcactactcaaacaagcaggtgacgtggaggagaatcccgggcctactagtatggactggatttggcgcatccttttccttgtcggcgctgctaccggcgcccattccgggcccgtggacaacaagttcaacaaagagcggtacagcgcctactacgagatttggcaactgcccaacctgaacgtgcggcagaaggccgccttcatcggatctctgcaggacgaccctagccagagcgccaatctgctggccgaggccaagaagctgaacgacgcccaggcccctaaaggatccggcggcggaggatctggcggaggcggatctgggggcggaggctctttcgaacaagttcagcttcaacagcctggcgctgagctggtcaaacctggcgcttctgtgaagatgagctgcaaagccagcggctacgccttcagcagctactggatcaactggatgaagcagaaacccggccagggactcgaatggatcggccaaatctatcccggcgacggcgacaccaactacaacggcaagttcaagggcagagccacactgaccgccgatacctctagcagcacagcctacatgcagctgagcagcctgaccagcgaagatagcgccgtgtacttctgtgcccggtccatcacaacagtcgtgggctgcgctatggactattggggccagggaacaagcgtgaccgtgtctagtgcctctacaaagggaccctccgtgtttcctctggctcccagcagcaagtctacaagcggaggaacagccgctctgggctgcctggtcaaggattactttcccgagcctgtgaccgtgtcctggaatagcggagcactgacaagcggcgtgcacacctttccagccgtgctgcaaagcagcggcctgtactctctgagcagcgtggtcacagtgcctagctctagcctgggcacccagacctacatctgcaatgtgaaccacaagcctagcaacaccaaggtggacaagagagtggaacccaagagctgtggtacccagagttttgggttgttggaccctaaattgtgctatctgttggacggaatcctgttcatttacggagtgatcctgaccgcattgttcctgcgggttaagttttccagatccgcagacgcacccgcttaccaacaagggcagaaccaactctacaatgaacttaatttggggcggagggaagagtacgacgttctggacaaaaggaggggacgagatcccgagatgggcggaaagcctcagcgaaggaagaatccgcaagaggggctttataacgaactccagaaagataaaatggcagaagcctatagtgagattgggatgaagggagaaaggaggaggggtaaaggtcacgatgggttgtaccaaggattgagcacagccactaaagatacctatgatgcgctccacatgcaggccctgccgccaagacgcgccaagagaagcggatctggcgtgaagcagaccctgaatttcgacctgctgaagctggctggcgacgtggaatccaacccaggcccttctagaggccatatgaccgagtacaagcccacggtgcgcctcgccacccgcgacgacgtccccagggccgtacgcaccctcgccgccgcgttcgccgactaccccgccacgcgccacaccgtcgatccggaccgccacatcgagcgggtcaccgagctgcaagaactcttcctcacgcgcgtcgggctcgacatcggcaaggtgtgggtcgcggacgacggcgccgcggtggcggtctggaccacgccggagagcgtcgaagcgggggcggtgttcgccgagatcggcccgcgcatggccgagttgagcggttcccggctggccgcgcagcaacagatggaaggcctcctggcgccgcaccggcccaaggagcccgcgtggttcctggccaccgtcggcgtctcgcccgaccaccagggcaagggtctgggcagcgccgtcgtgctccccggagtggaggcggccgagcgcgccggggtgcccgccttcctggagacctccgcgccccgcaacctccccttctacgagcggctcggcttcaccgtcaccgccgacgtcgaggtgcccgaaggaccgcgcacctggtgcatgacccgcaagcccggtgcctga

SEQ ID NO: 5774 - DNA, 2685 bp, Artificial Sequence
  Synthetic Polynucloetide
atggccttaccagtgaccgccttgctcctgccgctggccttgctgctccacgccgccaggccggacatccagatgacacagagccctagcagcctgtctgccagcgtgggagacagagtgaccatcacatgcaaggccagcgaccacatcaacaactggctggcctggtatcagcagaagcctggacaggcccctaagctgctgatctacggcgctaccacactggaaacaggcgtgcccagcagattttctggcagcggctctggcaccgactacaccctgacaatatccagcctccagcctgaggacttcgccacctactactgtcagcagagctggaacaccccttggacattcggccagggcaccaagctggaaatcaagagactcgaggacctgaagaacgtgttcccacctgaggtggccgtgttcgagcctagcgaggccgagatcagccacacccagaaagccaccctcgtgtgcctggctaccggcttctaccccgaccatgtggaactgtcttggtgggtcaacggcaaagaggtgcacagcggcgtgtctaccgacccccagccactgaaagaacagcccgccctgaacgacagccggtactgcctgagcagcagactgagagtgtccgccaccttctggcagaacccccggaaccacttcagatgccaggtgcagttctacggcctgagcgagaacgacgagtggacccaggacagagccaagcccgtgacccagatcgtgtctgccgaagcctggggcagagccgattgcggatcccagagcttcggcctgctggaccccaagctgtgctacctgctggatggcatcctgttcatctacggcgtgatcctgaccgccctgttcctgagagtgaagttcagcagaagcgccgacgcccctgcctaccagcagggacagaaccaactgtacaacgagctgaacctgggcagacgggaagagtacgacgtgctggacaagcggagaggcagggaccctgagatgggcggaaagccccagcggagaaagaacccccaggaaggactgtataacgaactccagaaagacaagatggccgaagcctacagcgagatcggcatgaagggcgagcggagaagaggcaagggccacgatggcctgtaccagggcctgagcaccgccaccaaggacacctatgacgccctgcacatgcaggccctgcctccaagaagggccaagcgatctggatctggagcaacaaacttctcactactcaaacaagcaggtgacgtggaggagaatcccgggcctactagtatggactggatttggcgcatccttttccttgtcggcgctgctaccggcgcccattccgggcccgtggacaacaagttcaacaaagagcggtacagcgcctactacgagatttggcaactgcccaacctgaacgtgcggcagaaggccgccttcatcggatctctgcaggacgaccctagccagagcgccaatctgctggccgaggccaagaagctgaacgacgcccaggcccctaaaggatccggcggcggaggatctggcggaggcggatctgggggcggaggctctttcgaacaagttcagcttcaacagcctggcgctgagctggtcaaacctggcgcttctgtgaagatgagctgcaaagccagcggctacgccttcagcagctactggatcaactggatgaagcagaaacccggccagggactcgaatggatcggccaaatctatcccggcgacggcgacaccaactacaacggcaagttcaagggcagagccacactgaccgccgatacctctagcagcacagcctacatgcagctgagcagcctgaccagcgaagatagcgccgtgtacttctgtgcccggtccatcacaacagtcgtgggctgcgctatggactattggggccagggaacaagcgtgaccgtgtctagtacgcgtatccagaaccctgatcctgccgtgtaccagctgcgggatagcaagagcagcgacaagagcgtgtgtctgttcaccgacttcgacagccagaccaacgtgtcccagagcaaggactccgacgtgtacatcaccgataagaccgtgctggacatgcggagcatggacttcaagagcaactccgccgtggcctggtccaacaagtccgatttcgcctgcgccaacgccttcaacaacagcattatccccgaggacacattcttcccaagccccgagagcagctgcggtacccagagttttgggttgttggaccctaaattgtgctatctgttggacggaatcctgttcatttacggagtgatcctgaccgcattgttcctgcgggttaagttttccagatccgcagacgcacccgcttaccaacaagggcagaaccaactctacaatgaacttaatttggggcggagggaagagtacgacgttctggacaaaaggaggggacgagatcccgagatgggcggaaagcctcagcgaaggaagaatccgcaagaggggctttataacgaactccagaaagataaaatggcagaagcctatagtgagattgggatgaagggagaaaggaggaggggtaaaggtcacgatgggttgtaccaaggattgagcacagccactaaagatacctatgatgcgctccacatgcaggccctgccgccaaga

SEQ ID NO: 5775 - DNA, 2685 bp, Artificial Sequence
  Synthetic Polynucloetide
atggccttaccagtgaccgccttgctcctgccgctggccttgctgctccacgccgccaggccggacatccagatgacacagagccctagcagcctgtctgccagcgtgggagacagagtgaccatcacatgcaaggccagcgaccacatcaacaactggctggcctggtatcagcagaagcctggacaggcccctaagctgctgatctacggcgctaccacactggaaacaggcgtgcccagcagattttctggcagcggctctggcaccgactacaccctgacaatatccagcctccagcctgaggacttcgccacctactactgtcagcagagctggaacaccccttggacattcggccagggcaccaagctggaaatcaagagactcgaggacctgaagaacgtgttcccacctgaggtggccgtgttcgagcctagcaaggccgagatcgcccacacccagaaagccaccctcgtgtgcctggctaccggcttctaccccgaccatgtggaactgtcttggtgggtcaacggcaaagaggtgcacagcggcgtgtgtaccgacccccagccactgaaagaacagcccgccctgaacgacagccggtactgcctgagcagcagactgagagtgtccgccaccttctggcagaacccccggaaccacttcagatgccaggtgcagttctacggcctgagcgagaacgacgagtggacccaggacagagccaagcccgtgacccagatcgtgtctgccgaagcctggggcagagccgattgcggatcccagagcttcggcctgctggaccccaagctgtgctacctgctggatggcatcctgttcatctacggcgtgatcctgaccgccctgttcctgagagtgaagttcagcagaagcgccgacgcccctgcctaccagcagggacagaaccaactgtacaacgagctgaacctgggcagacgggaagagtacgacgtgctggacaagcggagaggcagggaccctgagatgggcggaaagccccagcggagaaagaacccccaggaaggactgtataacgaactccagaaagacaagatggccgaagcctacagcgagatcggcatgaagggcgagcggagaagaggcaagggccacgatggcctgtaccagggcctgagcaccgccaccaaggacacctatgacgccctgcacatgcaggccctgcctccaagaagggccaagcgatctggatctggagcaacaaacttctcactactcaaacaagcaggtgacgtggaggagaatcccgggcctactagtatggactggatttggcgcatccttttccttgtcggcgctgctaccggcgcccattccgggcccgtggacaacaagttcaacaaagagcggtacagcgcctactacgagatttggcaactgcccaacctgaacgtgcggcagaaggccgccttcatcggatctctgcaggacgaccctagccagagcgccaatctgctggccgaggccaagaagctgaacgacgcccaggcccctaaaggatccggcggcggaggatctggcggaggcggatctgggggcggaggctctttcgaacaagttcagcttcaacagcctggcgctgagctggtcaaacctggcgcttctgtgaagatgagctgcaaagccagcggctacgccttcagcagctactggatcaactggatgaagcagaaacccggccagggactcgaatggatcggccaaatctatcccggcgacggcgacaccaactacaacggcaagttcaagggcagagccacactgaccgccgatacctctagcagcacagcctacatgcagctgagcagcctgaccagcgaagatagcgccgtgtacttctgtgcccggtccatcacaacagtcgtgggctgcgctatggactattggggccagggaacaagcgtgaccgtgtctagtacgcgtatccagaaccctgatcctgccgtgtaccagctgcgggatagcaagagcagcgacaagagcgtgtgtctgttcaccgacttcgacagccagaccaacgtgtcccagagcaaggactccgacgtgtacatcaccgataagtgcgtgctggacatgcggagcatggacttcaagagcaactccgccgtggcctggtccaacaagtccgatttcgcctgcgccaacgccttcaacaacagcattatccccgaggacacattcttcccaagcagcgacgtgccctgcggtacccagagttttgggttgttggaccctaaattgtgctatctgttggacggaatcctgttcatttacggagtgatcctgaccgcattgttcctgcgggttaagttttccagatccgcagacgcacccgcttaccaacaagggcagaaccaactctacaatgaacttaatttggggcggagggaagagtacgacgttctggacaaaaggaggggacgagatcccgagatgggcggaaagcctcagcgaaggaagaatccgcaagaggggctttataacgaactccagaaagataaaatggcagaagcctatagtgagattgggatgaagggagaaaggaggaggggtaaaggtcacgatgggttgtaccaaggattgagcacagccactaaagatacctatgatgcgctccacatgcaggccctgccgccaaga

SEQ ID NO: 5776 - DNA, 2898 bp, Artificial Sequence
  Synthetic Polynucloetide
atggccttaccagtgaccgccttgctcctgccgctggccttgctgctccacgccgccaggccggacatccagatgacacagagccctagcagcctgtctgccagcgtgggagacagagtgaccatcacatgcaaggccagcgaccacatcaacaactggctggcctggtatcagcagaagcctggacaggcccctaagctgctgatctacggcgctaccacactggaaacaggcgtgcccagcagattttctggcagcggctctggcaccgactacaccctgacaatatccagcctccagcctgaggacttcgccacctactactgtcagcagagctggaacaccccttggacattcggccagggcaccaagctggaaatcaagagactcgaggggaaaccaattcccaaccctcttctgggactggattcaaccggcagcggcgaggacctgaagaacgtgttcccacctgaggtggccgtgttcgagcctagcgaggccgagatcagccacacccagaaagccaccctcgtgtgcctggctaccggcttctaccccgaccatgtggaactgtcttggtgggtcaacggcaaagaggtgcacagcggcgtgtctaccgacccccagccactgaaagaacagcccgccctgaacgacagccggtactgcctgagcagcagactgagagtgtccgccaccttctggcagaacccccggaaccacttcagatgccaggtgcagttctacggcctgagcgagaacgacgagtggacccaggacagagccaagcccgtgacccagatcgtgtctgccgaagcctggggcagagccgattgcggatcccagagcttcggcctgctggaccccaagctgtgctacctgctggatggcatcctgttcatctacggcgtgatcctgaccgccctgttcctgagagtgaagttcagcagaagcgccgacgcccctgcctaccagcagggacagaaccaactgtacaacgagctgaacctgggcagacgggaagagtacgacgtgctggacaagcggagaggcagggaccctgagatgggcggaaagccccagcggagaaagaacccccaggaaggactgtataacgaactccagaaagacaagatggccgaagcctacagcgagatcggcatgaagggcgagcggagaagaggcaagggccacgatggcctgtaccagggcctgagcaccgccaccaaggacacctatgacgccctgcacatgcaggccctgcctccaagaagggccaagcgatctggatctggagcaacaaacttctcactactcaaacaagcaggtgacgtggaggagaatcccgggcctactagtatggactggatttggcgcatccttttccttgtcggcgctgctaccggcgcccattccgggcccgtggacaacaagttcaacaaagagcggtacagcgcctactacgagatttggcaactgcccaacctgaacgtgcggcagaaggccgccttcatcggatctctgcaggacgaccctagccagagcgccaatctgctggccgaggccaagaagctgaacgacgcccaggcccctaaaggatccggcggcggaggatctggcggaggcggatctgggggcggaggctctttcgaacaagttcagcttcaacagcctggcgctgagctggtcaaacctggcgcttctgtgaagatgagctgcaaagccagcggctacgccttcagcagctactggatcaactggatgaagcagaaacccggccagggactcgaatggatcggccaaatctatcccggcgacggcgacaccaactacaacggcaagttcaagggcagagccacactgaccgccgatacctctagcagcacagcctacatgcagctgagcagcctgaccagcgaagatagcgccgtgtacttctgtgcccggtccatcacaacagtcgtgggctgcgctatggactattggggccagggaacaagcgtgaccgtgtctagtacgcgtgagcagaaactgatctcggaagaggatgggagcggcatccagaaccctgatcctgccgtgtaccagctgcgggatagcaagagcagcgacaagagcgtgtgtctgttcaccgacttcgacagccagaccaacgtgtcccagagcaaggactccgacgtgtacatcaccgataagaccgtgctggacatgcggagcatggacttcaagagcaactccgccgtggcctggtccaacaagtccgatttcgcctgcgccaacgccttcaacaacagcattatccccgaggacacattcttcccaagccccgagagcagctgcggtacccagagttttgggttgttggaccctaaattgtgctatctgttggacggaatcctgttcatttacggagtgatcctgaccgcattgttcctgaggagcaagcggtcacggctgctccacagcgattacatgaatatgacaccacgaagaccgggtcctactcgcaaacactaccaaccctacgcacctccccgcgactttgcagcgtaccgatctcgggttaagttttccagatccgcagacgcacccgcttaccaacaagggcagaaccaactctacaatgaacttaatttggggcggagggaagagtacgacgttctggacaaaaggaggggacgagatcccgagatgggcggaaagcctcagcgaaggaagaatccgcaagaggggctttataacgaactccagaaagataaaatggcagaagcctatagtgagattgggatgaagggagaaaggaggaggggtaaaggtcacgatgggttgtaccaaggattgagcacagccactaaagatacctatgatgcgctccacatgcaggccctgccgccaaga

SEQ ID NO: 5777 - DNA, 3021 bp, Artificial Sequence
  Synthetic Polynucloetide
atggccttaccagtgaccgccttgctcctgccgctggccttgctgctccacgccgccaggccggacatccagatgacacagagccctagcagcctgtctgccagcgtgggagacagagtgaccatcacatgcaaggccagcgaccacatcaacaactggctggcctggtatcagcagaagcctggacaggcccctaagctgctgatctacggcgctaccacactggaaacaggcgtgcccagcagattttctggcagcggctctggcaccgactacaccctgacaatatccagcctccagcctgaggacttcgccacctactactgtcagcagagctggaacaccccttggacattcggccagggcaccaagctggaaatcaagagactcgaggggaaaccaattcccaaccctcttctgggactggattcaaccggcagcggcgaggacctgaagaacgtgttcccacctgaggtggccgtgttcgagcctagcgaggccgagatcagccacacccagaaagccaccctcgtgtgcctggctaccggcttctaccccgaccatgtggaactgtcttggtgggtcaacggcaaagaggtgcacagcggcgtgtctaccgacccccagccactgaaagaacagcccgccctgaacgacagccggtactgcctgagcagcagactgagagtgtccgccaccttctggcagaacccccggaaccacttcagatgccaggtgcagttctacggcctgagcgagaacgacgagtggacccaggacagagccaagcccgtgacccagatcgtgtctgccgaagcctggggcagagccgattgcggatcccagagcttcggcctgctggaccccaagctgtgctacctgctggatggcatcctgttcatctacggcgtgatcctgaccgccctgttcctgaggagtaagaggagcaggctcctgcacagtgactacatgaacatgactccacgccgccccggacccacccgcaagcattaccagccctatgccccaccacgcgacttcgcagcctatcgctccagagtgaagttcagcagaagcgccgacgcccctgcctaccagcagggacagaaccaactgtacaacgagctgaacctgggcagacgggaagagtacgacgtgctggacaagcggagaggcagggaccctgagatgggcggaaagccccagcggagaaagaacccccaggaaggactgtataacgaactccagaaagacaagatggccgaagcctacagcgagatcggcatgaagggcgagcggagaagaggcaagggccacgatggcctgtaccagggcctgagcaccgccaccaaggacacctatgacgccctgcacatgcaggccctgcctccaagaagggccaagcgatctggatctggagcaacaaacttctcactactcaaacaagcaggtgacgtggaggagaatcccgggcctactagtatggactggatttggcgcatccttttccttgtcggcgctgctaccggcgcccattccgggcccgtggacaacaagttcaacaaagagcggtacagcgcctactacgagatttggcaactgcccaacctgaacgtgcggcagaaggccgccttcatcggatctctgcaggacgaccctagccagagcgccaatctgctggccgaggccaagaagctgaacgacgcccaggcccctaaaggatccggcggcggaggatctggcggaggcggatctgggggcggaggctctttcgaacaagttcagcttcaacagcctggcgctgagctggtcaaacctggcgcttctgtgaagatgagctgcaaagccagcggctacgccttcagcagctactggatcaactggatgaagcagaaacccggccagggactcgaatggatcggccaaatctatcccggcgacggcgacaccaactacaacggcaagttcaagggcagagccacactgaccgccgatacctctagcagcacagcctacatgcagctgagcagcctgaccagcgaagatagcgccgtgtacttctgtgcccggtccatcacaacagtcgtgggctgcgctatggactattggggccagggaacaagcgtgaccgtgtctagtacgcgtgagcagaaactgatctcggaagaggatgggagcggcatccagaaccctgatcctgccgtgtaccagctgcgggatagcaagagcagcgacaagagcgtgtgtctgttcaccgacttcgacagccagaccaacgtgtcccagagcaaggactccgacgtgtacatcaccgataagaccgtgctggacatgcggagcatggacttcaagagcaactccgccgtggcctggtccaacaagtccgatttcgcctgcgccaacgccttcaacaacagcattatccccgaggacacattcttcccaagccccgagagcagctgcggtacccagagttttgggttgttggaccctaaattgtgctatctgttggacggaatcctgttcatttacggagtgatcctgaccgcattgttcctgaggagcaagcggtcacggctgctccacagcgattacatgaatatgacaccacgaagaccgggtcctactcgcaaacactaccaaccctacgcacctccccgcgactttgcagcgtaccgatctcgggttaagttttccagatccgcagacgcacccgcttaccaacaagggcagaaccaactctacaatgaacttaatttggggcggagggaagagtacgacgttctggacaaaaggaggggacgagatcccgagatgggcggaaagcctcagcgaaggaagaatccgcaagaggggctttataacgaactccagaaagataaaatggcagaagcctatagtgagattgggatgaagggagaaaggaggaggggtaaaggtcacgatgggttgtaccaaggattgagcacagccactaaagatacctatgatgcgctccacatgcaggccctgccgccaaga

SEQ ID NO: 5778 - DNA, 2904 bp, Artificial Sequence
  Synthetic Polynucloetide
atggccttaccagtgaccgccttgctcctgccgctggccttgctgctccacgccgccaggccggacatccagatgacacagagccctagcagcctgtctgccagcgtgggagacagagtgaccatcacatgcaaggccagcgaccacatcaacaactggctggcctggtatcagcagaagcctggacaggcccctaagctgctgatctacggcgctaccacactggaaacaggcgtgcccagcagattttctggcagcggctctggcaccgactacaccctgacaatatccagcctccagcctgaggacttcgccacctactactgtcagcagagctggaacaccccttggacattcggccagggcaccaagctggaaatcaagagactcgaggggaaaccaattcccaaccctcttctgggactggattcaaccggcagcggcgaggacctgaagaacgtgttcccacctgaggtggccgtgttcgagcctagcgaggccgagatcagccacacccagaaagccaccctcgtgtgcctggctaccggcttctaccccgaccatgtggaactgtcttggtgggtcaacggcaaagaggtgcacagcggcgtgtctaccgacccccagccactgaaagaacagcccgccctgaacgacagccggtactgcctgagcagcagactgagagtgtccgccaccttctggcagaacccccggaaccacttcagatgccaggtgcagttctacggcctgagcgagaacgacgagtggacccaggacagagccaagcccgtgacccagatcgtgtctgccgaagcctggggcagagccgattgcggatcccagagcttcggcctgctggaccccaagctgtgctacctgctggatggcatcctgttcatctacggcgtgatcctgaccgccctgttcctgagagtgaagttcagcagaagcgccgacgcccctgcctaccagcagggacagaaccaactgtacaacgagctgaacctgggcagacgggaagagtacgacgtgctggacaagcggagaggcagggaccctgagatgggcggaaagccccagcggagaaagaacccccaggaaggactgtataacgaactccagaaagacaagatggccgaagcctacagcgagatcggcatgaagggcgagcggagaagaggcaagggccacgatggcctgtaccagggcctgagcaccgccaccaaggacacctatgacgccctgcacatgcaggccctgcctccaagaagggccaagcgatctggatctggagcaacaaacttctcactactcaaacaagcaggtgacgtggaggagaatcccgggcctactagtatggactggatttggcgcatccttttccttgtcggcgctgctaccggcgcccattccgggcccgtggacaacaagttcaacaaagagcggtacagcgcctactacgagatttggcaactgcccaacctgaacgtgcggcagaaggccgccttcatcggatctctgcaggacgaccctagccagagcgccaatctgctggccgaggccaagaagctgaacgacgcccaggcccctaaaggatccggcggcggaggatctggcggaggcggatctgggggcggaggctctttcgaacaagttcagcttcaacagcctggcgctgagctggtcaaacctggcgcttctgtgaagatgagctgcaaagccagcggctacgccttcagcagctactggatcaactggatgaagcagaaacccggccagggactcgaatggatcggccaaatctatcccggcgacggcgacaccaactacaacggcaagttcaagggcagagccacactgaccgccgatacctctagcagcacagcctacatgcagctgagcagcctgaccagcgaagatagcgccgtgtacttctgtgcccggtccatcacaacagtcgtgggctgcgctatggactattggggccagggaacaagcgtgaccgtgtctagtacgcgtgagcagaaactgatctcggaagaggatctggggagcggcatccagaaccctgatcctgccgtgtaccagctgcgggatagcaagagcagcgacaagagcgtgtgtctgttcaccgacttcgacagccagaccaacgtgtcccagagcaaggactccgacgtgtacatcaccgataagaccgtgctggacatgcggagcatggacttcaagagcaactccgccgtggcctggtccaacaagtccgatttcgcctgcgccaacgccttcaacaacagcattatccccgaggacacattcttcccaagccccgagagcagctgcggtacccagagttttgggttgttggaccctaaattgtgctatctgttggacggaatcctgttcatttacggagtgatcctgaccgcattgttcctgaagagaggccggaagaagctgctgtacatcttcaagcagcctttcatgcggcccgtgcagaccacccaggaagaggacggctgctcctgccggttccccgaggaagaagaaggcggctgcgagctgcgggttaagttttccagatccgcagacgcacccgcttaccaacaagggcagaaccaactctacaatgaacttaatttggggcggagggaagagtacgacgttctggacaaaaggaggggacgagatcccgagatgggcggaaagcctcagcgaaggaagaatccgcaagaggggctttataacgaactccagaaagataaaatggcagaagcctatagtgagattgggatgaagggagaaaggaggaggggtaaaggtcacgatgggttgtaccaaggattgagcacagccactaaagatacctatgatgcgctccacatgcaggccctgccgccaaga

SEQ ID NO: 5779 - DNA, 3030 bp, Artificial Sequence
  Synthetic Polynucloetide
atggccttaccagtgaccgccttgctcctgccgctggccttgctgctccacgccgccaggccggacatccagatgacacagagccctagcagcctgtctgccagcgtgggagacagagtgaccatcacatgcaaggccagcgaccacatcaacaactggctggcctggtatcagcagaagcctggacaggcccctaagctgctgatctacggcgctaccacactggaaacaggcgtgcccagcagattttctggcagcggctctggcaccgactacaccctgacaatatccagcctccagcctgaggacttcgccacctactactgtcagcagagctggaacaccccttggacattcggccagggcaccaagctggaaatcaagagactcgaggggaaaccaattcccaaccctcttctgggactggattcaaccggcagcggcgaggacctgaagaacgtgttcccacctgaggtggccgtgttcgagcctagcgaggccgagatcagccacacccagaaagccaccctcgtgtgcctggctaccggcttctaccccgaccatgtggaactgtcttggtgggtcaacggcaaagaggtgcacagcggcgtgtctaccgacccccagccactgaaagaacagcccgccctgaacgacagccggtactgcctgagcagcagactgagagtgtccgccaccttctggcagaacccccggaaccacttcagatgccaggtgcagttctacggcctgagcgagaacgacgagtggacccaggacagagccaagcccgtgacccagatcgtgtctgccgaagcctggggcagagccgattgcggatcccagagcttcggcctgctggaccccaagctgtgctacctgctggatggcatcctgttcatctacggcgtgatcctgaccgccctgttcctgaaacggggcagaaagaaactcctgtatatattcaaacaaccatttatgagaccagtacaaactactcaagaggaagatggctgtagctgccgatttccagaagaagaagaaggaggatgtgaactgagagtgaagttcagcagaagcgccgacgcccctgcctaccagcagggacagaaccaactgtacaacgagctgaacctgggcagacgggaagagtacgacgtgctggacaagcggagaggcagggaccctgagatgggcggaaagccccagcggagaaagaacccccaggaaggactgtataacgaactccagaaagacaagatggccgaagcctacagcgagatcggcatgaagggcgagcggagaagaggcaagggccacgatggcctgtaccagggcctgagcaccgccaccaaggacacctatgacgccctgcacatgcaggccctgcctccaagaagggccaagcgatctggatctggagcaacaaacttctcactactcaaacaagcaggtgacgtggaggagaatcccgggcctactagtatggactggatttggcgcatccttttccttgtcggcgctgctaccggcgcccattccgggcccgtggacaacaagttcaacaaagagcggtacagcgcctactacgagatttggcaactgcccaacctgaacgtgcggcagaaggccgccttcatcggatctctgcaggacgaccctagccagagcgccaatctgctggccgaggccaagaagctgaacgacgcccaggcccctaaaggatccggcggcggaggatctggcggaggcggatctgggggcggaggctctttcgaacaagttcagcttcaacagcctggcgctgagctggtcaaacctggcgcttctgtgaagatgagctgcaaagccagcggctacgccttcagcagctactggatcaactggatgaagcagaaacccggccagggactcgaatggatcggccaaatctatcccggcgacggcgacaccaactacaacggcaagttcaagggcagagccacactgaccgccgatacctctagcagcacagcctacatgcagctgagcagcctgaccagcgaagatagcgccgtgtacttctgtgcccggtccatcacaacagtcgtgggctgcgctatggactattggggccagggaacaagcgtgaccgtgtctagtacgcgtgagcagaaactgatctcggaagaggatctggggagcggcatccagaaccctgatcctgccgtgtaccagctgcgggatagcaagagcagcgacaagagcgtgtgtctgttcaccgacttcgacagccagaccaacgtgtcccagagcaaggactccgacgtgtacatcaccgataagaccgtgctggacatgcggagcatggacttcaagagcaactccgccgtggcctggtccaacaagtccgatttcgcctgcgccaacgccttcaacaacagcattatccccgaggacacattcttcccaagccccgagagcagctgcggtacccagagttttgggttgttggaccctaaattgtgctatctgttggacggaatcctgttcatttacggagtgatcctgaccgcattgttcctgaagagaggccggaagaagctgctgtacatcttcaagcagcctttcatgcggcccgtgcagaccacccaggaagaggacggctgctcctgccggttccccgaggaagaagaaggcggctgcgagctgcgggttaagttttccagatccgcagacgcacccgcttaccaacaagggcagaaccaactctacaatgaacttaatttggggcggagggaagagtacgacgttctggacaaaaggaggggacgagatcccgagatgggcggaaagcctcagcgaaggaagaatccgcaagaggggctttataacgaactccagaaagataaaatggcagaagcctatagtgagattgggatgaagggagaaaggaggaggggtaaaggtcacgatgggttgtaccaaggattgagcacagccactaaagatacctatgatgcgctccacatgcaggccctgccgccaaga

SEQ ID NO: 5780 - DNA, 2703 bp, Artificial Sequence
  Synthetic Polynucloetide
atggccttaccagtgaccgccttgctcctgccgctggccttgctgctccacgccgccaggccggacatccagatgacacagagccctagcagcctgtctgccagcgtgggagacagagtgaccatcacatgcaaggccagcgaccacatcaacaactggctggcctggtatcagcagaagcctggacaggcccctaagctgctgatctacggcgctaccacactggaaacaggcgtgcccagcagattttctggcagcggctctggcaccgactacaccctgacaatatccagcctccagcctgaggacttcgccacctactactgtcagcagagctggaacaccccttggacattcggccagggcaccaagctggaaatcaagagactcgagcagagcttcggcctgctggaccccaagctgtgctacctgctggatggcatcctgttcatctacggcgtgatcctgaccgccctgttcctgagagtgaagttcagcagaagcgccgacgcccctgcctaccagcagggacagaaccaactgtacaacgagctgaacctgggcagacgggaagagtacgacgtgctggacaagcggagaggcagggaccctgagatgggcggaaagccccagcggagaaagaacccccaggaaggactgtataacgaactccagaaagacaagatggccgaagcctacagcgagatcggcatgaagggcgagcggagaagaggcaagggccacgatggcctgtaccagggcctgagcaccgccaccaaggacacctatgacgccctgcacatgcaggccctgcctccaagaagggccaagcgatctggatctggagcaacaaacttctcactactcaaacaagcaggtgacgtggaggagaatcccgggcctactagtatggactggatttggcgcatccttttccttgtcggcgctgctaccggcgcccattccgggcccgtggacaacaagttcaacaaagagcggtacagcgcctactacgagatttggcaactgcccaacctgaacgtgcggcagaaggccgccttcatcggatctctgcaggacgaccctagccagagcgccaatctgctggccgaggccaagaagctgaacgacgcccaggcccctaaaggatccggcggcggaggatctggcggaggcggatctgggggcggaggctctttcgaacaagttcagcttcaacagcctggcgctgagctggtcaaacctggcgcttctgtgaagatgagctgcaaagccagcggctacgccttcagcagctactggatcaactggatgaagcagaaacccggccagggactcgaatggatcggccaaatctatcccggcgacggcgacaccaactacaacggcaagttcaagggcagagccacactgaccgccgatacctctagcagcacagcctacatgcagctgagcagcctgaccagcgaagatagcgccgtgtacttctgtgcccggtccatcacaacagtcgtgggctgcgctatggactattggggccagggaacaagcgtgaccgtgtctagtacgcgtcagagttttgggttgttggaccctaaattgtgctatctgttggacggaatcctgttcatttacggagtgatcctgaccgcattgttcctgcgggttaagttttccagatccgcagacgcacccgcttaccaacaagggcagaaccaactctacaatgaacttaatttggggcggagggaagagtacgacgttctggacaaaaggaggggacgagatcccgagatgggcggaaagcctcagcgaaggaagaatccgcaagaggggctttataacgaactccagaaagataaaatggcagaagcctatagtgagattgggatgaagggagaaaggaggaggggtaaaggtcacgatgggttgtaccaaggattgagcacagccactaaagatacctatgatgcgctccacatgcaggccctgccgccaagacgcgccaagagaagcggatctggcgtgaagcagaccctgaatttcgacctgctgaagctggctggcgacgtggaatccaacccaggcccttctagaggccatatgaccgagtacaagcccacggtgcgcctcgccacccgcgacgacgtccccagggccgtacgcaccctcgccgccgcgttcgccgactaccccgccacgcgccacaccgtcgatccggaccgccacatcgagcgggtcaccgagctgcaagaactcttcctcacgcgcgtcgggctcgacatcggcaaggtgtgggtcgcggacgacggcgccgcggtggcggtctggaccacgccggagagcgtcgaagcgggggcggtgttcgccgagatcggcccgcgcatggccgagttgagcggttcccggctggccgcgcagcaacagatggaaggcctcctggcgccgcaccggcccaaggagcccgcgtggttcctggccaccgtcggcgtctcgcccgaccaccagggcaagggtctgggcagcgccgtcgtgctccccggagtggaggcggccgagcgcgccggggtgcccgccttcctggagacctccgcgccccgcaacctccccttctacgagcggctcggcttcaccgtcaccgccgacgtcgaggtgcccgaaggaccgcgcacctggtgcatgacccgcaagcccggtgcctga

SEQ ID NO: 5781 - DNA, 2175 bp, Artificial Sequence
  Synthetic Polynucloetide
atggccttaccagtgaccgccttgctcctgccgctggccttgctgctccacgccgccaggccggacatccagatgacacagagccctagcagcctgtctgccagcgtgggagacagagtgaccatcacatgcaaggccagcgaccacatcaacaactggctggcctggtatcagcagaagcctggacaggcccctaagctgctgatctacggcgctaccacactggaaacaggcgtgcccagcagattttctggcagcggctctggcaccgactacaccctgacaatatccagcctccagcctgaggacttcgccacctactactgtcagcagagctggaacaccccttggacattcggccagggcaccaagctggaaatcaagagactcgagggacagcctaaggccaatcctaccgtgacactgttccctccaagcagcgaagaactccaggccaacaaggccacacttgtgtgcctgatctccgacttctaccctggggctgtgacagtggcttggaaggccgatggatctcctgtgaaagccggcgtggaaaccaccaagccatccaagcagagcaacaacaaatacgccgccagctcctacctgagcctgacacctgagcagtggaagtcccacagatcctacagctgccaagtgacccacgaaggcagcaccgtggaaaagacagtggcccctacagagtgcagccccatcaagaccgatgtgattacaatggaccccaaggacaactgctccaaggacgccaacgataccctgctgctccagctgaccaacaccagcgcctactacatgtacttgttgctgctgctgaagtccgtggtgtacttcgccatcatcacatgctgcctgctgcggagaaccgccttctgctgcaacggcgagaagtctagggccaagcgatctggatctggagcaacaaacttctcactactcaaacaagcaggtgacgtggaggagaatcccgggcctactagtatggactggatttggcgcatccttttccttgtcggcgctgctaccggcgcccattccgggcccgtggacaacaagttcaacaaagagcggtacagcgcctactacgagatttggcaactgcccaacctgaacgtgcggcagaaggccgccttcatcggatctctgcaggacgaccctagccagagcgccaatctgctggccgaggccaagaagctgaacgacgcccaggcccctaaaggatccggcggcggaggatctggcggaggcggatctgggggcggaggctctttcgaacaagttcagcttcaacagcctggcgctgagctggtcaaacctggcgcttctgtgaagatgagctgcaaagccagcggctacgccttcagcagctactggatcaactggatgaagcagaaacccggccagggactcgaatggatcggccaaatctatcccggcgacggcgacaccaactacaacggcaagttcaagggcagagccacactgaccgccgatacctctagcagcacagcctacatgcagctgagcagcctgaccagcgaagatagcgccgtgtacttctgtgcccggtccatcacaacagtcgtgggctgcgctatggactattggggccagggaacaagcgtgaccgtgtctagtacgcgtgcctctacaaagggaccctccgtgtttcctctggctcccagcagcaagtctacaagcggaggaacagccgctctgggctgcctggtcaaggattactttcccgagcctgtgaccgtgtcctggaatagcggagcactgacaagcggcgtgcacacctttccagccgtgctgcaaagcagcggcctgtactctctgagcagcgtggtcacagtgcctagctctagcctgggcacccagacctacatctgcaatgtgaaccacaagcctagcaacaccaaggtggacaagagagtggaacccaagagctgtgaagtgaaaaccgactccaccgaccacgtgaagcccaaagagacagagaacaccaagcagcccagcaagagctgccacaagcccaaggccatcgtgcacaccgagaaagtgaacatgatgagcctgaccgtgctgggcctgcggatgctgttcgccaaaaccgtggccgtgaacttcctgctgaccgccaagctgttcttcctc

SEQ ID NO: 5782 - DNA, 2109 bp, Artificial Sequence
  Synthetic Polynucloetide
atggccttaccagtgaccgccttgctcctgccgctggccttgctgctccacgccgccaggccggacatccagatgacacagagccctagcagcctgtctgccagcgtgggagacagagtgaccatcacatgcaaggccagcgaccacatcaacaactggctggcctggtatcagcagaagcctggacaggcccctaagctgctgatctacggcgctaccacactggaaacaggcgtgcccagcagattttctggcagcggctctggcaccgactacaccctgacaatatccagcctccagcctgaggacttcgccacctactactgtcagcagagctggaacaccccttggacattcggccagggcaccaagctggaaatcaagagactcgagggacagcctaaggccaatcctaccgtgacactgttccctccaagcagcgaagaactccaggccaacaaggccacacttgtgtgcctgatctccgacttctaccctggggctgtgacagtggcttggaaggccgatggatctcctgtgaaagccggcgtggaaaccaccaagccatccaagcagagcaacaacaaatacgccgccagctcctacctgagcctgacacctgagcagtggaagtcccacagatcctacagctgccaagtgacccacgaaggcagcaccgtggaaaagacagtggcccctacagagtgcagcggcagagccgattgcggcatcaccagcgccagctaccaccagggcgtgctgagcgccaccatcctgtacgagatcctgctgggcaaggccaccctgtacgccgtgctggtgtctgccctggtgctgatggctatggtcaagcggaaggacagccggggaagggccaagcgatctggatctggagcaacaaacttctcactactcaaacaagcaggtgacgtggaggagaatcccgggcctactagtatggactggatttggcgcatccttttccttgtcggcgctgctaccggcgcccattccgggcccgtggacaacaagttcaacaaagagcggtacagcgcctactacgagatttggcaactgcccaacctgaacgtgcggcagaaggccgccttcatcggatctctgcaggacgaccctagccagagcgccaatctgctggccgaggccaagaagctgaacgacgcccaggcccctaaaggatccggcggcggaggatctggcggaggcggatctgggggcggaggctctttcgaacaagttcagcttcaacagcctggcgctgagctggtcaaacctggcgcttctgtgaagatgagctgcaaagccagcggctacgccttcagcagctactggatcaactggatgaagcagaaacccggccagggactcgaatggatcggccaaatctatcccggcgacggcgacaccaactacaacggcaagttcaagggcagagccacactgaccgccgatacctctagcagcacagcctacatgcagctgagcagcctgaccagcgaagatagcgccgtgtacttctgtgcccggtccatcacaacagtcgtgggctgcgctatggactattggggccagggaacaagcgtgaccgtgtctagtacgcgtgcctctacaaagggaccctccgtgtttcctctggctcccagcagcaagtctacaagcggaggaacagccgctctgggctgcctggtcaaggattactttcccgagcctgtgaccgtgtcctggaatagcggagcactgacaagcggcgtgcacacctttccagccgtgctgcaaagcagcggcctgtactctctgagcagcgtggtcacagtgcctagctctagcctgggcacccagacctacatctgcaatgtgaaccacaagcctagcaacaccaaggtggacaagagagtggaacccaagagctgtatccccgaggacacattcttcccaagcagcgacgtgccctgcgacgtgaagctggtggaaaagagcttcgagacagacaccaacctgaacttccagaacctgagcgtgatcggcttcagaatcctgctgctgaaagtggccggctttaacctgctgatgaccctgcggctgtggtccagc

SEQ ID NO: 5783 - DNA, 2109 bp, Artificial Sequence
  Synthetic Polynucloetide
atggccttaccagtgaccgccttgctcctgccgctggccttgctgctccacgccgccaggccggacatccagatgacacagagccctagcagcctgtctgccagcgtgggagacagagtgaccatcacatgcaaggccagcgaccacatcaacaactggctggcctggtatcagcagaagcctggacaggcccctaagctgctgatctacggcgctaccacactggaaacaggcgtgcccagcagattttctggcagcggctctggcaccgactacaccctgacaatatccagcctccagcctgaggacttcgccacctactactgtcagcagagctggaacaccccttggacattcggccagggcaccaagctggaaatcaagagactcgagggacagcctaaggccaatcctaccgtgacactgttccctccaagcagcgaagaactccaggccaacaaggccacacttgtgtgcctgatctccgacttctaccctggggctgtgacagtggcttggaaggccgatggatctcctgtgaaagccggcgtggaaaccaccaagccatccaagcagagcaacaacaaatacgccgccagctcctacctgagcctgacacctgagcagtggaagtcccacagatcctacagctgccaagtgacccacgaaggcagcaccgtggaaaagacagtggcccctacagagtgcagcggcagagccgattgcggctttaccagcgagagctaccagcagggcgtgctgagcgccaccatcctgtacgagatcctgctgggcaaggccaccctgtacgccgtgctggtgtctgccctggtgctgatggctatggtcaagcggaaggacagccggggaagggccaagcgatctggatctggagcaacaaacttctcactactcaaacaagcaggtgacgtggaggagaatcccgggcctactagtatggactggatttggcgcatccttttccttgtcggcgctgctaccggcgcccattccgggcccgtggacaacaagttcaacaaagagcggtacagcgcctactacgagatttggcaactgcccaacctgaacgtgcggcagaaggccgccttcatcggatctctgcaggacgaccctagccagagcgccaatctgctggccgaggccaagaagctgaacgacgcccaggcccctaaaggatccggcggcggaggatctggcggaggcggatctgggggcggaggctctttcgaacaagttcagcttcaacagcctggcgctgagctggtcaaacctggcgcttctgtgaagatgagctgcaaagccagcggctacgccttcagcagctactggatcaactggatgaagcagaaacccggccagggactcgaatggatcggccaaatctatcccggcgacggcgacaccaactacaacggcaagttcaagggcagagccacactgaccgccgatacctctagcagcacagcctacatgcagctgagcagcctgaccagcgaagatagcgccgtgtacttctgtgcccggtccatcacaacagtcgtgggctgcgctatggactattggggccagggaacaagcgtgaccgtgtctagtacgcgtgcctctacaaagggaccctccgtgtttcctctggctcccagcagcaagtctacaagcggaggaacagccgctctgggctgcctggtcaaggattactttcccgagcctgtgaccgtgtcctggaatagcggagcactgacaagcggcgtgcacacctttccagccgtgctgcaaagcagcggcctgtactctctgagcagcgtggtcacagtgcctagctctagcctgggcacccagacctacatctgcaatgtgaaccacaagcctagcaacaccaaggtggacaagagagtggaacccaagagctgtatccccgaggacacattcttcccaagccccgagagcagctgcgacgtgaagctggtggaaaagagcttcgagacagacaccaacctgaacttccagaacctgagcgtgatcggcttcagaatcctgctgctgaaagtggccggctttaacctgctgatgaccctgcggctgtggtccagc

SEQ ID NO: 5784 - DNA, 1599 bp, Artificial Sequence
  Synthetic Polynucloetide
atggactggatttggcgcatccttttccttgtcggcgctgctaccggcgcccattccgggcccgtggacaacaagttcaacaaagagcggtacagcgcctactacgagatttggcaactgcccaacctgaacgtgcggcagaaggccgccttcatcggatctctgcaggacgaccctagccagagcgccaatctgctggccgaggccaagaagctgaacgacgcccaggcccctaaaggatccggcggcggaggatctggcggaggcggatctgggggcggaggctctttcgaacaagttcagcttcaacagcctggcgctgagctggtcaaacctggcgcttctgtgaagatgagctgcaaagccagcggctacgccttcagcagctactggatcaactggatgaagcagaaacccggccagggactcgaatggatcggccaaatctatcccggcgacggcgacaccaactacaacggcaagttcaagggcagagccacactgaccgccgatacctctagcagcacagcctacatgcagctgagcagcctgaccagcgaagatagcgccgtgtacttctgtgcccggtccatcacaacagtcgtgggctgcgctatggactattggggccagggaacaagcgtgaccgtgtctagtggcggaggcggaagtggaggcggaggatctggcggcggaggctctgacatccagatgacacagagccctagcagcctgtctgccagcgtgggagacagagtgaccatcacatgcaaggccagcgaccacatcaacaactggctggcctggtatcagcagaagcctggacaggcccctaagctgctgatctacggcgctaccacactggaaacaggcgtgcccagcagattttctggcagcggctctggcaccgactacaccctgacaatatccagcctccagcctgaggacttcgccacctactactgtcagcagagctggaacaccccttggacattcggccagggcaccaagctggaaatcaagagaacgcgtggcggaggcagcgacggtaacgaggagatgggaggaatcactcaaaccccttacaaagtctcaatttcaggaacaactgttatccttacatgtccccagtatcctggcagcgagatcctttggcagcataacgacaagaatatagggggagatgaagacgataagaatatcggatctgacgaggatcacttgagcctgaaagagttctccgagcttgaacaaagcggatattatgtgtgctatccgcgcgggtcaaagccggaagacgctaacttttacctttatctccgagccagagtgtgcgaaaattgcatggaaatggacgttatgtccgttgctacaatagttatcgtagatatatgcatcacgggtggactgcttctgctggtttattattggtccaagaatagaaaggccaaagctaaacccgtgaccagaggcgctggcgcaggcggaaggcaaaggggacaaaacaaagaacggccaccaccagtgccaaatccagattatgagcctattcggaaaggacagagggacctgtactctggcctgaatcagagaagaatc

SEQ ID NO: 5785 - DNA, 1494 bp, Artificial Sequence
  Synthetic Polynucloetide
atggactggatttggcgcatccttttccttgtcggcgctgctaccggcgcccattccgggcccgtggacaacaagttcaacaaagagcggtacagcgcctactacgagatttggcaactgcccaacctgaacgtgcggcagaaggccgccttcatcggatctctgcaggacgaccctagccagagcgccaatctgctggccgaggccaagaagctgaacgacgcccaggcccctaaaggatccggcggcggaggatctggcggaggcggatctgggggcggaggctctttcgaacaagttcagcttcaacagcctggcgctgagctggtcaaacctggcgcttctgtgaagatgagctgcaaagccagcggctacgccttcagcagctactggatcaactggatgaagcagaaacccggccagggactcgaatggatcggccaaatctatcccggcgacggcgacaccaactacaacggcaagttcaagggcagagccacactgaccgccgatacctctagcagcacagcctacatgcagctgagcagcctgaccagcgaagatagcgccgtgtacttctgtgcccggtccatcacaacagtcgtgggctgcgctatggactattggggccagggaacaagcgtgaccgtgtctagtggcggaggcggaagtggaggcggaggatctggcggcggaggctctgacatccagatgacacagagccctagcagcctgtctgccagcgtgggagacagagtgaccatcacatgcaaggccagcgaccacatcaacaactggctggcctggtatcagcagaagcctggacaggcccctaagctgctgatctacggcgctaccacactggaaacaggcgtgcccagcagattttctggcagcggctctggcaccgactacaccctgacaatatccagcctccagcctgaggacttcgccacctactactgtcagcagagctggaacaccccttggacattcggccagggcaccaagctggaaatcaagagaacgcgtggcggaggcagcttcaagatccccatcgaggaactggaagatcgggtgttcgtgaactgcaacacctctatcacctgggtggaaggcaccgtgggaacactgctgagcgacatcaccagactggacctcggcaagcggattctggaccctcggggcatctacagatgcaacggcaccgacatctacaaggacaaagaaagcaccgtgcaggtccactacagaatgtgccagtcctgcgtggaactggaccctgctacagtggccggcatcatcgtgaccgatgtgatcgctactctgctgctggctctgggagtgttctgcttcgccggacacgaaacaggcagactgtctggcgctgccgatacacaggccctgctgagaaacgaccaagtgtatcagcccctgcgcgacagagatgatgcccagtattctcacctcggcggcaactgggctagaaacaag

SEQ ID NO: 5786 - DNA, 1524 bp, Artificial Sequence
  Synthetic Polynucloetide
atggactggatttggcgcatccttttccttgtcggcgctgctaccggcgcccattccgggcccgtggacaacaagttcaacaaagagcggtacagcgcctactacgagatttggcaactgcccaacctgaacgtgcggcagaaggccgccttcatcggatctctgcaggacgaccctagccagagcgccaatctgctggccgaggccaagaagctgaacgacgcccaggcccctaaaggatccggcggcggaggatctggcggaggcggatctgggggcggaggctctttcgaacaagttcagcttcaacagcctggcgctgagctggtcaaacctggcgcttctgtgaagatgagctgcaaagccagcggctacgccttcagcagctactggatcaactggatgaagcagaaacccggccagggactcgaatggatcggccaaatctatcccggcgacggcgacaccaactacaacggcaagttcaagggcagagccacactgaccgccgatacctctagcagcacagcctacatgcagctgagcagcctgaccagcgaagatagcgccgtgtacttctgtgcccggtccatcacaacagtcgtgggctgcgctatggactattggggccagggaacaagcgtgaccgtgtctagtggcggaggcggaagtggaggcggaggatctggcggcggaggctctgacatccagatgacacagagccctagcagcctgtctgccagcgtgggagacagagtgaccatcacatgcaaggccagcgaccacatcaacaactggctggcctggtatcagcagaagcctggacaggcccctaagctgctgatctacggcgctaccacactggaaacaggcgtgcccagcagattttctggcagcggctctggcaccgactacaccctgacaatatccagcctccagcctgaggacttcgccacctactactgtcagcagagctggaacaccccttggacattcggccagggcaccaagctggaaatcaagagaacgcgtggcggaggcagccagagcatcaagggcaaccacctggtcaaggtgtacgactaccaagaggacggcagcgtgctgctgacatgtgatgccgaggccaagaacatcacctggtttaaggacggcaagatgatcggcttcctgaccgaggacaagaagaagtggaacctgggcagcaacgctaaggaccccagaggcatgtatcagtgcaagggcagccagaacaagagcaagcccctccaggtgtactaccggatgtgccagaactgcatcgagctgaacgccgctaccatcagcggctttctgttcgccgagatcgtgtccatcttcgtgctggccgtgggcgtgtactttatcgctggacaggatggcgtgcggcagagcagagcttccgataagcaaaccctgctgcctaacgaccagctgtaccagcctctgaaggacagagaggacgaccagtacagccacctccagggcaatcagctgagaagaaac

SEQ ID NO: 5787 - DNA, 1473 bp, Artificial Sequence
  Synthetic Polynucloetide
atggactggatttggcgcatccttttccttgtcggcgctgctaccggcgcccattccgggcccgtggacaacaagttcaacaaagagcggtacagcgcctactacgagatttggcaactgcccaacctgaacgtgcggcagaaggccgccttcatcggatctctgcaggacgaccctagccagagcgccaatctgctggccgaggccaagaagctgaacgacgcccaggcccctaaaggatccggcggcggaggatctggcggaggcggatctgggggcggaggctctttcgaacaagttcagcttcaacagcctggcgctgagctggtcaaacctggcgcttctgtgaagatgagctgcaaagccagcggctacgccttcagcagctactggatcaactggatgaagcagaaacccggccagggactcgaatggatcggccaaatctatcccggcgacggcgacaccaactacaacggcaagttcaagggcagagccacactgaccgccgatacctctagcagcacagcctacatgcagctgagcagcctgaccagcgaagatagcgccgtgtacttctgtgcccggtccatcacaacagtcgtgggctgcgctatggactattggggccagggaacaagcgtgaccgtgtctagtggcggaggcggaagtggaggcggaggatctggcggcggaggctctgacatccagatgacacagagccctagcagcctgtctgccagcgtgggagacagagtgaccatcacatgcaaggccagcgaccacatcaacaactggctggcctggtatcagcagaagcctggacaggcccctaagctgctgatctacggcgctaccacactggaaacaggcgtgcccagcagattttctggcagcggctctggcaccgactacaccctgacaatatccagcctccagcctgaggacttcgccacctactactgtcagcagagctggaacaccccttggacattcggccagggcaccaagctggaaatcaagagaacgcgtggcggaggcagccagagttttgggttgttggaccctaaattgtgctatctgttggacggaatcctgttcatttacggagtgatcctgaccgcattgttcctgcgggttaagttttccagatccgcagacgcacccgcttaccaacaagggcagaaccaactctacaatgaacttaatttggggcggagggaagagtacgacgttctggacaaaaggaggggacgagatcccgagatgggcggaaagcctcagcgaaggaagaatccgcaagaggggctttataacgaactccagaaagataaaatggcagaagcctatagtgagattgggatgaagggagaaaggaggaggggtaaaggtcacgatgggttgtaccaaggattgagcacagccactaaagatacctatgatgcgctccacatgcaggccctgccgccaaga

SEQ ID NO: 5788 - DNA, 1584 bp, Artificial Sequence
  Synthetic Polynucloetide
atggactggatttggcgcatccttttccttgtcggcgctgctaccggcgcccattccgggcccgtggacaacaagttcaacaaagagcggtacagcgcctactacgagatttggcaactgcccaacctgaacgtgcggcagaaggccgccttcatcggatctctgcaggacgaccctagccagagcgccaatctgctggccgaggccaagaagctgaacgacgcccaggcccctaaaggatccggcggcggaggatctggcggaggcggatctgggggcggaggctctttcgaacaagttcagcttcaacagcctggcgctgagctggtcaaacctggcgcttctgtgaagatgagctgcaaagccagcggctacgccttcagcagctactggatcaactggatgaagcagaaacccggccagggactcgaatggatcggccaaatctatcccggcgacggcgacaccaactacaacggcaagttcaagggcagagccacactgaccgccgatacctctagcagcacagcctacatgcagctgagcagcctgaccagcgaagatagcgccgtgtacttctgtgcccggtccatcacaacagtcgtgggctgcgctatggactattggggccagggaacaagcgtgaccgtgtctagtacgcgtatccagaaccctgatcctgccgtgtaccagctgcgggatagcaagagcagcgacaagagcgtgtgtctgttcaccgacttcgacagccagaccaacgtgtcccagagcaaggactccgacgtgtacatcaccgataagaccgtgctggacatgcggagcatggacttcaagagcaactccgccgtggcctggtccaacaagtccgatttcgcctgcgccaacgccttcaacaacagcattatccccgaggacacattcttcccaagccccgagagcagctgcgacgtgaagctggtggaaaagagcttcgagacagacaccaacctgaacttccagaacctgagcgtgatcggcttcagaatcctgctgctgaaagtggccggctttaacctgctgatgaccctgcggctgtggtccagccgcgccaagagaagcggatctggcgtgaagcagaccctgaatttcgacctgctgaagctggctggcgacgtggaatccaacccaggcccttctagaggccatatggccaagcctttgtctcaagaagaatccaccctcattgaaagagcaacggctacaatcaacagcatccccatctctgaagactacagcgtcgccagcgcagctctctctagcgacggccgcatcttcactggtgtcaatgtatatcattttactgggggaccttgtgcagaactcgtggtgctgggcactgctgctgctgcggcagctggcaacctgacttgtatcgtcgcgatcggaaatgagaacaggggcatcttgagcccctgcggacggtgccgacaggtgcttctcgatctgcatcctgggatcaaagccatagtgaaggacagtgatggacagccgacggcagttgggattcgtgaattgctgccctctggttatgtgtgggagggctga

SEQ ID NO: 5789 - DNA, 1083 bp, Artificial Sequence
  Synthetic Polynucloetide
atggactggatttggcgcatccttttccttgtcggcgctgctaccggcgcccattccgggcccgtggacaacaagttcaacaaagagcggtacagcgcctactacgagatttggcaactgcccaacctgaacgtgcggcagaaggccgccttcatcggatctctgcaggacgaccctagccagagcgccaatctgctggccgaggccaagaagctgaacgacgcccaggcccctaaaggatccggcggcggaggatctggcggaggcggatctgggggcggaggctctttcgaacaagttcagcttcaacagcctggcgctgagctggtcaaacctggcgcttctgtgaagatgagctgcaaagccagcggctacgccttcagcagctactggatcaactggatgaagcagaaacccggccagggactcgaatggatcggccaaatctatcccggcgacggcgacaccaactacaacggcaagttcaagggcagagccacactgaccgccgatacctctagcagcacagcctacatgcagctgagcagcctgaccagcgaagatagcgccgtgtacttctgtgcccggtccatcacaacagtcgtgggctgcgctatggactattggggccagggaacaagcgtgaccgtgtctagtacgcgtatccagaaccctgatcctgccgtgtaccagctgcgggatagcaagagcagcgacaagagcgtgtgtctgttcaccgacttcgacagccagaccaacgtgtcccagagcaaggactccgacgtgtacatcaccgataagaccgtgctggacatgcggagcatggacttcaagagcaactccgccgtggcctggtccaacaagtccgatttcgcctgcgccaacgccttcaacaacagcattatccccgaggacacattcttcccaagccccgagagcagctgcgacgtgaagctggtggaaaagagcttcgagacagacaccaacctgaacttccagaacctgagcgtgatcggcttcagaatcctgctgctgaaagtggccggctttaacctgctgatgaccctgcggctgtggtccagc

SEQ ID NO: 5790 - DNA, 1620 bp, Artificial Sequence
  Synthetic Polynucloetide
atggactggatttggcgcatccttttccttgtcggcgctgctaccggcgcccattccgggcccgtggacaacaagttcaacaaagagcggtacagcgcctactacgagatttggcaactgcccaacctgaacgtgcggcagaaggccgccttcatcggatctctgcaggacgaccctagccagagcgccaatctgctggccgaggccaagaagctgaacgacgcccaggcccctaaaggatccggcggcggaggatctggcggaggcggatctgggggcggaggctctttcgaacaagttcagcttcaacagcctggcgctgagctggtcaaacctggcgcttctgtgaagatgagctgcaaagccagcggctacgccttcagcagctactggatcaactggatgaagcagaaacccggccagggactcgaatggatcggccaaatctatcccggcgacggcgacaccaactacaacggcaagttcaagggcagagccacactgaccgccgatacctctagcagcacagcctacatgcagctgagcagcctgaccagcgaagatagcgccgtgtacttctgtgcccggtccatcacaacagtcgtgggctgcgctatggactattggggccagggaacaagcgtgaccgtgtctagtacgcgtgagcagaaactgatctcggaagaggatgggagcggcatccagaaccctgatcctgccgtgtaccagctgcgggatagcaagagcagcgacaagagcgtgtgtctgttcaccgacttcgacagccagaccaacgtgtcccagagcaaggactccgacgtgtacatcaccgataagtgcgtgctggacatgcggagcatggacttcaagagcaactccgccgtggcctggtccaacaagtccgatttcgcctgcgccaacgccttcaacaacagcattatccccgaggacacattcttcccaagccccgagagcagctgcgacgtgaagctggtggaaaagagcttcgagacagacaccaacctgaacttccagaacctgagcgtgatcggcttcagaatcctgctgctgaaagtggccggctttaacctgctgatgaccctgcggctgtggtccagccgcgccaagagaagcggatctggcgtgaagcagaccctgaatttcgacctgctgaagctggctggcgacgtggaatccaacccaggcccttctagaggccatatggccaagcctttgtctcaagaagaatccaccctcattgaaagagcaacggctacaatcaacagcatccccatctctgaagactacagcgtcgccagcgcagctctctctagcgacggccgcatcttcactggtgtcaatgtatatcattttactgggggaccttgtgcagaactcgtggtgctgggcactgctgctgctgcggcagctggcaacctgacttgtatcgtcgcgatcggaaatgagaacaggggcatcttgagcccctgcggacggtgccgacaggtgcttctcgatctgcatcctgggatcaaagccatagtgaaggacagtgatggacagccgacggcagttgggattcgtgaattgctgccctctggttatgtgtgggagggctga

SEQ ID NO: 5791 - DNA, 1122 bp, Artificial Sequence
  Synthetic Polynucloetide
atggactggatttggcgcatccttttccttgtcggcgctgctaccggcgcccattccgggcccgtggacaacaagttcaacaaagagcggtacagcgcctactacgagatttggcaactgcccaacctgaacgtgcggcagaaggccgccttcatcggatctctgcaggacgaccctagccagagcgccaatctgctggccgaggccaagaagctgaacgacgcccaggcccctaaaggatccggcggcggaggatctggcggaggcggatctgggggcggaggctctttcgaacaagttcagcttcaacagcctggcgctgagctggtcaaacctggcgcttctgtgaagatgagctgcaaagccagcggctacgccttcagcagctactggatcaactggatgaagcagaaacccggccagggactcgaatggatcggccaaatctatcccggcgacggcgacaccaactacaacggcaagttcaagggcagagccacactgaccgccgatacctctagcagcacagcctacatgcagctgagcagcctgaccagcgaagatagcgccgtgtacttctgtgcccggtccatcacaacagtcgtgggctgcgctatggactattggggccagggaacaagcgtgaccgtgtctagtacgcgtgagcagaaactgatctcggaagaggatgggagcggcatccagaaccctgatcctgccgtgtaccagctgcgggatagcaagagcagcgacaagagcgtgtgtctgttcaccgacttcgacagccagaccaacgtgtcccagagcaaggactccgacgtgtacatcaccgataagtgcgtgctggacatgcggagcatggacttcaagagcaactccgccgtggcctggtccaacaagtccgatttcgcctgcgccaacgccttcaacaacagcattatccccgaggacacattcttcccaagccccgagagcagctgcgacgtgaagctggtggaaaagagcttcgagacagacaccaacctgaacttccagaacctgagcgtgatcggcttcagaatcctgctgctgaaagtggccggctttaacctgctgatgaccctgcggctgtggtccagctga

SEQ ID NO: 5792 - DNA, 3231 bp, Artificial Sequence
  Synthetic Polynucloetide
atggccttaccagtgaccgccttgctcctgccgctggccttgctgctccacgccgccaggccggaagtgcaactggtggaatctggaggctctctggtgcagccagggggaagcctgagactgtcttgtgccgcttccggcttcaccttcgacgactacgccatgagctgggtgcgccaggtgccaggcaaaggcctggaatgggtgtccagcatcaactggagcggcacccacaccgattacgccgactccgtgaaaggcagattcacaatcagcagaaacaacgccaacaataccctgtacctgcagatgaactccctgaagtctgaggatacagcagtgtattattgcgccaagaactggcgggacgccggcaccacttggtttgagaaaagcggctctgccggacagggaacccaagtgacagtgtcctccggtaccggcggaggcggatctggcggcggaggtagcggtggcggaggatctgaattcgacatccagatgacacagagccctagcagcctgtctgccagcgtgggagacagagtgaccatcacatgcaaggccagcgaccacatcaacaactggctggcctggtatcagcagaagcctggacaggcccctaagctgctgatctacggcgctaccacactggaaacaggcgtgcccagcagattttctggcagcggctctggcaccgactacaccctgacaatatccagcctccagcctgaggacttcgccacctactactgtcagcagagctggaacaccccttggacattcggccagggcaccaagctggaaatcaagagactcgagatccagaaccctgatcctgccgtgtaccagctgcgggatagcaagagcagcgacaagagcgtgtgtctgttcaccgacttcgacagccagaccaacgtgtcccagagcaaggactccgacgtgtacatcaccgataagtgcgtgctggacatgcggagcatggacttcaagagcaactccgccgtggcctggtccaacaagtccgatttcgcctgcgccaacgccttcaacaacagcattatccccgaggacacattcttcccaagcagcgacgtgccctgcgacgtgaagctggtggaaaagagcttcgagacagacaccaacctgaacttccagaacctgagcgtgatcggcttcagaatcctgctgctgaaagtggccggctttaacctgctgatgaccctgcggctgtggtccagccgcgccaagagaagcggatctggcgtgaagcagaccctgaatttcgacctgctgaagctggctggcgacgtggaatccaacccaggccctactagtatggactggatttggcgcatccttttccttgtcggcgctgctaccggcgcccattccgggcccgtggacaacaagttcaacaaagagcggtacagcgcctactacgagatttggcaactgcccaacctgaacgtgcggcagaaggccgccttcatcggatctctgcaggacgaccctagccagagcgccaatctgctggccgaggccaagaagctgaacgacgcccaggcccctaaaggatccggcggcggaggatctggcggaggcggatctgggggcggaggctctttcgaacaagttcagcttcaacagcctggcgctgagctggtcaaacctggcgcttctgtgaagatgagctgcaaagccagcggctacgccttcagcagctactggatcaactggatgaagcagaaacccggccagggactcgaatggatcggccaaatctatcccggcgacggcgacaccaactacaacggcaagttcaagggcagagccacactgaccgccgatacctctagcagcacagcctacatgcagctgagcagcctgaccagcgaagatagcgccgtgtacttctgtgcccggtccatcacaacagtcgtgggctgcgctatggactattggggccagggaacaagcgtgaccgtgtctagtacgcgtgaggacctgaagaacgtgttcccacctgaggtggccgtgttcgagcctagcaaggccgagatcgcccacacccagaaagccaccctcgtgtgcctggctaccggcttctaccccgaccatgtggaactgtcttggtgggtcaacggcaaagaggtgcacagcggcgtgtgtaccgacccccagccactgaaagaacagcccgccctgaacgacagccggtactgcctgagcagcagactgagagtgtccgccaccttctggcagaacccccggaaccacttcagatgccaggtgcagttctacggcctgagcgagaacgacgagtggacccaggacagagccaagcccgtgacccagatcgtgtctgccgaagcctggggcagagccgattgcggcatcaccagcgccagctaccaccagggcgtgctgagcgccaccatcctgtacgagatcctgctgggcaaggccaccctgtacgccgtgctggtgtctgccctggtgctgatggctatggtcaagcggaaggacagccggggaagggccaagcgatctggatctggagcaacaaacttctcactactcaaacaagcaggtgacgtggaggagaatcccgggccttctagaggccatatgaccgagtacaagcccacggtgcgcctcgccacccgcgacgacgtccccagggccgtacgcaccctcgccgccgcgttcgccgactaccccgccacgcgccacaccgtcgatccggaccgccacatcgagcgggtcaccgagctgcaagaactcttcctcacgcgcgtcgggctcgacatcggcaaggtgtgggtcgcggacgacggcgccgcggtggcggtctggaccacgccggagagcgtcgaagcgggggcggtgttcgccgagatcggcccgcgcatggccgagttgagcggttcccggctggccgcgcagcaacagatggaaggcctcctggcgccgcaccggcccaaggagcccgcgtggttcctggccaccgtcggcgtctcgcccgaccaccagggcaagggtctgggcagcgccgtcgtgctccccggagtggaggcggccgagcgcgccggggtgcccgccttcctggagacctccgcgccccgcaacctccccttctacgagcggctcggcttcaccgtcaccgccgacgtcgaggtgcccgaaggaccgcgcacctggtgcatgacccgcaagcccggtgcctga

SEQ ID NO: 5793 - DNA, 3228 bp, Artificial Sequence
  Synthetic Polynucloetide
atggccttaccagtgaccgccttgctcctgccgctggccttgctgctccacgccgccaggccggaagtgcaactggtggaatctggaggctctctggtgcagccagggggaagcctgagactgtcttgtgccgcttccggcttcaccttcgacgactacgccatgagctgggtgcgccaggtgccaggcaaaggcctggaatgggtgtccagcatcaactggagcggcacccacaccgattacgccgactccgtgaaaggcagattcacaatcagcagaaacaacgccaacaataccctgtacctgcagatgaactccctgaagtctgaggatacagcagtgtattattgcgccaagaactggcgggacgccggcaccacttggtttgagaaaagcggctctgccggacagggaacccaagtgacagtgtcctccggtaccggcggaggcggatctggcggcggaggtagcggtggcggaggatctgaattcgacatccagatgacacagagccctagcagcctgtctgccagcgtgggagacagagtgaccatcacatgcaaggccagcgaccacatcaacaactggctggcctggtatcagcagaagcctggacaggcccctaagctgctgatctacggcgctaccacactggaaacaggcgtgcccagcagattttctggcagcggctctggcaccgactacaccctgacaatatccagcctccagcctgaggacttcgccacctactactgtcagcagagctggaacaccccttggacattcggccagggcaccaagctggaaatcaagagactcgaggacctgaagaacgtgttcccacctgaggtggccgtgttcgagcctagcaaggccgagatcgcccacacccagaaagccaccctcgtgtgcctggctaccggcttctaccccgaccatgtggaactgtcttggtgggtcaacggcaaagaggtgcacagcggcgtgtgtaccgacccccagccactgaaagaacagcccgccctgaacgacagccggtactgcctgagcagcagactgagagtgtccgccaccttctggcagaacccccggaaccacttcagatgccaggtgcagttctacggcctgagcgagaacgacgagtggacccaggacagagccaagcccgtgacccagatcgtgtctgccgaagcctggggcagagccgattgcggcatcaccagcgccagctaccaccagggcgtgctgagcgccaccatcctgtacgagatcctgctgggcaaggccaccctgtacgccgtgctggtgtctgccctggtgctgatggctatggtcaagcggaaggacagccggggaagggccaagcgatctggatctggagcaacaaacttctcactactcaaacaagcaggtgacgtggaggagaatcccgggcctactagtatggactggatttggcgcatccttttccttgtcggcgctgctaccggcgcccattccgggcccgtggacaacaagttcaacaaagagcggtacagcgcctactacgagatttggcaactgcccaacctgaacgtgcggcagaaggccgccttcatcggatctctgcaggacgaccctagccagagcgccaatctgctggccgaggccaagaagctgaacgacgcccaggcccctaaaggatccggcggcggaggatctggcggaggcggatctgggggcggaggctctttcgaacaagttcagcttcaacagcctggcgctgagctggtcaaacctggcgcttctgtgaagatgagctgcaaagccagcggctacgccttcagcagctactggatcaactggatgaagcagaaacccggccagggactcgaatggatcggccaaatctatcccggcgacggcgacaccaactacaacggcaagttcaagggcagagccacactgaccgccgatacctctagcagcacagcctacatgcagctgagcagcctgaccagcgaagatagcgccgtgtacttctgtgcccggtccatcacaacagtcgtgggctgcgctatggactattggggccagggaacaagcgtgaccgtgtctagtacgcgtatccagaaccctgatcctgccgtgtaccagctgcgggatagcaagagcagcgacaagagcgtgtgtctgttcaccgacttcgacagccagaccaacgtgtcccagagcaaggactccgacgtgtacatcaccgataagtgcgtgctggacatgcggagcatggacttcaagagcaactccgccgtggcctggtccaacaagtccgatttcgcctgcgccaacgccttcaacaacagcattatccccgaggacacattcttcccaagcagcgacgtgccctgcgacgtgaagctggtggaaaagagcttcgagacagacaccaacctgaacttccagaacctgagcgtgatcggcttcagaatcctgctgctgaaagtggccggctttaacctgctgatgaccctgcggctgtggtccagccgcgccaagagaagcggatctggcgtgaagcagaccctgaatttcgacctgctgaagctggctggcgacgtggaatccaacccaggcccttctagaggccatatgaccgagtacaagcccacggtgcgcctcgccacccgcgacgacgtccccagggccgtacgcaccctcgccgccgcgttcgccgactaccccgccacgcgccacaccgtcgatccggaccgccacatcgagcgggtcaccgagctgcaagaactcttcctcacgcgcgtcgggctcgacatcggcaaggtgtgggtcgcggacgacggcgccgcggtggcggtctggaccacgccggagagcgtcgaagcgggggcggtgttcgccgagatcggcccgcgcatggccgagttgagcggttcccggctggccgcgcagcaacagatggaaggcctcctggcgccgcaccggcccaaggagcccgcgtggttcctggccaccgtcggcgtctcgcccgaccaccagggcaagggtctgggcagcgccgtcgtgctccccggagtggaggcggccgagcgcgccggggtgcccgccttcctggagacctccgcgccccgcaacctccccttctacgagcggctcggcttcaccgtcaccgccgacgtcgaggtgcccgaaggaccgcgcacctggtgcatgacccgcaagcccggtgcctga

SEQ ID NO: 5794 - DNA, 3228 bp, Artificial Sequence
  Synthetic Polynucloetide
atggccttaccagtgaccgccttgctcctgccgctggccttgctgctccacgccgccaggccggaagtgcaactggtggaatctggaggctctctggtgcagccagggggaagcctgagactgtcttgtgccgcttccggcttcaccttcgacgactacgccatgagctgggtgcgccaggtgccaggcaaaggcctggaatgggtgtccagcatcaactggagcggcacccacaccgattacgccgactccgtgaaaggcagattcacaatcagcagaaacaacgccaacaataccctgtacctgcagatgaactccctgaagtctgaggatacagcagtgtattattgcgccaagaactggcgggacgccggcaccacttggtttgagaaaagcggctctgccggacagggaacccaagtgacagtgtcctccggtaccggcggaggcggatctggcggcggaggtagcggtggcggaggatctgaattcgacatccagatgacacagagccctagcagcctgtctgccagcgtgggagacagagtgaccatcacatgcaaggccagcgaccacatcaacaactggctggcctggtatcagcagaagcctggacaggcccctaagctgctgatctacggcgctaccacactggaaacaggcgtgcccagcagattttctggcagcggctctggcaccgactacaccctgacaatatccagcctccagcctgaggacttcgccacctactactgtcagcagagctggaacaccccttggacattcggccagggcaccaagctggaaatcaagagactcgaggacctgaagaacgtgttcccacctgaggtggccgtgttcgagcctagcgaggccgagatcagccacacccagaaagccaccctcgtgtgcctggctaccggcttctaccccgaccatgtggaactgtcttggtgggtcaacggcaaagaggtgcacagcggcgtgtgtaccgacccccagccactgaaagaacagcccgccctgaacgacagccggtactgcctgagcagcagactgagagtgtccgccaccttctggcagaacccccggaaccacttcagatgccaggtgcagttctacggcctgagcgagaacgacgagtggacccaggacagagccaagcccgtgacccagatcgtgtctgccgaagcctggggcagagccgattgcggctttaccagcgagagctaccagcagggcgtgctgagcgccaccatcctgtacgagatcctgctgggcaaggccaccctgtacgccgtgctggtgtctgccctggtgctgatggctatggtcaagcggaaggacagccggggaagggccaagcgatctggatctggagcaacaaacttctcactactcaaacaagcaggtgacgtggaggagaatcccgggcctactagtatggactggatttggcgcatccttttccttgtcggcgctgctaccggcgcccattccgggcccgtggacaacaagttcaacaaagagcggtacagcgcctactacgagatttggcaactgcccaacctgaacgtgcggcagaaggccgccttcatcggatctctgcaggacgaccctagccagagcgccaatctgctggccgaggccaagaagctgaacgacgcccaggcccctaaaggatccggcggcggaggatctggcggaggcggatctgggggcggaggctctttcgaacaagttcagcttcaacagcctggcgctgagctggtcaaacctggcgcttctgtgaagatgagctgcaaagccagcggctacgccttcagcagctactggatcaactggatgaagcagaaacccggccagggactcgaatggatcggccaaatctatcccggcgacggcgacaccaactacaacggcaagttcaagggcagagccacactgaccgccgatacctctagcagcacagcctacatgcagctgagcagcctgaccagcgaagatagcgccgtgtacttctgtgcccggtccatcacaacagtcgtgggctgcgctatggactattggggccagggaacaagcgtgaccgtgtctagtacgcgtatccagaaccctgatcctgccgtgtaccagctgcgggatagcaagagcagcgacaagagcgtgtgtctgttcaccgacttcgacagccagaccaacgtgtcccagagcaaggactccgacgtgtacatcaccgataagtgcgtgctggacatgcggagcatggacttcaagagcaactccgccgtggcctggtccaacaagtccgatttcgcctgcgccaacgccttcaacaacagcattatccccgaggacacattcttcccaagccccgagagcagctgcgacgtgaagctggtggaaaagagcttcgagacagacaccaacctgaacttccagaacctgagcgtgatcggcttcagaatcctgctgctgaaagtggccggctttaacctgctgatgaccctgcggctgtggtccagccgcgccaagagaagcggatctggcgtgaagcagaccctgaatttcgacctgctgaagctggctggcgacgtggaatccaacccaggcccttctagaggccatatgaccgagtacaagcccacggtgcgcctcgccacccgcgacgacgtccccagggccgtacgcaccctcgccgccgcgttcgccgactaccccgccacgcgccacaccgtcgatccggaccgccacatcgagcgggtcaccgagctgcaagaactcttcctcacgcgcgtcgggctcgacatcggcaaggtgtgggtcgcggacgacggcgccgcggtggcggtctggaccacgccggagagcgtcgaagcgggggcggtgttcgccgagatcggcccgcgcatggccgagttgagcggttcccggctggccgcgcagcaacagatggaaggcctcctggcgccgcaccggcccaaggagcccgcgtggttcctggccaccgtcggcgtctcgcccgaccaccagggcaagggtctgggcagcgccgtcgtgctccccggagtggaggcggccgagcgcgccggggtgcccgccttcctggagacctccgcgccccgcaacctccccttctacgagcggctcggcttcaccgtcaccgccgacgtcgaggtgcccgaaggaccgcgcacctggtgcatgacccgcaagcccggtgcctga

SEQ ID NO: 5795 - DNA, 2526 bp, Artificial Sequence
  Synthetic Polynucloetide
atggccttaccagtgaccgccttgctcctgccgctggccttgctgctccacgccgccaggccggaagtgcaactggtggaatctggaggctctctggtgcagccagggggaagcctgagactgtcttgtgccgcttccggcttcaccttcgacgactacgccatgagctgggtgcgccaggtgccaggcaaaggcctggaatgggtgtccagcatcaactggagcggcacccacaccgattacgccgactccgtgaaaggcagattcacaatcagcagaaacaacgccaacaataccctgtacctgcagatgaactccctgaagtctgaggatacagcagtgtattattgcgccaagaactggcgggacgccggcaccacttggtttgagaaaagcggctctgccggacagggaacccaagtgacagtgtcctccggtaccggcggaggcggatctggcggcggaggtagcggtggcggaggatctgaattcgacatccagatgacacagagccctagcagcctgtctgccagcgtgggagacagagtgaccatcacatgcaaggccagcgaccacatcaacaactggctggcctggtatcagcagaagcctggacaggcccctaagctgctgatctacggcgctaccacactggaaacaggcgtgcccagcagattttctggcagcggctctggcaccgactacaccctgacaatatccagcctccagcctgaggacttcgccacctactactgtcagcagagctggaacaccccttggacattcggccagggcaccaagctggaaatcaagagactcgaggacctgaagaacgtgttcccacctgaggtggccgtgttcgagcctagcgaggccgagatcagccacacccagaaagccaccctcgtgtgcctggctaccggcttctaccccgaccatgtggaactgtcttggtgggtcaacggcaaagaggtgcacagcggcgtgtgtaccgacccccagccactgaaagaacagcccgccctgaacgacagccggtactgcctgagcagcagactgagagtgtccgccaccttctggcagaacccccggaaccacttcagatgccaggtgcagttctacggcctgagcgagaacgacgagtggacccaggacagagccaagcccgtgacccagatcgtgtctgccgaagcctggggcagagccgattgcggctttaccagcgagagctaccagcagggcgtgctgagcgccaccatcctgtacgagatcctgctgggcaaggccaccctgtacgccgtgctggtgtctgccctggtgctgatggctatggtcaagcggaaggacagccggggaagggccaagcgatctggatctggagcaacaaacttctcactactcaaacaagcaggtgacgtggaggagaatcccgggcctactagtatggactggatttggcgcatccttttccttgtcggcgctgctaccggcgcccattccgggcccgtggacaacaagttcaacaaagagcggtacagcgcctactacgagatttggcaactgcccaacctgaacgtgcggcagaaggccgccttcatcggatctctgcaggacgaccctagccagagcgccaatctgctggccgaggccaagaagctgaacgacgcccaggcccctaaaggatccggcggcggaggatctggcggaggcggatctgggggcggaggctctttcgaacaagttcagcttcaacagcctggcgctgagctggtcaaacctggcgcttctgtgaagatgagctgcaaagccagcggctacgccttcagcagctactggatcaactggatgaagcagaaacccggccagggactcgaatggatcggccaaatctatcccggcgacggcgacaccaactacaacggcaagttcaagggcagagccacactgaccgccgatacctctagcagcacagcctacatgcagctgagcagcctgaccagcgaagatagcgccgtgtacttctgtgcccggtccatcacaacagtcgtgggctgcgctatggactattggggccagggaacaagcgtgaccgtgtctagtacgcgtatccagaaccctgatcctgccgtgtaccagctgcgggatagcaagagcagcgacaagagcgtgtgtctgttcaccgacttcgacagccagaccaacgtgtcccagagcaaggactccgacgtgtacatcaccgataagtgcgtgctggacatgcggagcatggacttcaagagcaactccgccgtggcctggtccaacaagtccgatttcgcctgcgccaacgccttcaacaacagcattatccccgaggacacattcttcccaagccccgagagcagctgcgacgtgaagctggtggaaaagagcttcgagacagacaccaacctgaacttccagaacctgagcgtgatcggcttcagaatcctgctgctgaaagtggccggctttaacctgctgatgaccctgcggctgtggtccagc

SEQ ID NO: 5796 - DNA, 3201 bp, Artificial Sequence
  Synthetic Polynucloetide
atggccttaccagtgaccgccttgctcctgccgctggccttgctgctccacgccgccaggccggaagtgcaactggtggaatctggaggctctctggtgcagccagggggaagcctgagactgtcttgtgccgcttccggcttcaccttcgacgactacgccatgagctgggtgcgccaggtgccaggcaaaggcctggaatgggtgtccagcatcaactggagcggcacccacaccgattacgccgactccgtgaaaggcagattcacaatcagcagaaacaacgccaacaataccctgtacctgcagatgaactccctgaagtctgaggatacagcagtgtattattgcgccaagaactggcgggacgccggcaccacttggtttgagaaaagcggctctgccggacagggaacccaagtgacagtgtcctccggtaccggcggaggcggatctggcggcggaggtagcggtggcggaggatctgaattcgacatccagatgacacagagccctagcagcctgtctgccagcgtgggagacagagtgaccatcacatgcaaggccagcgaccacatcaacaactggctggcctggtatcagcagaagcctggacaggcccctaagctgctgatctacggcgctaccacactggaaacaggcgtgcccagcagattttctggcagcggctctggcaccgactacaccctgacaatatccagcctccagcctgaggacttcgccacctactactgtcagcagagctggaacaccccttggacattcggccagggcaccaagctggaaatcaagagactcgaggacctgaagaacgtgttcccacctgaggtggccgtgttcgagcctagcgaggccgagatcagccacacccagaaagccaccctcgtgtgcctggctaccggcttctaccccgaccatgtggaactgtcttggtgggtcaacggcaaagaggtgcacagcggcgtgtgtaccgacccccagccactgaaagaacagcccgccctgaacgacagccggtactgcctgagcagcagactgagagtgtccgccaccttctggcagaacccccggaaccacttcagatgccaggtgcagttctacggcctgagcgagaacgacgagtggacccaggacagagccaagcccgtgacccagatcgtgtctgccgaagcctggggcagagccgattgcggctttaccagcgagagctaccagcagggcgtgctgagcgccaccatcctgtacgagatcctgctgggcaaggccaccctgtacgccgtgctggtgtctgccctggtgctgatggctatggtcaagcggaaggacagccggggaagggccaagcgatctggatctggagcaacaaacttctcactactcaaacaagcaggtgacgtggaggagaatcccgggcctactagtatggactggatttggcgcatccttttccttgtcggcgctgctaccggcgcccattccgggcccgtggacaacaagttcaacaaagagcggtacagcgcctactacgagatttggcaactgcccaacctgaacgtgcggcagaaggccgccttcatcggatctctgcaggacgaccctagccagagcgccaatctgctggccgaggccaagaagctgaacgacgcccaggcccctaaaggatccggcggcggaggatctggcggaggcggatctgggggcggaggctctttcgaacaagttcagcttcaacagcctggcgctgagctggtcaaacctggcgcttctgtgaagatgagctgcaaagccagcggctacgccttcagcagctactggatcaactggatgaagcagaaacccggccagggactcgaatggatcggccaaatctatcccggcgacggcgacaccaactacaacggcaagttcaagggcagagccacactgaccgccgatacctctagcagcacagcctacatgcagctgagcagcctgaccagcgaagatagcgccgtgtacttctgtgcccggtccatcacaacagtcgtgggctgcgctatggactattggggccagggaacaagcgtgaccgtgtctagtacgcgtatccagaaccctgatcctgccgtgtaccagctgcgggatagcaagagcagcgacaagagcgtgtgtctgttcaccgacttcgacagccagaccaacgtgtcccagagcaaggactccgacgtgtacatcaccgataagtgcgtgctggacatgcggagcatggacttcaagagcaactccgccgtggcctggtccaacaagtccgatttcgcctgcgccaacgccttcaacaacagcattatccccgaggacacattcttcccaagccccgagagcagctgcgacgtgaagctggtggaaaagagcttcgagacagacaccaacctgaacttccagaacctgagcgtgatcggcttcagaatcctgctgctgaaagtggccggctttaacctgctgatgaccctgcggctgtggtccagccgcgccaagagaagcggatctggcgtgaagcagaccctgaatttcgacctgctgaagctggctggcgacgtggaatccaacccaggcccttctagaggcgggatccacaccatggctacctacgaggtgctgtgcgaggtggcaagaaagctgggcaccgacgacagagaagtggtgctgttcctgctgaacgtgttcatccctcagcctacactggcccagctgatcggtgcactgagagccctgaaagaggaaggccggctgacctttcctctgctggccgaatgcctgttcagagccggaagaagggatctgctgcgggacctgctgcatctggaccccagatttctggaaagacacctggccggcaccatgagctacttcagcccttaccagctgaccgtgctgcacgttgacggcgaactgtgcgccagagatattcggagcctgatcttcctgagcaaggacaccatcggcagccggtctacccctcagacatttctgcactgggtgtactgcatggaaaacctggacctgctcggccccacagatgtggatgccctgatgtccatgctgagaagcctgagcagagtggacctccagagacaggtgcagacactgatgggactgcacctgagcggacctagccacagccagcactacagacacacccct

SEQ ID NO: 5797 - DNA, 2538 bp, Artificial Sequence
  Synthetic Polynucloetide
atggccttaccagtgaccgccttgctcctgccgctggccttgctgctccacgccgccaggccggaagtgcaactggtggaatctggaggctctctggtgcagccagggggaagcctgagactgtcttgtgccgcttccggcttcaccttcgacgactacgccatgagctgggtgcgccaggtgccaggcaaaggcctggaatgggtgtccagcatcaactggagcggcacccacaccgattacgccgactccgtgaaaggcagattcacaatcagcagaaacaacgccaacaataccctgtacctgcagatgaactccctgaagtctgaggatacagcagtgtattattgcgccaagaactggcgggacgccggcaccacttggtttgagaaaagcggctctgccggacagggaacccaagtgacagtgtcctccggtaccggcggaggcggatctggcggcggaggtagcggtggcggaggatctgaattcgacatccagatgacacagagccctagcagcctgtctgccagcgtgggagacagagtgaccatcacatgcaaggccagcgaccacatcaacaactggctggcctggtatcagcagaagcctggacaggcccctaagctgctgatctacggcgctaccacactggaaacaggcgtgcccagcagattttctggcagcggctctggcaccgactacaccctgacaatatccagcctccagcctgaggacttcgccacctactactgtcagcagagctggaacaccccttggacattcggccagggcaccaagctggaaatcaagagactcgagatccagaaccctgatcctgccgtgtaccagctgcgggatagcaagagcagcgacaagagcgtgtgtctgttcaccgacttcgacagccagaccaacgtgtcccagagcaaggactccgacgtgtacatcaccgataagtgcgtgctggacatgcggagcatggacttcaagagcaactccgccgtggcctggtccaacaagtccgatttcgcctgcgccaacgccttcaacaacagcattatccccgaggacacattcttcccaagccccgagagcagctgcgacgtgaagctggtggaaaagagcttcgagacagacaccaacctgaacttccagaacctgagcgtgatcggcttcagaatcctgctgctgaaagtggccggctttaacctgctgatgaccctgcggctgtggtccagccgcgccaagagaagcggatctggcgtgaagcagaccctgaatttcgacctgctgaagctggctggcgacgtggaatccaacccaggccctactagtatggactggatttggcgcatccttttccttgtcggcgctgctaccggcgcccattccgggcccgtggacaacaagttcaacaaagagcggtacagcgcctactacgagatttggcaactgcccaacctgaacgtgcggcagaaggccgccttcatcggatctctgcaggacgaccctagccagagcgccaatctgctggccgaggccaagaagctgaacgacgcccaggcccctaaaggatccggcggcggaggatctggcggaggcggatctgggggcggaggctctttcgaacaagttcagcttcaacagcctggcgctgagctggtcaaacctggcgcttctgtgaagatgagctgcaaagccagcggctacgccttcagcagctactggatcaactggatgaagcagaaacccggccagggactcgaatggatcggccaaatctatcccggcgacggcgacaccaactacaacggcaagttcaagggcagagccacactgaccgccgatacctctagcagcacagcctacatgcagctgagcagcctgaccagcgaagatagcgccgtgtacttctgtgcccggtccatcacaacagtcgtgggctgcgctatggactattggggccagggaacaagcgtgaccgtgtctagtacgcgtgaggacctgaagaacgtgttcccacctgaggtggccgtgttcgagcctagcgaggccgagatcagccacacccagaaagccaccctcgtgtgcctggctaccggcttctaccccgaccatgtggaactgtcttggtgggtcaacggcaaagaggtgcacagcggcgtgtgtaccgacccccagccactgaaagaacagcccgccctgaacgacagccggtactgcctgagcagcagactgagagtgtccgccaccttctggcagaacccccggaaccacttcagatgccaggtgcagttctacggcctgagcgagaacgacgagtggacccaggacagagccaagcccgtgacccagatcgtgtctgccgaagcctggggcagagccgattgcggctttaccagcgagagctaccagcagggcgtgctgagcgccaccatcctgtacgagatcctgctgggcaaggccaccctgtacgccgtgctggtgtctgccctggtgctgatggctatggtcaagcggaaggacagccgggga

SEQ ID NO: 5798 - DNA, 3204 bp, Artificial Sequence
  Synthetic Polynucloetide
atggccttaccagtgaccgccttgctcctgccgctggccttgctgctccacgccgccaggccggaagtgcaactggtggaatctggaggctctctggtgcagccagggggaagcctgagactgtcttgtgccgcttccggcttcaccttcgacgactacgccatgagctgggtgcgccaggtgccaggcaaaggcctggaatgggtgtccagcatcaactggagcggcacccacaccgattacgccgactccgtgaaaggcagattcacaatcagcagaaacaacgccaacaataccctgtacctgcagatgaactccctgaagtctgaggatacagcagtgtattattgcgccaagaactggcgggacgccggcaccacttggtttgagaaaagcggctctgccggacagggaacccaagtgacagtgtcctccggtaccggcggaggcggatctggcggcggaggtagcggtggcggaggatctgaattcgacatccagatgacacagagccctagcagcctgtctgccagcgtgggagacagagtgaccatcacatgcaaggccagcgaccacatcaacaactggctggcctggtatcagcagaagcctggacaggcccctaagctgctgatctacggcgctaccacactggaaacaggcgtgcccagcagattttctggcagcggctctggcaccgactacaccctgacaatatccagcctccagcctgaggacttcgccacctactactgtcagcagagctggaacaccccttggacattcggccagggcaccaagctggaaatcaagagactcgagatccagaaccctgatcctgccgtgtaccagctgcgggatagcaagagcagcgacaagagcgtgtgtctgttcaccgacttcgacagccagaccaacgtgtcccagagcaaggactccgacgtgtacatcaccgataagtgcgtgctggacatgcggagcatggacttcaagagcaactccgccgtggcctggtccaacaagtccgatttcgcctgcgccaacgccttcaacaacagcattatccccgaggacacattcttcccaagccccgagagcagctgcgacgtgaagctggtggaaaagagcttcgagacagacaccaacctgaacttccagaacctgagcgtgatcggcttcagaatcctgctgctgaaagtggccggctttaacctgctgatgaccctgcggctgtggtccagccgcgccaagagaagcggatctggcgtgaagcagaccctgaatttcgacctgctgaagctggctggcgacgtggaatccaacccaggccctactagtatggactggatttggcgcatccttttccttgtcggcgctgctaccggcgcccattccgggcccgtggacaacaagttcaacaaagagcggtacagcgcctactacgagatttggcaactgcccaacctgaacgtgcggcagaaggccgccttcatcggatctctgcaggacgaccctagccagagcgccaatctgctggccgaggccaagaagctgaacgacgcccaggcccctaaaggatccggcggcggaggatctggcggaggcggatctgggggcggaggctctttcgaacaagttcagcttcaacagcctggcgctgagctggtcaaacctggcgcttctgtgaagatgagctgcaaagccagcggctacgccttcagcagctactggatcaactggatgaagcagaaacccggccagggactcgaatggatcggccaaatctatcccggcgacggcgacaccaactacaacggcaagttcaagggcagagccacactgaccgccgatacctctagcagcacagcctacatgcagctgagcagcctgaccagcgaagatagcgccgtgtacttctgtgcccggtccatcacaacagtcgtgggctgcgctatggactattggggccagggaacaagcgtgaccgtgtctagtacgcgtgaggacctgaagaacgtgttcccacctgaggtggccgtgttcgagcctagcgaggccgagatcagccacacccagaaagccaccctcgtgtgcctggctaccggcttctaccccgaccatgtggaactgtcttggtgggtcaacggcaaagaggtgcacagcggcgtgtgtaccgacccccagccactgaaagaacagcccgccctgaacgacagccggtactgcctgagcagcagactgagagtgtccgccaccttctggcagaacccccggaaccacttcagatgccaggtgcagttctacggcctgagcgagaacgacgagtggacccaggacagagccaagcccgtgacccagatcgtgtctgccgaagcctggggcagagccgattgcggctttaccagcgagagctaccagcagggcgtgctgagcgccaccatcctgtacgagatcctgctgggcaaggccaccctgtacgccgtgctggtgtctgccctggtgctgatggctatggtcaagcggaaggacagccggggaagggccaagcgatctggatctggagcaacaaacttctcactactcaaacaagcaggtgacgtggaggagaatcccgggccttctagaggcgggatccacaccatggctacctacgaggtgctgtgcgaggtggcaagaaagctgggcaccgacgacagagaagtggtgctgttcctgctgaacgtgttcatccctcagcctacactggcccagctgatcggtgcactgagagccctgaaagaggaaggccggctgacctttcctctgctggccgaatgcctgttcagagccggaagaagggatctgctgcgggacctgctgcatctggaccccagatttctggaaagacacctggccggcaccatgagctacttcagcccttaccagctgaccgtgctgcacgttgacggcgaactgtgcgccagagatattcggagcctgatcttcctgagcaaggacaccatcggcagccggtctacccctcagacatttctgcactgggtgtactgcatggaaaacctggacctgctcggccccacagatgtggatgccctgatgtccatgctgagaagcctgagcagagtggacctccagagacaggtgcagacactgatgggactgcacctgagcggacctagccacagccagcactacagacacacccct

SEQ ID NO: 5799 - DNA, 3228 bp, Artificial Sequence
  Synthetic Polynucloetide
atggccttaccagtgaccgccttgctcctgccgctggccttgctgctccacgccgccaggccggaagtgcaactggtggaatctggaggctctctggtgcagccagggggaagcctgagactgtcttgtgccgcttccggcttcaccttcgacgactacgccatgagctgggtgcgccaggtgccaggcaaaggcctggaatgggtgtccagcatcaactggagcggcacccacaccgattacgccgactccgtgaaaggcagattcacaatcagcagaaacaacgccaacaataccctgtacctgcagatgaactccctgaagtctgaggatacagcagtgtattattgcgccaagaactggcgggacgccggcaccacttggtttgagaaaagcggctctgccggacagggaacccaagtgacagtgtcctccggtaccggcggaggcggatctggcggcggaggtagcggtggcggaggatctgaattcgacatccagatgacacagagccctagcagcctgtctgccagcgtgggagacagagtgaccatcacatgcaaggccagcgaccacatcaacaactggctggcctggtatcagcagaagcctggacaggcccctaagctgctgatctacggcgctaccacactggaaacaggcgtgcccagcagattttctggcagcggctctggcaccgactacaccctgacaatatccagcctccagcctgaggacttcgccacctactactgtcagcagagctggaacaccccttggacattcggccagggcaccaagctggaaatcaagagactcgaggacctgaagaacgtgttcccacctgaggtggccgtgttcgagcctagcgaggccgagatcagccacacccagaaagccaccctcgtgtgcctggctaccggcttctaccccgaccatgtggaactgtcttggtgggtcaacggcaaagaggtgcacagcggcgtgtctaccgacccccagccactgaaagaacagcccgccctgaacgacagccggtactgcctgagcagcagactgagagtgtccgccaccttctggcagaacccccggaaccacttcagatgccaggtgcagttctacggcctgagcgagaacgacgagtggacccaggacagagccaagcccgtgacccagatcgtgtctgccgaagcctggggcagagccgattgcggctttaccagcgagagctaccagcagggcgtgctgagcgccaccatcctgtacgagatcctgctgggcaaggccaccctgtacgccgtgctggtgtctgccctggtgctgatggctatggtcaagcggaaggacagccggggaagggccaagcgatctggatctggagcaacaaacttctcactactcaaacaagcaggtgacgtggaggagaatcccgggcctactagtatggactggatttggcgcatccttttccttgtcggcgctgctaccggcgcccattccgggcccgtggacaacaagttcaacaaagagcggtacagcgcctactacgagatttggcaactgcccaacctgaacgtgcggcagaaggccgccttcatcggatctctgcaggacgaccctagccagagcgccaatctgctggccgaggccaagaagctgaacgacgcccaggcccctaaaggatccggcggcggaggatctggcggaggcggatctgggggcggaggctctttcgaacaagttcagcttcaacagcctggcgctgagctggtcaaacctggcgcttctgtgaagatgagctgcaaagccagcggctacgccttcagcagctactggatcaactggatgaagcagaaacccggccagggactcgaatggatcggccaaatctatcccggcgacggcgacaccaactacaacggcaagttcaagggcagagccacactgaccgccgatacctctagcagcacagcctacatgcagctgagcagcctgaccagcgaagatagcgccgtgtacttctgtgcccggtccatcacaacagtcgtgggctgcgctatggactattggggccagggaacaagcgtgaccgtgtctagtacgcgtatccagaaccctgatcctgccgtgtaccagctgcgggatagcaagagcagcgacaagagcgtgtgtctgttcaccgacttcgacagccagaccaacgtgtcccagagcaaggactccgacgtgtacatcaccgataagaccgtgctggacatgcggagcatggacttcaagagcaactccgccgtggcctggtccaacaagtccgatttcgcctgcgccaacgccttcaacaacagcattatccccgaggacacattcttcccaagccccgagagcagctgcgacgtgaagctggtggaaaagagcttcgagacagacaccaacctgaacttccagaacctgagcgtgatcggcttcagaatcctgctgctgaaagtggccggctttaacctgctgatgaccctgcggctgtggtccagccgcgccaagagaagcggatctggcgtgaagcagaccctgaatttcgacctgctgaagctggctggcgacgtggaatccaacccaggcccttctagaggccatatgaccgagtacaagcccacggtgcgcctcgccacccgcgacgacgtccccagggccgtacgcaccctcgccgccgcgttcgccgactaccccgccacgcgccacaccgtcgatccggaccgccacatcgagcgggtcaccgagctgcaagaactcttcctcacgcgcgtcgggctcgacatcggcaaggtgtgggtcgcggacgacggcgccgcggtggcggtctggaccacgccggagagcgtcgaagcgggggcggtgttcgccgagatcggcccgcgcatggccgagttgagcggttcccggctggccgcgcagcaacagatggaaggcctcctggcgccgcaccggcccaaggagcccgcgtggttcctggccaccgtcggcgtctcgcccgaccaccagggcaagggtctgggcagcgccgtcgtgctccccggagtggaggcggccgagcgcgccggggtgcccgccttcctggagacctccgcgccccgcaacctccccttctacgagcggctcggcttcaccgtcaccgccgacgtcgaggtgcccgaaggaccgcgcacctggtgcatgacccgcaagcccggtgcctga

SEQ ID NO: 5800 - DNA, 3474 bp, Artificial Sequence
  Synthetic Polynucloetide
atggccttaccagtgaccgccttgctcctgccgctggccttgctgctccacgccgccaggccggaagtgcaactggtggaatctggaggctctctggtgcagccagggggaagcctgagactgtcttgtgccgcttccggcttcaccttcgacgactacgccatgagctgggtgcgccaggtgccaggcaaaggcctggaatgggtgtccagcatcaactggagcggcacccacaccgattacgccgactccgtgaaaggcagattcacaatcagcagaaacaacgccaacaataccctgtacctgcagatgaactccctgaagtctgaggatacagcagtgtattattgcgccaagaactggcgggacgccggcaccacttggtttgagaaaagcggctctgccggacagggaacccaagtgacagtgtcctccggtaccggcggaggcggatctggcggcggaggtagcggtggcggaggatctgaattcgacatccagatgacacagagccctagcagcctgtctgccagcgtgggagacagagtgaccatcacatgcaaggccagcgaccacatcaacaactggctggcctggtatcagcagaagcctggacaggcccctaagctgctgatctacggcgctaccacactggaaacaggcgtgcccagcagattttctggcagcggctctggcaccgactacaccctgacaatatccagcctccagcctgaggacttcgccacctactactgtcagcagagctggaacaccccttggacattcggccagggcaccaagctggaaatcaagagactcgaggacctgaagaacgtgttcccacctgaggtggccgtgttcgagcctagcgaggccgagatcagccacacccagaaagccaccctcgtgtgcctggctaccggcttctaccccgaccatgtggaactgtcttggtgggtcaacggcaaagaggtgcacagcggcgtgtctaccgacccccagccactgaaagaacagcccgccctgaacgacagccggtactgcctgagcagcagactgagagtgtccgccaccttctggcagaacccccggaaccacttcagatgccaggtgcagttctacggcctgagcgagaacgacgagtggacccaggacagagccaagcccgtgacccagatcgtgtctgccgaagcctggggcagagccgattgcggctttaccagcgagagctaccagcagggcgtgctgagcgccaccatcctgtacgagatcctgctgggcaaggccaccctgtacgccgtgctggtgtctgccctggtgctgatggctatggtcaagcggaaggacagccggggaagggccaagcgatctggatctggagcaacaaacttctcactactcaaacaagcaggtgacgtggaggagaatcccgggcctactagtatggactggatttggcgcatccttttccttgtcggcgctgctaccggcgcccattccgggcccgtggacaacaagttcaacaaagagcggtacagcgcctactacgagatttggcaactgcccaacctgaacgtgcggcagaaggccgccttcatcggatctctgcaggacgaccctagccagagcgccaatctgctggccgaggccaagaagctgaacgacgcccaggcccctaaaggatccggcggcggaggatctggcggaggcggatctgggggcggaggctctttcgaacaagttcagcttcaacagcctggcgctgagctggtcaaacctggcgcttctgtgaagatgagctgcaaagccagcggctacgccttcagcagctactggatcaactggatgaagcagaaacccggccagggactcgaatggatcggccaaatctatcccggcgacggcgacaccaactacaacggcaagttcaagggcagagccacactgaccgccgatacctctagcagcacagcctacatgcagctgagcagcctgaccagcgaagatagcgccgtgtacttctgtgcccggtccatcacaacagtcgtgggctgcgctatggactattggggccagggaacaagcgtgaccgtgtctagtacgcgtgagcagaaactgatctcggaagaggatgggagcggcaccccattcccttctctggcccctcccatcatgctgctggtggacggcaagcagcagatggtggtcgtgtgcctggtgctggatgtggccccacctggactggacagccccatctggtttagcgccggcaatggctctgccctggacgcctttacctacggcccaagccctgccaccgatggcacctggacaaatctggcccacctgagcctgcccagcgaggaactggcttcttgggagcctctcgtgtgccacacaggacctggcgctgagggacacagcagatccacccagcctatgcacctgtctggcgaggccagcaccgccagaacctgtcctcaggaacctctgagaggcacccctggcggagcactgtggctgggagtgctgagactgctgctgttcaagctgctgctgtttgacctgctgctgacctgctcctgtctgtgcgatcctgccggccctctgccttctcctgccaccaccacaagactgagagccctgggcagccacagactgcaccctgccacagagacaggcggcagagaggccacaagcagccctagaccccagcccagagacagaagatggggcgataccccccctggcagaaagcctggatctccagtccgcgccaagagaagcggatctggcgtgaagcagaccctgaatttcgacctgctgaagctggctggcgacgtggaatccaacccaggcccttctagaggccatatgaccgagtacaagcccacggtgcgcctcgccacccgcgacgacgtccccagggccgtacgcaccctcgccgccgcgttcgccgactaccccgccacgcgccacaccgtcgatccggaccgccacatcgagcgggtcaccgagctgcaagaactcttcctcacgcgcgtcgggctcgacatcggcaaggtgtgggtcgcggacgacggcgccgcggtggcggtctggaccacgccggagagcgtcgaagcgggggcggtgttcgccgagatcggcccgcgcatggccgagttgagcggttcccggctggccgcgcagcaacagatggaaggcctcctggcgccgcaccggcccaaggagcccgcgtggttcctggccaccgtcggcgtctcgcccgaccaccagggcaagggtctgggcagcgccgtcgtgctccccggagtggaggcggccgagcgcgccggggtgcccgccttcctggagacctccgcgccccgcaacctccccttctacgagcggctcggcttcaccgtcaccgccgacgtcgaggtgcccgaaggaccgcgcacctggtgcatgacccgcaagcccggtgcctga

SEQ ID NO: 5801 - DNA, 3339 bp, Artificial Sequence
  Synthetic Polynucloetide
atggccttaccagtgaccgccttgctcctgccgctggccttgctgctccacgccgccaggccggaagtgcaactggtggaatctggaggctctctggtgcagccagggggaagcctgagactgtcttgtgccgcttccggcttcaccttcgacgactacgccatgagctgggtgcgccaggtgccaggcaaaggcctggaatgggtgtccagcatcaactggagcggcacccacaccgattacgccgactccgtgaaaggcagattcacaatcagcagaaacaacgccaacaataccctgtacctgcagatgaactccctgaagtctgaggatacagcagtgtattattgcgccaagaactggcgggacgccggcaccacttggtttgagaaaagcggctctgccggacagggaacccaagtgacagtgtcctccggtaccggcggaggcggatctggcggcggaggtagcggtggcggaggatctgaattcgacatccagatgacacagagccctagcagcctgtctgccagcgtgggagacagagtgaccatcacatgcaaggccagcgaccacatcaacaactggctggcctggtatcagcagaagcctggacaggcccctaagctgctgatctacggcgctaccacactggaaacaggcgtgcccagcagattttctggcagcggctctggcaccgactacaccctgacaatatccagcctccagcctgaggacttcgccacctactactgtcagcagagctggaacaccccttggacattcggccagggcaccaagctggaaatcaagagactcgaggggaaaccaattcccaaccctcttctgggactggattcaaccggcagcggcgacaagcagctggacgccgacgtgtcccccaagcctaccatcttcctgccctctatcgccgagacaaagctccagaaggccggcacctacctgtgcctgctggaaaagttcttcccagatgtgattaagatccactggcaggaaaagaagtccaacaccatcctgggcagccaggaaggcaacaccatgaagaccaacgacacctacatgaagttcagctggctgaccgtgcccgagaagtccctggacaaagaacacagatgcatcgtgcggcacgaaaacaacaagaacggcgtggaccaggaaatcatcttcccacccatcaagaccgatgtgattacaatggaccccaaggacaactgctccaaggacgccaacgataccctgctgctccagctgaccaacaccagcgcctactacatgtacttgttgctgctgctgaagtccgtggtgtacttcgccatcatcacatgctgcctgctgcggagaaccgccttctgctgcaacggcgagaagtctagggccaagcgatctggatctggagcaacaaacttctcactactcaaacaagcaggtgacgtggaggagaatcccgggcctactagtatggactggatttggcgcatccttttccttgtcggcgctgctaccggcgcccattccgggcccgtggacaacaagttcaacaaagagcggtacagcgcctactacgagatttggcaactgcccaacctgaacgtgcggcagaaggccgccttcatcggatctctgcaggacgaccctagccagagcgccaatctgctggccgaggccaagaagctgaacgacgcccaggcccctaaaggatccggcggcggaggatctggcggaggcggatctgggggcggaggctctttcgaacaagttcagcttcaacagcctggcgctgagctggtcaaacctggcgcttctgtgaagatgagctgcaaagccagcggctacgccttcagcagctactggatcaactggatgaagcagaaacccggccagggactcgaatggatcggccaaatctatcccggcgacggcgacaccaactacaacggcaagttcaagggcagagccacactgaccgccgatacctctagcagcacagcctacatgcagctgagcagcctgaccagcgaagatagcgccgtgtacttctgtgcccggtccatcacaacagtcgtgggctgcgctatggactattggggccagggaacaagcgtgaccgtgtctagtacgcgtgagcagaaactgatctcggaagaggatgggagcggcagccagcctcacaccaagcccagcgtgttcgtgatgaagaacggcaccaacgtggcctgcctcgtgaaagagttctaccccaaggacatcaggatcaacctggtgtccagcaagaagatcaccgagttcgaccccgccatcgtgatctcccccagcggcaagtacaacgccgtgaagctggggaagtacgaggacagcaacagcgtgacctgctccgtgcagcacgacaacaagaccgtgcacagcaccgactttgaagtgaaaaccgactccaccgaccacgtgaagcccaaagagacagagaacaccaagcagcccagcaagagctgccacaagcccaaggccatcgtgcacaccgagaaagtgaacatgatgagcctgaccgtgctgggcctgcggatgctgttcgccaaaaccgtggccgtgaacttcctgctgaccgccaagctgttcttcctccgcgccaagagaagcggatctggcgtgaagcagaccctgaatttcgacctgctgaagctggctggcgacgtggaatccaacccaggcccttctagaggccatatgaccgagtacaagcccacggtgcgcctcgccacccgcgacgacgtccccagggccgtacgcaccctcgccgccgcgttcgccgactaccccgccacgcgccacaccgtcgatccggaccgccacatcgagcgggtcaccgagctgcaagaactcttcctcacgcgcgtcgggctcgacatcggcaaggtgtgggtcgcggacgacggcgccgcggtggcggtctggaccacgccggagagcgtcgaagcgggggcggtgttcgccgagatcggcccgcgcatggccgagttgagcggttcccggctggccgcgcagcaacagatggaaggcctcctggcgccgcaccggcccaaggagcccgcgtggttcctggccaccgtcggcgtctcgcccgaccaccagggcaagggtctgggcagcgccgtcgtgctccccggagtggaggcggccgagcgcgccggggtgcccgccttcctggagacctccgcgccccgcaacctccccttctacgagcggctcggcttcaccgtcaccgccgacgtcgaggtgcccgaaggaccgcgcacctggtgcatgacccgcaagcccggtgcctga

SEQ ID NO: 5802 - DNA, 2550 bp, Artificial Sequence
  Synthetic Polynucloetide
atggccttaccagtgaccgccttgctcctgccgctggccttgctgctccacgccgccaggccggaagtgcaactggtggaatctggaggctctctggtgcagccagggggaagcctgagactgtcttgtgccgcttccggcttcaccttcgacgactacgccatgagctgggtgcgccaggtgccaggcaaaggcctggaatgggtgtccagcatcaactggagcggcacccacaccgattacgccgactccgtgaaaggcagattcacaatcagcagaaacaacgccaacaataccctgtacctgcagatgaactccctgaagtctgaggatacagcagtgtattattgcgccaagaactggcgggacgccggcaccacttggtttgagaaaagcggctctgccggacagggaacccaagtgacagtgtcctccggtaccggcggaggcggatctggcggcggaggtagcggtggcggaggatctgaattcgacatccagatgacacagagccctagcagcctgtctgccagcgtgggagacagagtgaccatcacatgcaaggccagcgaccacatcaacaactggctggcctggtatcagcagaagcctggacaggcccctaagctgctgatctacggcgctaccacactggaaacaggcgtgcccagcagattttctggcagcggctctggcaccgactacaccctgacaatatccagcctccagcctgaggacttcgccacctactactgtcagcagagctggaacaccccttggacattcggccagggcaccaagctggaaatcaagagactcgagagccagcctcacaccaagcccagcgtgttcgtgatgaagaacggcaccaacgtggcctgcctcgtgaaagagttctaccccaaggacatcaggatcaacctggtgtccagcaagaagatcaccgagttcgaccccgccatcgtgatctcccccagcggcaagtacaacgccgtgaagctggggaagtacgaggacagcaacagcgtgacctgctccgtgcagcacgacaacaagaccgtgcacagcaccgactttgaagtgaaaaccgactccaccgaccacgtgaagcccaaagagacagagaacaccaagcagcccagcaagagctgccacaagcccaaggccatcgtgcacaccgagaaagtgaacatgatgagcctgaccgtgctgggcctgcggatgctgttcgccaaaaccgtggccgtgaacttcctgctgaccgccaagctgttcttcctcagggccaagcgatctggatctggagcaacaaacttctcactactcaaacaagcaggtgacgtggaggagaatcccgggcctactagtatggactggatttggcgcatccttttccttgtcggcgctgctaccggcgcccattccgggcccgtggacaacaagttcaacaaagagcggtacagcgcctactacgagatttggcaactgcccaacctgaacgtgcggcagaaggccgccttcatcggatctctgcaggacgaccctagccagagcgccaatctgctggccgaggccaagaagctgaacgacgcccaggcccctaaaggatccggcggcggaggatctggcggaggcggatctgggggcggaggctctttcgaacaagttcagcttcaacagcctggcgctgagctggtcaaacctggcgcttctgtgaagatgagctgcaaagccagcggctacgccttcagcagctactggatcaactggatgaagcagaaacccggccagggactcgaatggatcggccaaatctatcccggcgacggcgacaccaactacaacggcaagttcaagggcagagccacactgaccgccgatacctctagcagcacagcctacatgcagctgagcagcctgaccagcgaagatagcgccgtgtacttctgtgcccggtccatcacaacagtcgtgggctgcgctatggactattggggccagggaacaagcgtgaccgtgtctagtacgcgtgacaagcagctggacgccgacgtgtcccccaagcctaccatcttcctgccctctatcgccgagacaaagctccagaaggccggcacctacctgtgcctgctggaaaagttcttcccagatgtgattaagatccactggcaggaaaagaagtccaacaccatcctgggcagccaggaaggcaacaccatgaagaccaacgacacctacatgaagttcagctggctgaccgtgcccgagaagtccctggacaaagaacacagatgcatcgtgcggcacgaaaacaacaagaacggcgtggaccaggaaatcatcttcccacccatcaagaccgatgtgattacaatggaccccaaggacaactgctccaaggacgccaacgataccctgctgctccagctgaccaacaccagcgcctactacatgtacttgttgctgctgctgaagtccgtggtgtacttcgccatcatcacatgctgcctgctgcggagaaccgccttctgctgcaacggcgagaagtct

SEQ ID NO: 5803 - DNA, 3759 bp, Artificial Sequence
  Synthetic Polynucloetide
atggccttaccagtgaccgccttgctcctgccgctggccttgctgctccacgccgccaggccggaagtgcaactggtggaatctggaggctctctggtgcagccagggggaagcctgagactgtcttgtgccgcttccggcttcaccttcgacgactacgccatgagctgggtgcgccaggtgccaggcaaaggcctggaatgggtgtccagcatcaactggagcggcacccacaccgattacgccgactccgtgaaaggcagattcacaatcagcagaaacaacgccaacaataccctgtacctgcagatgaactccctgaagtctgaggatacagcagtgtattattgcgccaagaactggcgggacgccggcaccacttggtttgagaaaagcggctctgccggacagggaacccaagtgacagtgtcctccggtaccggcggaggcggatctggcggcggaggtagcggtggcggaggatctgaattcgacatccagatgacacagagccctagcagcctgtctgccagcgtgggagacagagtgaccatcacatgcaaggccagcgaccacatcaacaactggctggcctggtatcagcagaagcctggacaggcccctaagctgctgatctacggcgctaccacactggaaacaggcgtgcccagcagattttctggcagcggctctggcaccgactacaccctgacaatatccagcctccagcctgaggacttcgccacctactactgtcagcagagctggaacaccccttggacattcggccagggcaccaagctggaaatcaagagaggacagcctaaggccaatcctaccgtgacactgttccctccaagcagcgaagaactccaggccaacaaggccacacttgtgtgcctgatctccgacttctaccctggggctgtgacagtggcttggaaggccgatggatctcctgtgaaagccggcgtggaaaccaccaagccatccaagcagagcaacaacaaatacgccgccagctcctacctgagcctgacacctgagcagtggaagtcccacagatcctacagctgccaagtgacccacgaaggcagcaccgtggaaaagacagtggcccctacagagtgcagcggatcccagagcttcggcctgctggaccccaagctgtgctacctgctggatggcatcctgttcatctacggcgtgatcctgaccgccctgttcctgagagtgaagttcagcagaagcgccgacgcccctgcctaccagcagggacagaaccaactgtacaacgagctgaacctgggcagacgggaagagtacgacgtgctggacaagcggagaggcagggaccctgagatgggcggaaagccccagcggagaaagaacccccaggaaggactgtataacgaactccagaaagacaagatggccgaagcctacagcgagatcggcatgaagggcgagcggagaagaggcaagggccacgatggcctgtaccagggcctgagcaccgccaccaaggacacctatgacgccctgcacatgcaggccctgcctccaagaagggccaagcgatctggatctggagcaacaaacttctcactactcaaacaagcaggtgacgtggaggagaatcccgggcctactagtatggactggatttggcgcatccttttccttgtcggcgctgctaccggcgcccattccgggcccgtggacaacaagttcaacaaagagcggtacagcgcctactacgagatttggcaactgcccaacctgaacgtgcggcagaaggccgccttcatcggatctctgcaggacgaccctagccagagcgccaatctgctggccgaggccaagaagctgaacgacgcccaggcccctaaaggatccggcggcggaggatctggcggaggcggatctgggggcggaggctctttcgaacaagttcagcttcaacagcctggcgctgagctggtcaaacctggcgcttctgtgaagatgagctgcaaagccagcggctacgccttcagcagctactggatcaactggatgaagcagaaacccggccagggactcgaatggatcggccaaatctatcccggcgacggcgacaccaactacaacggcaagttcaagggcagagccacactgaccgccgatacctctagcagcacagcctacatgcagctgagcagcctgaccagcgaagatagcgccgtgtacttctgtgcccggtccatcacaacagtcgtgggctgcgctatggactattggggccagggaacaagcgtgaccgtgtctagtgcctctacaaagggaccctccgtgtttcctctggctcccagcagcaagtctacaagcggaggaacagccgctctgggctgcctggtcaaggattactttcccgagcctgtgaccgtgtcctggaatagcggagcactgacaagcggcgtgcacacctttccagccgtgctgcaaagcagcggcctgtactctctgagcagcgtggtcacagtgcctagctctagcctgggcacccagacctacatctgcaatgtgaaccacaagcctagcaacaccaaggtggacaagagagtggaacccaagagctgtggtacccagagttttgggttgttggaccctaaattgtgctatctgttggacggaatcctgttcatttacggagtgatcctgaccgcattgttcctgcgggttaagttttccagatccgcagacgcacccgcttaccaacaagggcagaaccaactctacaatgaacttaatttggggcggagggaagagtacgacgttctggacaaaaggaggggacgagatcccgagatgggcggaaagcctcagcgaaggaagaatccgcaagaggggctttataacgaactccagaaagataaaatggcagaagcctatagtgagattgggatgaagggagaaaggaggaggggtaaaggtcacgatgggttgtaccaaggattgagcacagccactaaagatacctatgatgcgctccacatgcaggccctgccgccaagacgcgccaagagaagcggatctggcgtgaagcagaccctgaatttcgacctgctgaagctggctggcgacgtggaatccaacccaggcccttctagaggccatatgaccgagtacaagcccacggtgcgcctcgccacccgcgacgacgtccccagggccgtacgcaccctcgccgccgcgttcgccgactaccccgccacgcgccacaccgtcgatccggaccgccacatcgagcgggtcaccgagctgcaagaactcttcctcacgcgcgtcgggctcgacatcggcaaggtgtgggtcgcggacgacggcgccgcggtggcggtctggaccacgccggagagcgtcgaagcgggggcggtgttcgccgagatcggcccgcgcatggccgagttgagcggttcccggctggccgcgcagcaacagatggaaggcctcctggcgccgcaccggcccaaggagcccgcgtggttcctggccaccgtcggcgtctcgcccgaccaccagggcaagggtctgggcagcgccgtcgtgctccccggagtggaggcggccgagcgcgccggggtgcccgccttcctggagacctccgcgccccgcaacctccccttctacgagcggctcggcttcaccgtcaccgccgacgtcgaggtgcccgaaggaccgcgcacctggtgcatgacccgcaagcccggtgcctga

SEQ ID NO: 5804 - DNA, 3114 bp, Artificial Sequence
  Synthetic Polynucloetide
atggccttaccagtgaccgccttgctcctgccgctggccttgctgctccacgccgccaggccggaagtgcaactggtggaatctggaggctctctggtgcagccagggggaagcctgagactgtcttgtgccgcttccggcttcaccttcgacgactacgccatgagctgggtgcgccaggtgccaggcaaaggcctggaatgggtgtccagcatcaactggagcggcacccacaccgattacgccgactccgtgaaaggcagattcacaatcagcagaaacaacgccaacaataccctgtacctgcagatgaactccctgaagtctgaggatacagcagtgtattattgcgccaagaactggcgggacgccggcaccacttggtttgagaaaagcggctctgccggacagggaacccaagtgacagtgtcctccggtaccggcggaggcggatctggcggcggaggtagcggtggcggaggatctgaattcgacatccagatgacacagagccctagcagcctgtctgccagcgtgggagacagagtgaccatcacatgcaaggccagcgaccacatcaacaactggctggcctggtatcagcagaagcctggacaggcccctaagctgctgatctacggcgctaccacactggaaacaggcgtgcccagcagattttctggcagcggctctggcaccgactacaccctgacaatatccagcctccagcctgaggacttcgccacctactactgtcagcagagctggaacaccccttggacattcggccagggcaccaagctggaaatcaagagactcgaggacctgaagaacgtgttcccacctgaggtggccgtgttcgagcctagcgaggccgagatcagccacacccagaaagccaccctcgtgtgcctggctaccggcttctaccccgaccatgtggaactgtcttggtgggtcaacggcaaagaggtgcacagcggcgtgtctaccgacccccagccactgaaagaacagcccgccctgaacgacagccggtactgcctgagcagcagactgagagtgtccgccaccttctggcagaacccccggaaccacttcagatgccaggtgcagttctacggcctgagcgagaacgacgagtggacccaggacagagccaagcccgtgacccagatcgtgtctgccgaagcctggggcagagccgattgcggatcccagagcttcggcctgctggaccccaagctgtgctacctgctggatggcatcctgttcatctacggcgtgatcctgaccgccctgttcctgagagtgaagttcagcagaagcgccgacgcccctgcctaccagcagggacagaaccaactgtacaacgagctgaacctgggcagacgggaagagtacgacgtgctggacaagcggagaggcagggaccctgagatgggcggaaagccccagcggagaaagaacccccaggaaggactgtataacgaactccagaaagacaagatggccgaagcctacagcgagatcggcatgaagggcgagcggagaagaggcaagggccacgatggcctgtaccagggcctgagcaccgccaccaaggacacctatgacgccctgcacatgcaggccctgcctccaagaagggccaagcgatctggatctggagcaacaaacttctcactactcaaacaagcaggtgacgtggaggagaatcccgggcctactagtatggactggatttggcgcatccttttccttgtcggcgctgctaccggcgcccattccgggcccgtggacaacaagttcaacaaagagcggtacagcgcctactacgagatttggcaactgcccaacctgaacgtgcggcagaaggccgccttcatcggatctctgcaggacgaccctagccagagcgccaatctgctggccgaggccaagaagctgaacgacgcccaggcccctaaaggatccggcggcggaggatctggcggaggcggatctgggggcggaggctctttcgaacaagttcagcttcaacagcctggcgctgagctggtcaaacctggcgcttctgtgaagatgagctgcaaagccagcggctacgccttcagcagctactggatcaactggatgaagcagaaacccggccagggactcgaatggatcggccaaatctatcccggcgacggcgacaccaactacaacggcaagttcaagggcagagccacactgaccgccgatacctctagcagcacagcctacatgcagctgagcagcctgaccagcgaagatagcgccgtgtacttctgtgcccggtccatcacaacagtcgtgggctgcgctatggactattggggccagggaacaagcgtgaccgtgtctagtacgcgtatccagaaccctgatcctgccgtgtaccagctgcgggatagcaagagcagcgacaagagcgtgtgtctgttcaccgacttcgacagccagaccaacgtgtcccagagcaaggactccgacgtgtacatcaccgataagaccgtgctggacatgcggagcatggacttcaagagcaactccgccgtggcctggtccaacaagtccgatttcgcctgcgccaacgccttcaacaacagcattatccccgaggacacattcttcccaagccccgagagcagctgcggtacccagagttttgggttgttggaccctaaattgtgctatctgttggacggaatcctgttcatttacggagtgatcctgaccgcattgttcctgcgggttaagttttccagatccgcagacgcacccgcttaccaacaagggcagaaccaactctacaatgaacttaatttggggcggagggaagagtacgacgttctggacaaaaggaggggacgagatcccgagatgggcggaaagcctcagcgaaggaagaatccgcaagaggggctttataacgaactccagaaagataaaatggcagaagcctatagtgagattgggatgaagggagaaaggaggaggggtaaaggtcacgatgggttgtaccaaggattgagcacagccactaaagatacctatgatgcgctccacatgcaggccctgccgccaaga

SEQ ID NO: 5805 - DNA, 3114 bp, Artificial Sequence
  Synthetic Polynucloetide
atggccttaccagtgaccgccttgctcctgccgctggccttgctgctccacgccgccaggccggaagtgcaactggtggaatctggaggctctctggtgcagccagggggaagcctgagactgtcttgtgccgcttccggcttcaccttcgacgactacgccatgagctgggtgcgccaggtgccaggcaaaggcctggaatgggtgtccagcatcaactggagcggcacccacaccgattacgccgactccgtgaaaggcagattcacaatcagcagaaacaacgccaacaataccctgtacctgcagatgaactccctgaagtctgaggatacagcagtgtattattgcgccaagaactggcgggacgccggcaccacttggtttgagaaaagcggctctgccggacagggaacccaagtgacagtgtcctccggtaccggcggaggcggatctggcggcggaggtagcggtggcggaggatctgaattcgacatccagatgacacagagccctagcagcctgtctgccagcgtgggagacagagtgaccatcacatgcaaggccagcgaccacatcaacaactggctggcctggtatcagcagaagcctggacaggcccctaagctgctgatctacggcgctaccacactggaaacaggcgtgcccagcagattttctggcagcggctctggcaccgactacaccctgacaatatccagcctccagcctgaggacttcgccacctactactgtcagcagagctggaacaccccttggacattcggccagggcaccaagctggaaatcaagagactcgaggacctgaagaacgtgttcccacctgaggtggccgtgttcgagcctagcaaggccgagatcgcccacacccagaaagccaccctcgtgtgcctggctaccggcttctaccccgaccatgtggaactgtcttggtgggtcaacggcaaagaggtgcacagcggcgtgtgtaccgacccccagccactgaaagaacagcccgccctgaacgacagccggtactgcctgagcagcagactgagagtgtccgccaccttctggcagaacccccggaaccacttcagatgccaggtgcagttctacggcctgagcgagaacgacgagtggacccaggacagagccaagcccgtgacccagatcgtgtctgccgaagcctggggcagagccgattgcggatcccagagcttcggcctgctggaccccaagctgtgctacctgctggatggcatcctgttcatctacggcgtgatcctgaccgccctgttcctgagagtgaagttcagcagaagcgccgacgcccctgcctaccagcagggacagaaccaactgtacaacgagctgaacctgggcagacgggaagagtacgacgtgctggacaagcggagaggcagggaccctgagatgggcggaaagccccagcggagaaagaacccccaggaaggactgtataacgaactccagaaagacaagatggccgaagcctacagcgagatcggcatgaagggcgagcggagaagaggcaagggccacgatggcctgtaccagggcctgagcaccgccaccaaggacacctatgacgccctgcacatgcaggccctgcctccaagaagggccaagcgatctggatctggagcaacaaacttctcactactcaaacaagcaggtgacgtggaggagaatcccgggcctactagtatggactggatttggcgcatccttttccttgtcggcgctgctaccggcgcccattccgggcccgtggacaacaagttcaacaaagagcggtacagcgcctactacgagatttggcaactgcccaacctgaacgtgcggcagaaggccgccttcatcggatctctgcaggacgaccctagccagagcgccaatctgctggccgaggccaagaagctgaacgacgcccaggcccctaaaggatccggcggcggaggatctggcggaggcggatctgggggcggaggctctttcgaacaagttcagcttcaacagcctggcgctgagctggtcaaacctggcgcttctgtgaagatgagctgcaaagccagcggctacgccttcagcagctactggatcaactggatgaagcagaaacccggccagggactcgaatggatcggccaaatctatcccggcgacggcgacaccaactacaacggcaagttcaagggcagagccacactgaccgccgatacctctagcagcacagcctacatgcagctgagcagcctgaccagcgaagatagcgccgtgtacttctgtgcccggtccatcacaacagtcgtgggctgcgctatggactattggggccagggaacaagcgtgaccgtgtctagtacgcgtatccagaaccctgatcctgccgtgtaccagctgcgggatagcaagagcagcgacaagagcgtgtgtctgttcaccgacttcgacagccagaccaacgtgtcccagagcaaggactccgacgtgtacatcaccgataagtgcgtgctggacatgcggagcatggacttcaagagcaactccgccgtggcctggtccaacaagtccgatttcgcctgcgccaacgccttcaacaacagcattatccccgaggacacattcttcccaagcagcgacgtgccctgcggtacccagagttttgggttgttggaccctaaattgtgctatctgttggacggaatcctgttcatttacggagtgatcctgaccgcattgttcctgcgggttaagttttccagatccgcagacgcacccgcttaccaacaagggcagaaccaactctacaatgaacttaatttggggcggagggaagagtacgacgttctggacaaaaggaggggacgagatcccgagatgggcggaaagcctcagcgaaggaagaatccgcaagaggggctttataacgaactccagaaagataaaatggcagaagcctatagtgagattgggatgaagggagaaaggaggaggggtaaaggtcacgatgggttgtaccaaggattgagcacagccactaaagatacctatgatgcgctccacatgcaggccctgccgccaaga

SEQ ID NO: 5806 - DNA, 3327 bp, Artificial Sequence
  Synthetic Polynucloetide
atggccttaccagtgaccgccttgctcctgccgctggccttgctgctccacgccgccaggccggaagtgcaactggtggaatctggaggctctctggtgcagccagggggaagcctgagactgtcttgtgccgcttccggcttcaccttcgacgactacgccatgagctgggtgcgccaggtgccaggcaaaggcctggaatgggtgtccagcatcaactggagcggcacccacaccgattacgccgactccgtgaaaggcagattcacaatcagcagaaacaacgccaacaataccctgtacctgcagatgaactccctgaagtctgaggatacagcagtgtattattgcgccaagaactggcgggacgccggcaccacttggtttgagaaaagcggctctgccggacagggaacccaagtgacagtgtcctccggtaccggcggaggcggatctggcggcggaggtagcggtggcggaggatctgaattcgacatccagatgacacagagccctagcagcctgtctgccagcgtgggagacagagtgaccatcacatgcaaggccagcgaccacatcaacaactggctggcctggtatcagcagaagcctggacaggcccctaagctgctgatctacggcgctaccacactggaaacaggcgtgcccagcagattttctggcagcggctctggcaccgactacaccctgacaatatccagcctccagcctgaggacttcgccacctactactgtcagcagagctggaacaccccttggacattcggccagggcaccaagctggaaatcaagagactcgaggggaaaccaattcccaaccctcttctgggactggattcaaccggcagcggcgaggacctgaagaacgtgttcccacctgaggtggccgtgttcgagcctagcgaggccgagatcagccacacccagaaagccaccctcgtgtgcctggctaccggcttctaccccgaccatgtggaactgtcttggtgggtcaacggcaaagaggtgcacagcggcgtgtctaccgacccccagccactgaaagaacagcccgccctgaacgacagccggtactgcctgagcagcagactgagagtgtccgccaccttctggcagaacccccggaaccacttcagatgccaggtgcagttctacggcctgagcgagaacgacgagtggacccaggacagagccaagcccgtgacccagatcgtgtctgccgaagcctggggcagagccgattgcggatcccagagcttcggcctgctggaccccaagctgtgctacctgctggatggcatcctgttcatctacggcgtgatcctgaccgccctgttcctgagagtgaagttcagcagaagcgccgacgcccctgcctaccagcagggacagaaccaactgtacaacgagctgaacctgggcagacgggaagagtacgacgtgctggacaagcggagaggcagggaccctgagatgggcggaaagccccagcggagaaagaacccccaggaaggactgtataacgaactccagaaagacaagatggccgaagcctacagcgagatcggcatgaagggcgagcggagaagaggcaagggccacgatggcctgtaccagggcctgagcaccgccaccaaggacacctatgacgccctgcacatgcaggccctgcctccaagaagggccaagcgatctggatctggagcaacaaacttctcactactcaaacaagcaggtgacgtggaggagaatcccgggcctactagtatggactggatttggcgcatccttttccttgtcggcgctgctaccggcgcccattccgggcccgtggacaacaagttcaacaaagagcggtacagcgcctactacgagatttggcaactgcccaacctgaacgtgcggcagaaggccgccttcatcggatctctgcaggacgaccctagccagagcgccaatctgctggccgaggccaagaagctgaacgacgcccaggcccctaaaggatccggcggcggaggatctggcggaggcggatctgggggcggaggctctttcgaacaagttcagcttcaacagcctggcgctgagctggtcaaacctggcgcttctgtgaagatgagctgcaaagccagcggctacgccttcagcagctactggatcaactggatgaagcagaaacccggccagggactcgaatggatcggccaaatctatcccggcgacggcgacaccaactacaacggcaagttcaagggcagagccacactgaccgccgatacctctagcagcacagcctacatgcagctgagcagcctgaccagcgaagatagcgccgtgtacttctgtgcccggtccatcacaacagtcgtgggctgcgctatggactattggggccagggaacaagcgtgaccgtgtctagtacgcgtgagcagaaactgatctcggaagaggatgggagcggcatccagaaccctgatcctgccgtgtaccagctgcgggatagcaagagcagcgacaagagcgtgtgtctgttcaccgacttcgacagccagaccaacgtgtcccagagcaaggactccgacgtgtacatcaccgataagaccgtgctggacatgcggagcatggacttcaagagcaactccgccgtggcctggtccaacaagtccgatttcgcctgcgccaacgccttcaacaacagcattatccccgaggacacattcttcccaagccccgagagcagctgcggtacccagagttttgggttgttggaccctaaattgtgctatctgttggacggaatcctgttcatttacggagtgatcctgaccgcattgttcctgaggagcaagcggtcacggctgctccacagcgattacatgaatatgacaccacgaagaccgggtcctactcgcaaacactaccaaccctacgcacctccccgcgactttgcagcgtaccgatctcgggttaagttttccagatccgcagacgcacccgcttaccaacaagggcagaaccaactctacaatgaacttaatttggggcggagggaagagtacgacgttctggacaaaaggaggggacgagatcccgagatgggcggaaagcctcagcgaaggaagaatccgcaagaggggctttataacgaactccagaaagataaaatggcagaagcctatagtgagattgggatgaagggagaaaggaggaggggtaaaggtcacgatgggttgtaccaaggattgagcacagccactaaagatacctatgatgcgctccacatgcaggccctgccgccaaga

SEQ ID NO: 5807 - DNA, 3450 bp, Artificial Sequence
  Synthetic Polynucloetide
atggccttaccagtgaccgccttgctcctgccgctggccttgctgctccacgccgccaggccggaagtgcaactggtggaatctggaggctctctggtgcagccagggggaagcctgagactgtcttgtgccgcttccggcttcaccttcgacgactacgccatgagctgggtgcgccaggtgccaggcaaaggcctggaatgggtgtccagcatcaactggagcggcacccacaccgattacgccgactccgtgaaaggcagattcacaatcagcagaaacaacgccaacaataccctgtacctgcagatgaactccctgaagtctgaggatacagcagtgtattattgcgccaagaactggcgggacgccggcaccacttggtttgagaaaagcggctctgccggacagggaacccaagtgacagtgtcctccggtaccggcggaggcggatctggcggcggaggtagcggtggcggaggatctgaattcgacatccagatgacacagagccctagcagcctgtctgccagcgtgggagacagagtgaccatcacatgcaaggccagcgaccacatcaacaactggctggcctggtatcagcagaagcctggacaggcccctaagctgctgatctacggcgctaccacactggaaacaggcgtgcccagcagattttctggcagcggctctggcaccgactacaccctgacaatatccagcctccagcctgaggacttcgccacctactactgtcagcagagctggaacaccccttggacattcggccagggcaccaagctggaaatcaagagactcgaggggaaaccaattcccaaccctcttctgggactggattcaaccggcagcggcgaggacctgaagaacgtgttcccacctgaggtggccgtgttcgagcctagcgaggccgagatcagccacacccagaaagccaccctcgtgtgcctggctaccggcttctaccccgaccatgtggaactgtcttggtgggtcaacggcaaagaggtgcacagcggcgtgtctaccgacccccagccactgaaagaacagcccgccctgaacgacagccggtactgcctgagcagcagactgagagtgtccgccaccttctggcagaacccccggaaccacttcagatgccaggtgcagttctacggcctgagcgagaacgacgagtggacccaggacagagccaagcccgtgacccagatcgtgtctgccgaagcctggggcagagccgattgcggatcccagagcttcggcctgctggaccccaagctgtgctacctgctggatggcatcctgttcatctacggcgtgatcctgaccgccctgttcctgaggagtaagaggagcaggctcctgcacagtgactacatgaacatgactccacgccgccccggacccacccgcaagcattaccagccctatgccccaccacgcgacttcgcagcctatcgctccagagtgaagttcagcagaagcgccgacgcccctgcctaccagcagggacagaaccaactgtacaacgagctgaacctgggcagacgggaagagtacgacgtgctggacaagcggagaggcagggaccctgagatgggcggaaagccccagcggagaaagaacccccaggaaggactgtataacgaactccagaaagacaagatggccgaagcctacagcgagatcggcatgaagggcgagcggagaagaggcaagggccacgatggcctgtaccagggcctgagcaccgccaccaaggacacctatgacgccctgcacatgcaggccctgcctccaagaagggccaagcgatctggatctggagcaacaaacttctcactactcaaacaagcaggtgacgtggaggagaatcccgggcctactagtatggactggatttggcgcatccttttccttgtcggcgctgctaccggcgcccattccgggcccgtggacaacaagttcaacaaagagcggtacagcgcctactacgagatttggcaactgcccaacctgaacgtgcggcagaaggccgccttcatcggatctctgcaggacgaccctagccagagcgccaatctgctggccgaggccaagaagctgaacgacgcccaggcccctaaaggatccggcggcggaggatctggcggaggcggatctgggggcggaggctctttcgaacaagttcagcttcaacagcctggcgctgagctggtcaaacctggcgcttctgtgaagatgagctgcaaagccagcggctacgccttcagcagctactggatcaactggatgaagcagaaacccggccagggactcgaatggatcggccaaatctatcccggcgacggcgacaccaactacaacggcaagttcaagggcagagccacactgaccgccgatacctctagcagcacagcctacatgcagctgagcagcctgaccagcgaagatagcgccgtgtacttctgtgcccggtccatcacaacagtcgtgggctgcgctatggactattggggccagggaacaagcgtgaccgtgtctagtacgcgtgagcagaaactgatctcggaagaggatgggagcggcatccagaaccctgatcctgccgtgtaccagctgcgggatagcaagagcagcgacaagagcgtgtgtctgttcaccgacttcgacagccagaccaacgtgtcccagagcaaggactccgacgtgtacatcaccgataagaccgtgctggacatgcggagcatggacttcaagagcaactccgccgtggcctggtccaacaagtccgatttcgcctgcgccaacgccttcaacaacagcattatccccgaggacacattcttcccaagccccgagagcagctgcggtacccagagttttgggttgttggaccctaaattgtgctatctgttggacggaatcctgttcatttacggagtgatcctgaccgcattgttcctgaggagcaagcggtcacggctgctccacagcgattacatgaatatgacaccacgaagaccgggtcctactcgcaaacactaccaaccctacgcacctccccgcgactttgcagcgtaccgatctcgggttaagttttccagatccgcagacgcacccgcttaccaacaagggcagaaccaactctacaatgaacttaatttggggcggagggaagagtacgacgttctggacaaaaggaggggacgagatcccgagatgggcggaaagcctcagcgaaggaagaatccgcaagaggggctttataacgaactccagaaagataaaatggcagaagcctatagtgagattgggatgaagggagaaaggaggaggggtaaaggtcacgatgggttgtaccaaggattgagcacagccactaaagatacctatgatgcgctccacatgcaggccctgccgccaaga

SEQ ID NO: 5808 - DNA, 3333 bp, Artificial Sequence
  Synthetic Polynucloetide
atggccttaccagtgaccgccttgctcctgccgctggccttgctgctccacgccgccaggccggaagtgcaactggtggaatctggaggctctctggtgcagccagggggaagcctgagactgtcttgtgccgcttccggcttcaccttcgacgactacgccatgagctgggtgcgccaggtgccaggcaaaggcctggaatgggtgtccagcatcaactggagcggcacccacaccgattacgccgactccgtgaaaggcagattcacaatcagcagaaacaacgccaacaataccctgtacctgcagatgaactccctgaagtctgaggatacagcagtgtattattgcgccaagaactggcgggacgccggcaccacttggtttgagaaaagcggctctgccggacagggaacccaagtgacagtgtcctccggtaccggcggaggcggatctggcggcggaggtagcggtggcggaggatctgaattcgacatccagatgacacagagccctagcagcctgtctgccagcgtgggagacagagtgaccatcacatgcaaggccagcgaccacatcaacaactggctggcctggtatcagcagaagcctggacaggcccctaagctgctgatctacggcgctaccacactggaaacaggcgtgcccagcagattttctggcagcggctctggcaccgactacaccctgacaatatccagcctccagcctgaggacttcgccacctactactgtcagcagagctggaacaccccttggacattcggccagggcaccaagctggaaatcaagagactcgaggggaaaccaattcccaaccctcttctgggactggattcaaccggcagcggcgaggacctgaagaacgtgttcccacctgaggtggccgtgttcgagcctagcgaggccgagatcagccacacccagaaagccaccctcgtgtgcctggctaccggcttctaccccgaccatgtggaactgtcttggtgggtcaacggcaaagaggtgcacagcggcgtgtctaccgacccccagccactgaaagaacagcccgccctgaacgacagccggtactgcctgagcagcagactgagagtgtccgccaccttctggcagaacccccggaaccacttcagatgccaggtgcagttctacggcctgagcgagaacgacgagtggacccaggacagagccaagcccgtgacccagatcgtgtctgccgaagcctggggcagagccgattgcggatcccagagcttcggcctgctggaccccaagctgtgctacctgctggatggcatcctgttcatctacggcgtgatcctgaccgccctgttcctgagagtgaagttcagcagaagcgccgacgcccctgcctaccagcagggacagaaccaactgtacaacgagctgaacctgggcagacgggaagagtacgacgtgctggacaagcggagaggcagggaccctgagatgggcggaaagccccagcggagaaagaacccccaggaaggactgtataacgaactccagaaagacaagatggccgaagcctacagcgagatcggcatgaagggcgagcggagaagaggcaagggccacgatggcctgtaccagggcctgagcaccgccaccaaggacacctatgacgccctgcacatgcaggccctgcctccaagaagggccaagcgatctggatctggagcaacaaacttctcactactcaaacaagcaggtgacgtggaggagaatcccgggcctactagtatggactggatttggcgcatccttttccttgtcggcgctgctaccggcgcccattccgggcccgtggacaacaagttcaacaaagagcggtacagcgcctactacgagatttggcaactgcccaacctgaacgtgcggcagaaggccgccttcatcggatctctgcaggacgaccctagccagagcgccaatctgctggccgaggccaagaagctgaacgacgcccaggcccctaaaggatccggcggcggaggatctggcggaggcggatctgggggcggaggctctttcgaacaagttcagcttcaacagcctggcgctgagctggtcaaacctggcgcttctgtgaagatgagctgcaaagccagcggctacgccttcagcagctactggatcaactggatgaagcagaaacccggccagggactcgaatggatcggccaaatctatcccggcgacggcgacaccaactacaacggcaagttcaagggcagagccacactgaccgccgatacctctagcagcacagcctacatgcagctgagcagcctgaccagcgaagatagcgccgtgtacttctgtgcccggtccatcacaacagtcgtgggctgcgctatggactattggggccagggaacaagcgtgaccgtgtctagtacgcgtgagcagaaactgatctcggaagaggatctggggagcggcatccagaaccctgatcctgccgtgtaccagctgcgggatagcaagagcagcgacaagagcgtgtgtctgttcaccgacttcgacagccagaccaacgtgtcccagagcaaggactccgacgtgtacatcaccgataagaccgtgctggacatgcggagcatggacttcaagagcaactccgccgtggcctggtccaacaagtccgatttcgcctgcgccaacgccttcaacaacagcattatccccgaggacacattcttcccaagccccgagagcagctgcggtacccagagttttgggttgttggaccctaaattgtgctatctgttggacggaatcctgttcatttacggagtgatcctgaccgcattgttcctgaagagaggccggaagaagctgctgtacatcttcaagcagcctttcatgcggcccgtgcagaccacccaggaagaggacggctgctcctgccggttccccgaggaagaagaaggcggctgcgagctgcgggttaagttttccagatccgcagacgcacccgcttaccaacaagggcagaaccaactctacaatgaacttaatttggggcggagggaagagtacgacgttctggacaaaaggaggggacgagatcccgagatgggcggaaagcctcagcgaaggaagaatccgcaagaggggctttataacgaactccagaaagataaaatggcagaagcctatagtgagattgggatgaagggagaaaggaggaggggtaaaggtcacgatgggttgtaccaaggattgagcacagccactaaagatacctatgatgcgctccacatgcaggccctgccgccaaga

SEQ ID NO: 5809 - DNA, 3459 bp, Artificial Sequence
  Synthetic Polynucloetide
atggccttaccagtgaccgccttgctcctgccgctggccttgctgctccacgccgccaggccggaagtgcaactggtggaatctggaggctctctggtgcagccagggggaagcctgagactgtcttgtgccgcttccggcttcaccttcgacgactacgccatgagctgggtgcgccaggtgccaggcaaaggcctggaatgggtgtccagcatcaactggagcggcacccacaccgattacgccgactccgtgaaaggcagattcacaatcagcagaaacaacgccaacaataccctgtacctgcagatgaactccctgaagtctgaggatacagcagtgtattattgcgccaagaactggcgggacgccggcaccacttggtttgagaaaagcggctctgccggacagggaacccaagtgacagtgtcctccggtaccggcggaggcggatctggcggcggaggtagcggtggcggaggatctgaattcgacatccagatgacacagagccctagcagcctgtctgccagcgtgggagacagagtgaccatcacatgcaaggccagcgaccacatcaacaactggctggcctggtatcagcagaagcctggacaggcccctaagctgctgatctacggcgctaccacactggaaacaggcgtgcccagcagattttctggcagcggctctggcaccgactacaccctgacaatatccagcctccagcctgaggacttcgccacctactactgtcagcagagctggaacaccccttggacattcggccagggcaccaagctggaaatcaagagactcgaggggaaaccaattcccaaccctcttctgggactggattcaaccggcagcggcgaggacctgaagaacgtgttcccacctgaggtggccgtgttcgagcctagcgaggccgagatcagccacacccagaaagccaccctcgtgtgcctggctaccggcttctaccccgaccatgtggaactgtcttggtgggtcaacggcaaagaggtgcacagcggcgtgtctaccgacccccagccactgaaagaacagcccgccctgaacgacagccggtactgcctgagcagcagactgagagtgtccgccaccttctggcagaacccccggaaccacttcagatgccaggtgcagttctacggcctgagcgagaacgacgagtggacccaggacagagccaagcccgtgacccagatcgtgtctgccgaagcctggggcagagccgattgcggatcccagagcttcggcctgctggaccccaagctgtgctacctgctggatggcatcctgttcatctacggcgtgatcctgaccgccctgttcctgaaacggggcagaaagaaactcctgtatatattcaaacaaccatttatgagaccagtacaaactactcaagaggaagatggctgtagctgccgatttccagaagaagaagaaggaggatgtgaactgagagtgaagttcagcagaagcgccgacgcccctgcctaccagcagggacagaaccaactgtacaacgagctgaacctgggcagacgggaagagtacgacgtgctggacaagcggagaggcagggaccctgagatgggcggaaagccccagcggagaaagaacccccaggaaggactgtataacgaactccagaaagacaagatggccgaagcctacagcgagatcggcatgaagggcgagcggagaagaggcaagggccacgatggcctgtaccagggcctgagcaccgccaccaaggacacctatgacgccctgcacatgcaggccctgcctccaagaagggccaagcgatctggatctggagcaacaaacttctcactactcaaacaagcaggtgacgtggaggagaatcccgggcctactagtatggactggatttggcgcatccttttccttgtcggcgctgctaccggcgcccattccgggcccgtggacaacaagttcaacaaagagcggtacagcgcctactacgagatttggcaactgcccaacctgaacgtgcggcagaaggccgccttcatcggatctctgcaggacgaccctagccagagcgccaatctgctggccgaggccaagaagctgaacgacgcccaggcccctaaaggatccggcggcggaggatctggcggaggcggatctgggggcggaggctctttcgaacaagttcagcttcaacagcctggcgctgagctggtcaaacctggcgcttctgtgaagatgagctgcaaagccagcggctacgccttcagcagctactggatcaactggatgaagcagaaacccggccagggactcgaatggatcggccaaatctatcccggcgacggcgacaccaactacaacggcaagttcaagggcagagccacactgaccgccgatacctctagcagcacagcctacatgcagctgagcagcctgaccagcgaagatagcgccgtgtacttctgtgcccggtccatcacaacagtcgtgggctgcgctatggactattggggccagggaacaagcgtgaccgtgtctagtacgcgtgagcagaaactgatctcggaagaggatctggggagcggcatccagaaccctgatcctgccgtgtaccagctgcgggatagcaagagcagcgacaagagcgtgtgtctgttcaccgacttcgacagccagaccaacgtgtcccagagcaaggactccgacgtgtacatcaccgataagaccgtgctggacatgcggagcatggacttcaagagcaactccgccgtggcctggtccaacaagtccgatttcgcctgcgccaacgccttcaacaacagcattatccccgaggacacattcttcccaagccccgagagcagctgcggtacccagagttttgggttgttggaccctaaattgtgctatctgttggacggaatcctgttcatttacggagtgatcctgaccgcattgttcctgaagagaggccggaagaagctgctgtacatcttcaagcagcctttcatgcggcccgtgcagaccacccaggaagaggacggctgctcctgccggttccccgaggaagaagaaggcggctgcgagctgcgggttaagttttccagatccgcagacgcacccgcttaccaacaagggcagaaccaactctacaatgaacttaatttggggcggagggaagagtacgacgttctggacaaaaggaggggacgagatcccgagatgggcggaaagcctcagcgaaggaagaatccgcaagaggggctttataacgaactccagaaagataaaatggcagaagcctatagtgagattgggatgaagggagaaaggaggaggggtaaaggtcacgatgggttgtaccaaggattgagcacagccactaaagatacctatgatgcgctccacatgcaggccctgccgccaaga

SEQ ID NO: 5810 - DNA, 3132 bp, Artificial Sequence
  Synthetic Polynucloetide
atggccttaccagtgaccgccttgctcctgccgctggccttgctgctccacgccgccaggccggaagtgcaactggtggaatctggaggctctctggtgcagccagggggaagcctgagactgtcttgtgccgcttccggcttcaccttcgacgactacgccatgagctgggtgcgccaggtgccaggcaaaggcctggaatgggtgtccagcatcaactggagcggcacccacaccgattacgccgactccgtgaaaggcagattcacaatcagcagaaacaacgccaacaataccctgtacctgcagatgaactccctgaagtctgaggatacagcagtgtattattgcgccaagaactggcgggacgccggcaccacttggtttgagaaaagcggctctgccggacagggaacccaagtgacagtgtcctccggtaccggcggaggcggatctggcggcggaggtagcggtggcggaggatctgaattcgacatccagatgacacagagccctagcagcctgtctgccagcgtgggagacagagtgaccatcacatgcaaggccagcgaccacatcaacaactggctggcctggtatcagcagaagcctggacaggcccctaagctgctgatctacggcgctaccacactggaaacaggcgtgcccagcagattttctggcagcggctctggcaccgactacaccctgacaatatccagcctccagcctgaggacttcgccacctactactgtcagcagagctggaacaccccttggacattcggccagggcaccaagctggaaatcaagagactcgagcagagcttcggcctgctggaccccaagctgtgctacctgctggatggcatcctgttcatctacggcgtgatcctgaccgccctgttcctgagagtgaagttcagcagaagcgccgacgcccctgcctaccagcagggacagaaccaactgtacaacgagctgaacctgggcagacgggaagagtacgacgtgctggacaagcggagaggcagggaccctgagatgggcggaaagccccagcggagaaagaacccccaggaaggactgtataacgaactccagaaagacaagatggccgaagcctacagcgagatcggcatgaagggcgagcggagaagaggcaagggccacgatggcctgtaccagggcctgagcaccgccaccaaggacacctatgacgccctgcacatgcaggccctgcctccaagaagggccaagcgatctggatctggagcaacaaacttctcactactcaaacaagcaggtgacgtggaggagaatcccgggcctactagtatggactggatttggcgcatccttttccttgtcggcgctgctaccggcgcccattccgggcccgtggacaacaagttcaacaaagagcggtacagcgcctactacgagatttggcaactgcccaacctgaacgtgcggcagaaggccgccttcatcggatctctgcaggacgaccctagccagagcgccaatctgctggccgaggccaagaagctgaacgacgcccaggcccctaaaggatccggcggcggaggatctggcggaggcggatctgggggcggaggctctttcgaacaagttcagcttcaacagcctggcgctgagctggtcaaacctggcgcttctgtgaagatgagctgcaaagccagcggctacgccttcagcagctactggatcaactggatgaagcagaaacccggccagggactcgaatggatcggccaaatctatcccggcgacggcgacaccaactacaacggcaagttcaagggcagagccacactgaccgccgatacctctagcagcacagcctacatgcagctgagcagcctgaccagcgaagatagcgccgtgtacttctgtgcccggtccatcacaacagtcgtgggctgcgctatggactattggggccagggaacaagcgtgaccgtgtctagtacgcgtcagagttttgggttgttggaccctaaattgtgctatctgttggacggaatcctgttcatttacggagtgatcctgaccgcattgttcctgcgggttaagttttccagatccgcagacgcacccgcttaccaacaagggcagaaccaactctacaatgaacttaatttggggcggagggaagagtacgacgttctggacaaaaggaggggacgagatcccgagatgggcggaaagcctcagcgaaggaagaatccgcaagaggggctttataacgaactccagaaagataaaatggcagaagcctatagtgagattgggatgaagggagaaaggaggaggggtaaaggtcacgatgggttgtaccaaggattgagcacagccactaaagatacctatgatgcgctccacatgcaggccctgccgccaagacgcgccaagagaagcggatctggcgtgaagcagaccctgaatttcgacctgctgaagctggctggcgacgtggaatccaacccaggcccttctagaggccatatgaccgagtacaagcccacggtgcgcctcgccacccgcgacgacgtccccagggccgtacgcaccctcgccgccgcgttcgccgactaccccgccacgcgccacaccgtcgatccggaccgccacatcgagcgggtcaccgagctgcaagaactcttcctcacgcgcgtcgggctcgacatcggcaaggtgtgggtcgcggacgacggcgccgcggtggcggtctggaccacgccggagagcgtcgaagcgggggcggtgttcgccgagatcggcccgcgcatggccgagttgagcggttcccggctggccgcgcagcaacagatggaaggcctcctggcgccgcaccggcccaaggagcccgcgtggttcctggccaccgtcggcgtctcgcccgaccaccagggcaagggtctgggcagcgccgtcgtgctccccggagtggaggcggccgagcgcgccggggtgcccgccttcctggagacctccgcgccccgcaacctccccttctacgagcggctcggcttcaccgtcaccgccgacgtcgaggtgcccgaaggaccgcgcacctggtgcatgacccgcaagcccggtgcctga

SEQ ID NO: 5811 - DNA, 2604 bp, Artificial Sequence
  Synthetic Polynucloetide
atggccttaccagtgaccgccttgctcctgccgctggccttgctgctccacgccgccaggccggaagtgcaactggtggaatctggaggctctctggtgcagccagggggaagcctgagactgtcttgtgccgcttccggcttcaccttcgacgactacgccatgagctgggtgcgccaggtgccaggcaaaggcctggaatgggtgtccagcatcaactggagcggcacccacaccgattacgccgactccgtgaaaggcagattcacaatcagcagaaacaacgccaacaataccctgtacctgcagatgaactccctgaagtctgaggatacagcagtgtattattgcgccaagaactggcgggacgccggcaccacttggtttgagaaaagcggctctgccggacagggaacccaagtgacagtgtcctccggtaccggcggaggcggatctggcggcggaggtagcggtggcggaggatctgaattcgacatccagatgacacagagccctagcagcctgtctgccagcgtgggagacagagtgaccatcacatgcaaggccagcgaccacatcaacaactggctggcctggtatcagcagaagcctggacaggcccctaagctgctgatctacggcgctaccacactggaaacaggcgtgcccagcagattttctggcagcggctctggcaccgactacaccctgacaatatccagcctccagcctgaggacttcgccacctactactgtcagcagagctggaacaccccttggacattcggccagggcaccaagctggaaatcaagagactcgagggacagcctaaggccaatcctaccgtgacactgttccctccaagcagcgaagaactccaggccaacaaggccacacttgtgtgcctgatctccgacttctaccctggggctgtgacagtggcttggaaggccgatggatctcctgtgaaagccggcgtggaaaccaccaagccatccaagcagagcaacaacaaatacgccgccagctcctacctgagcctgacacctgagcagtggaagtcccacagatcctacagctgccaagtgacccacgaaggcagcaccgtggaaaagacagtggcccctacagagtgcagccccatcaagaccgatgtgattacaatggaccccaaggacaactgctccaaggacgccaacgataccctgctgctccagctgaccaacaccagcgcctactacatgtacttgttgctgctgctgaagtccgtggtgtacttcgccatcatcacatgctgcctgctgcggagaaccgccttctgctgcaacggcgagaagtctagggccaagcgatctggatctggagcaacaaacttctcactactcaaacaagcaggtgacgtggaggagaatcccgggcctactagtatggactggatttggcgcatccttttccttgtcggcgctgctaccggcgcccattccgggcccgtggacaacaagttcaacaaagagcggtacagcgcctactacgagatttggcaactgcccaacctgaacgtgcggcagaaggccgccttcatcggatctctgcaggacgaccctagccagagcgccaatctgctggccgaggccaagaagctgaacgacgcccaggcccctaaaggatccggcggcggaggatctggcggaggcggatctgggggcggaggctctttcgaacaagttcagcttcaacagcctggcgctgagctggtcaaacctggcgcttctgtgaagatgagctgcaaagccagcggctacgccttcagcagctactggatcaactggatgaagcagaaacccggccagggactcgaatggatcggccaaatctatcccggcgacggcgacaccaactacaacggcaagttcaagggcagagccacactgaccgccgatacctctagcagcacagcctacatgcagctgagcagcctgaccagcgaagatagcgccgtgtacttctgtgcccggtccatcacaacagtcgtgggctgcgctatggactattggggccagggaacaagcgtgaccgtgtctagtacgcgtgcctctacaaagggaccctccgtgtttcctctggctcccagcagcaagtctacaagcggaggaacagccgctctgggctgcctggtcaaggattactttcccgagcctgtgaccgtgtcctggaatagcggagcactgacaagcggcgtgcacacctttccagccgtgctgcaaagcagcggcctgtactctctgagcagcgtggtcacagtgcctagctctagcctgggcacccagacctacatctgcaatgtgaaccacaagcctagcaacaccaaggtggacaagagagtggaacccaagagctgtgaagtgaaaaccgactccaccgaccacgtgaagcccaaagagacagagaacaccaagcagcccagcaagagctgccacaagcccaaggccatcgtgcacaccgagaaagtgaacatgatgagcctgaccgtgctgggcctgcggatgctgttcgccaaaaccgtggccgtgaacttcctgctgaccgccaagctgttcttcctc

SEQ ID NO: 5812 - DNA, 2538 bp, Artificial Sequence
  Synthetic Polynucloetide
atggccttaccagtgaccgccttgctcctgccgctggccttgctgctccacgccgccaggccggaagtgcaactggtggaatctggaggctctctggtgcagccagggggaagcctgagactgtcttgtgccgcttccggcttcaccttcgacgactacgccatgagctgggtgcgccaggtgccaggcaaaggcctggaatgggtgtccagcatcaactggagcggcacccacaccgattacgccgactccgtgaaaggcagattcacaatcagcagaaacaacgccaacaataccctgtacctgcagatgaactccctgaagtctgaggatacagcagtgtattattgcgccaagaactggcgggacgccggcaccacttggtttgagaaaagcggctctgccggacagggaacccaagtgacagtgtcctccggtaccggcggaggcggatctggcggcggaggtagcggtggcggaggatctgaattcgacatccagatgacacagagccctagcagcctgtctgccagcgtgggagacagagtgaccatcacatgcaaggccagcgaccacatcaacaactggctggcctggtatcagcagaagcctggacaggcccctaagctgctgatctacggcgctaccacactggaaacaggcgtgcccagcagattttctggcagcggctctggcaccgactacaccctgacaatatccagcctccagcctgaggacttcgccacctactactgtcagcagagctggaacaccccttggacattcggccagggcaccaagctggaaatcaagagactcgagggacagcctaaggccaatcctaccgtgacactgttccctccaagcagcgaagaactccaggccaacaaggccacacttgtgtgcctgatctccgacttctaccctggggctgtgacagtggcttggaaggccgatggatctcctgtgaaagccggcgtggaaaccaccaagccatccaagcagagcaacaacaaatacgccgccagctcctacctgagcctgacacctgagcagtggaagtcccacagatcctacagctgccaagtgacccacgaaggcagcaccgtggaaaagacagtggcccctacagagtgcagcggcagagccgattgcggcatcaccagcgccagctaccaccagggcgtgctgagcgccaccatcctgtacgagatcctgctgggcaaggccaccctgtacgccgtgctggtgtctgccctggtgctgatggctatggtcaagcggaaggacagccggggaagggccaagcgatctggatctggagcaacaaacttctcactactcaaacaagcaggtgacgtggaggagaatcccgggcctactagtatggactggatttggcgcatccttttccttgtcggcgctgctaccggcgcccattccgggcccgtggacaacaagttcaacaaagagcggtacagcgcctactacgagatttggcaactgcccaacctgaacgtgcggcagaaggccgccttcatcggatctctgcaggacgaccctagccagagcgccaatctgctggccgaggccaagaagctgaacgacgcccaggcccctaaaggatccggcggcggaggatctggcggaggcggatctgggggcggaggctctttcgaacaagttcagcttcaacagcctggcgctgagctggtcaaacctggcgcttctgtgaagatgagctgcaaagccagcggctacgccttcagcagctactggatcaactggatgaagcagaaacccggccagggactcgaatggatcggccaaatctatcccggcgacggcgacaccaactacaacggcaagttcaagggcagagccacactgaccgccgatacctctagcagcacagcctacatgcagctgagcagcctgaccagcgaagatagcgccgtgtacttctgtgcccggtccatcacaacagtcgtgggctgcgctatggactattggggccagggaacaagcgtgaccgtgtctagtacgcgtgcctctacaaagggaccctccgtgtttcctctggctcccagcagcaagtctacaagcggaggaacagccgctctgggctgcctggtcaaggattactttcccgagcctgtgaccgtgtcctggaatagcggagcactgacaagcggcgtgcacacctttccagccgtgctgcaaagcagcggcctgtactctctgagcagcgtggtcacagtgcctagctctagcctgggcacccagacctacatctgcaatgtgaaccacaagcctagcaacaccaaggtggacaagagagtggaacccaagagctgtatccccgaggacacattcttcccaagcagcgacgtgccctgcgacgtgaagctggtggaaaagagcttcgagacagacaccaacctgaacttccagaacctgagcgtgatcggcttcagaatcctgctgctgaaagtggccggctttaacctgctgatgaccctgcggctgtggtccagc

SEQ ID NO: 5813 - DNA, 2538 bp, Artificial Sequence
  Synthetic Polynucloetide
atggccttaccagtgaccgccttgctcctgccgctggccttgctgctccacgccgccaggccggaagtgcaactggtggaatctggaggctctctggtgcagccagggggaagcctgagactgtcttgtgccgcttccggcttcaccttcgacgactacgccatgagctgggtgcgccaggtgccaggcaaaggcctggaatgggtgtccagcatcaactggagcggcacccacaccgattacgccgactccgtgaaaggcagattcacaatcagcagaaacaacgccaacaataccctgtacctgcagatgaactccctgaagtctgaggatacagcagtgtattattgcgccaagaactggcgggacgccggcaccacttggtttgagaaaagcggctctgccggacagggaacccaagtgacagtgtcctccggtaccggcggaggcggatctggcggcggaggtagcggtggcggaggatctgaattcgacatccagatgacacagagccctagcagcctgtctgccagcgtgggagacagagtgaccatcacatgcaaggccagcgaccacatcaacaactggctggcctggtatcagcagaagcctggacaggcccctaagctgctgatctacggcgctaccacactggaaacaggcgtgcccagcagattttctggcagcggctctggcaccgactacaccctgacaatatccagcctccagcctgaggacttcgccacctactactgtcagcagagctggaacaccccttggacattcggccagggcaccaagctggaaatcaagagactcgagggacagcctaaggccaatcctaccgtgacactgttccctccaagcagcgaagaactccaggccaacaaggccacacttgtgtgcctgatctccgacttctaccctggggctgtgacagtggcttggaaggccgatggatctcctgtgaaagccggcgtggaaaccaccaagccatccaagcagagcaacaacaaatacgccgccagctcctacctgagcctgacacctgagcagtggaagtcccacagatcctacagctgccaagtgacccacgaaggcagcaccgtggaaaagacagtggcccctacagagtgcagcggcagagccgattgcggctttaccagcgagagctaccagcagggcgtgctgagcgccaccatcctgtacgagatcctgctgggcaaggccaccctgtacgccgtgctggtgtctgccctggtgctgatggctatggtcaagcggaaggacagccggggaagggccaagcgatctggatctggagcaacaaacttctcactactcaaacaagcaggtgacgtggaggagaatcccgggcctactagtatggactggatttggcgcatccttttccttgtcggcgctgctaccggcgcccattccgggcccgtggacaacaagttcaacaaagagcggtacagcgcctactacgagatttggcaactgcccaacctgaacgtgcggcagaaggccgccttcatcggatctctgcaggacgaccctagccagagcgccaatctgctggccgaggccaagaagctgaacgacgcccaggcccctaaaggatccggcggcggaggatctggcggaggcggatctgggggcggaggctctttcgaacaagttcagcttcaacagcctggcgctgagctggtcaaacctggcgcttctgtgaagatgagctgcaaagccagcggctacgccttcagcagctactggatcaactggatgaagcagaaacccggccagggactcgaatggatcggccaaatctatcccggcgacggcgacaccaactacaacggcaagttcaagggcagagccacactgaccgccgatacctctagcagcacagcctacatgcagctgagcagcctgaccagcgaagatagcgccgtgtacttctgtgcccggtccatcacaacagtcgtgggctgcgctatggactattggggccagggaacaagcgtgaccgtgtctagtacgcgtgcctctacaaagggaccctccgtgtttcctctggctcccagcagcaagtctacaagcggaggaacagccgctctgggctgcctggtcaaggattactttcccgagcctgtgaccgtgtcctggaatagcggagcactgacaagcggcgtgcacacctttccagccgtgctgcaaagcagcggcctgtactctctgagcagcgtggtcacagtgcctagctctagcctgggcacccagacctacatctgcaatgtgaaccacaagcctagcaacaccaaggtggacaagagagtggaacccaagagctgtatccccgaggacacattcttcccaagccccgagagcagctgcgacgtgaagctggtggaaaagagcttcgagacagacaccaacctgaacttccagaacctgagcgtgatcggcttcagaatcctgctgctgaaagtggccggctttaacctgctgatgaccctgcggctgtggtccagc

SEQ ID NO: 5814 - DNA, 2316 bp, Artificial Sequence
  Synthetic Polynucloetide
atggccttaccagtgaccgccttgctcctgccgctggccttgctgctccacgccgccaggccggaggtgcaactggtggaaagcggcggaggctctgtgcagacaggcggctctctgagactgacctgtgccgccagcggcagaaccagcagatcctatggcatgggctggttcagacaggcccctggcaaagaacgcgagttcgtgtccggcatctcttggagaggcgacagcaccggctacgccgatagcgtgaagggccggttcaccatcagccgggacaacgccaagaacaccgtggacctgcagatgaacagcctgaagcccgaggacaccgccatctactactgtgccgctgccgccggatctgcttggtacggcacactgtacgagtacgactactggggccagggcacccttgtgaccgtgtcatctggcggaggaagcggcggaggatctgaagtgcaactggtggaatctggaggctctctggtgcagccagggggaagcctgagactgtcttgtgccgcttccggcttcaccttcgacgactacgccatgagctgggtgcgccaggtgccaggcaaaggcctggaatgggtgtccagcatcaactggagcggcacccacaccgattacgccgactccgtgaaaggcagattcacaatcagcagaaacaacgccaacaataccctgtacctgcagatgaactccctgaagtctgaggatacagcagtgtattattgcgccaagaactggcgggacgccggcaccacttggtttgagaaaagcggctctgccggacagggaacccaagtgacagtgtcctccggtaccggcggaggcggatctggcggcggaggtagcggtggcggaggatctgaattcgacatccagatgacacagagccctagcagcctgtctgccagcgtgggagacagagtgaccatcacatgcaaggccagcgaccacatcaacaactggctggcctggtatcagcagaagcctggacaggcccctaagctgctgatctacggcgctaccacactggaaacaggcgtgcccagcagattttctggcagcggctctggcaccgactacaccctgacaatatccagcctccagcctgaggacttcgccacctactactgtcagcagagctggaacaccccttggacattcggccagggcaccaagctggaaatcaagagaggcggaggcggaagtggaggcggaggatctggcggcggaggctctcaagttcagcttcaacagcctggcgctgagctggtcaaacctggcgcttctgtgaagatgagctgcaaagccagcggctacgccttcagcagctactggatcaactggatgaagcagaaacccggccagggactcgaatggatcggccaaatctatcccggcgacggcgacaccaactacaacggcaagttcaagggcagagccacactgaccgccgatacctctagcagcacagcctacatgcagctgagcagcctgaccagcgaagatagcgccgtgtacttctgtgcccggtccatcacaacagtcgtgggctgcgctatggactattggggccagggaacaagcgtgaccgtgtctagtacgcgtgagcagaaactgatctcggaagaggatctgaaaattgaagttatgtatcctcctccttacctagacaatgagaagagcaatggaaccattatccatgtgaaagggaaacacctttgtccaagtcccctatttcccggaccttctaagcccttttgggtgctggtggtggttgggggagtcctggcttgctatagcttgctagtaacagtggcctttattattttctgggtgaggagtaagaggagcaggctcctgcacagtgactacatgaacatgactccacgccgccccggacccacccgcaagcattaccagccctatgccccaccacgcgacttcgcagcctatcgctccagagtgaagttcagcaggagcgcagacgcccccgcgtaccagcagggccagaaccagctctataacgagctcaatctaggacgaagagaggagtacgatgttttggacaagagacgtggccgggaccctgagatggggggaaagccgagaaggaagaaccctcaggaaggcctgtacaatgaactgcagaaagataagatggcggaggcctacagtgagattgggatgaaaggcgagcgccggaggggcaaggggcacgatggcctttaccagggtctcagtacagccaccaaggacacctacgacgcccttcacatgcaggccctgccccctcgc

SEQ ID NO: 5815 - DNA, 2337 bp, Artificial Sequence
  Synthetic Polynucloetide
atggccttaccagtgaccgccttgctcctgccgctggccttgctgctccacgccgccaggccggaggtgcaactggtggaaagcggcggaggctctgtgcagacaggcggctctctgagactgacctgtgccgccagcggcagaaccagcagatcctatggcatgggctggttcagacaggcccctggcaaagaacgcgagttcgtgtccggcatctcttggagaggcgacagcaccggctacgccgatagcgtgaagggccggttcaccatcagccgggacaacgccaagaacaccgtggacctgcagatgaacagcctgaagcccgaggacaccgccatctactactgtgccgctgccgccggatctgcttggtacggcacactgtacgagtacgactactggggccagggcacccttgtgaccgtgtcatctggcggaggaagcggcggaggatctgaagtgcaactggtggaatctggaggctctctggtgcagccagggggaagcctgagactgtcttgtgccgcttccggcttcaccttcgacgactacgccatgagctgggtgcgccaggtgccaggcaaaggcctggaatgggtgtccagcatcaactggagcggcacccacaccgattacgccgactccgtgaaaggcagattcacaatcagcagaaacaacgccaacaataccctgtacctgcagatgaactccctgaagtctgaggatacagcagtgtattattgcgccaagaactggcgggacgccggcaccacttggtttgagaaaagcggctctgccggacagggaacccaagtgacagtgtcctccggtaccggcggaggcggatctggcggcggaggtagcggtggcggaggatctgaattcgacatccagatgacacagagccctagcagcctgtctgccagcgtgggagacagagtgaccatcacatgcaaggccagcgaccacatcaacaactggctggcctggtatcagcagaagcctggacaggcccctaagctgctgatctacggcgctaccacactggaaacaggcgtgcccagcagattttctggcagcggctctggcaccgactacaccctgacaatatccagcctccagcctgaggacttcgccacctactactgtcagcagagctggaacaccccttggacattcggccagggcaccaagctggaaatcaagagaggcggaggcggaagtggaggcggaggatctggcggcggaggctctcaagttcagcttcaacagcctggcgctgagctggtcaaacctggcgcttctgtgaagatgagctgcaaagccagcggctacgccttcagcagctactggatcaactggatgaagcagaaacccggccagggactcgaatggatcggccaaatctatcccggcgacggcgacaccaactacaacggcaagttcaagggcagagccacactgaccgccgatacctctagcagcacagcctacatgcagctgagcagcctgaccagcgaagatagcgccgtgtacttctgtgcccggtccatcacaacagtcgtgggctgcgctatggactattggggccagggaacaagcgtgaccgtgtctagtacgcgtgagcagaaactgatctcggaagaggatctggcgaagcccaccacgacgccagcgccgcgaccaccaacaccggcgcccaccatcgcgtcgcagcccctgtccctgcgcccagaggcgtgccggccagcggcggggggcgcagtgcacacgagggggctggacttcgcctgtgacatctacatctgggcgcccttggccgggacttgtggggtccttctcctgtcactggttatcaccctttactgcaaacggggcagaaagaaactcctgtatatattcaaacaaccatttatgagaccagtacaaactactcaagaggaagatggctgtagctgccgatttccagaagaagaagaaggaggatgtgaactgagagtgaagttcagcaggagcgcagacgcccccgcgtaccagcagggccagaaccagctctataacgagctgaatctaggacgaagagaggagtacgatgttttggacaagagacgtggccgggaccctgagatggggggaaagccgagaaggaagaaccctcaggaaggcctgtacaatgaactgcagaaagataagatggcggaggcctacagtgagattgggatgaaaggcgagcgccggaggggcaaggggcacgatggcctttaccagggtctcagtacagccaccaaggacacctacgacgcccttcacatgcaggccctgccccctcgctga

SEQ ID NO: 5816 - DNA, 3576 bp, Artificial Sequence
  Synthetic Polynucloetide
atggccttaccagtgaccgccttgctcctgccgctggccttgctgctccacgccgccaggccggaggtgcaactggtggaaagcggcggaggctctgtgcagacaggcggctctctgagactgacctgtgccgccagcggcagaaccagcagatcctatggcatgggctggttcagacaggcccctggcaaagaacgcgagttcgtgtccggcatctcttggagaggcgacagcaccggctacgccgatagcgtgaagggccggttcaccatcagccgggacaacgccaagaacaccgtggacctgcagatgaacagcctgaagcccgaggacaccgccatctactactgtgccgctgccgccggatctgcttggtacggcacactgtacgagtacgactactggggccagggcacccttgtgaccgtgtcatctggcggaggaagcggcggaggatctgaagtgcaactggtggaatctggaggctctctggtgcagccagggggaagcctgagactgtcttgtgccgcttccggcttcaccttcgacgactacgccatgagctgggtgcgccaggtgccaggcaaaggcctggaatgggtgtccagcatcaactggagcggcacccacaccgattacgccgactccgtgaaaggcagattcacaatcagcagaaacaacgccaacaataccctgtacctgcagatgaactccctgaagtctgaggatacagcagtgtattattgcgccaagaactggcgggacgccggcaccacttggtttgagaaaagcggctctgccggacagggaacccaagtgacagtgtcctccggtaccggcggaggcggatctggcggcggaggtagcggtggcggaggatctgaattcgacatccagatgacacagagccctagcagcctgtctgccagcgtgggagacagagtgaccatcacatgcaaggccagcgaccacatcaacaactggctggcctggtatcagcagaagcctggacaggcccctaagctgctgatctacggcgctaccacactggaaacaggcgtgcccagcagattttctggcagcggctctggcaccgactacaccctgacaatatccagcctccagcctgaggacttcgccacctactactgtcagcagagctggaacaccccttggacattcggccagggcaccaagctggaaatcaagagaggcggaggcggaagtggaggcggaggatctggcggcggaggctctcaagttcagcttcaacagcctggcgctgagctggtcaaacctggcgcttctgtgaagatgagctgcaaagccagcggctacgccttcagcagctactggatcaactggatgaagcagaaacccggccagggactcgaatggatcggccaaatctatcccggcgacggcgacaccaactacaacggcaagttcaagggcagagccacactgaccgccgatacctctagcagcacagcctacatgcagctgagcagcctgaccagcgaagatagcgccgtgtacttctgtgcccggtccatcacaacagtcgtgggctgcgctatggactattggggccagggaacaagcgtgaccgtgtctagtacgcgtgagcagaaactgatctcggaagaggatctggcgaagcccaccacgacgccagcgccgcgaccaccaacaccggcgcccaccatcgcgtcgcagcccctgtccctgcgcccagaggcgtgccggccagcggcggggggcgcagtgcacacgagggggctggacttcgcctgtgacatctacatctgggcgcccttggccgggacttgtggggtccttctcctgtcactggttatcaccctttactgcgggcgcgccagagtgaagttcagcaggagcgcagacgcccccgcgtaccagcagggccagaaccagctctataacgagctgaatctaggacgaagagaggagtacgatgttttggacaagagacgtggccgggaccctgagatggggggaaagccgagaaggaagaaccctcaggaaggcctgtacaatgaactgcagaaagataagatggcggaggcctacagtgagattgggatgaaaggcgagcgccggaggggcaaggggcacgatggcctttaccagggtctcagtacagccaccaaggacacctacgacgcccttcacatgcaggccctgccccctcgctctagaggatctggagcaacaaacttctcactactcaaacaagcaggtgacgtggaggagaatcccgggcctgggatccacatggccacttacgaggttctctgtgaggtggcgcggaaactgggcacggatgacagggaagtggtattgttcctcctaaacgtgttcatacctcaacccacactggcccaattaattggagctcttagagctttaaaggaggagggcaggttaacgtttcccctgttagcggaatgtctgtttcgtgcaggtcgcagagacctcttgcgcgacctgcttcacttagacccgcgttttttagagcgccacctagcgggcacaatgagttatttcagcccttatcagctcactgttctccacgtagacggggagctgtgtgcgagggatattaggtctttgatatttttaagcaaggacactatagggtctcgcagcacaccacagacattcttacactgggtgtactgtatggaaaacttagacctactgggtcccactgacgtggatgccctaatgtcaatgcttagatctttgtcaagagtagacctacagcgccaagtgcaaaccctaatgggccttcacctttccggcccatcacactcccaacactatcgccatacaccactcgagaccgatttctacgactacaaggacgacgatgacaagactagtggctccggcgagggcagaggaagtctactaacctgcggagatgtggaagaaaatcctggcccacatatgaccgagtacaagcccacggtgcgcctcgccacccgcgacgacgtccccagggccgtacgcaccctcgccgccgcgttcgccgactaccccgccacgcgccacaccgtcgatccggaccgccacatcgagcgggtcaccgagctgcaagaactcttcctcacgcgcgtcgggctcgacatcggcaaggtgtgggtcgcggacgacggcgccgcggtggcggtctggaccacgccggagagcgtcgaagcgggggcggtgttcgccgagatcggcccgcgcatggccgagttgagcggttcccggctggccgcgcagcaacagatggaaggcctcctggcgccgcaccggcccaaggagcccgcgtggttcctggccaccgtcggcgtctcgcccgaccaccagggcaagggtctgggcagcgccgtcgtgctccccggagtggaggcggccgagcgcgccggggtgcccgccttcctggagacctccgcgccccgcaacctccccttctacgagcggctcggcttcaccgtcaccgccgacgtcgaggtgcccgaaggaccgcgcacctggtgcatgacccgcaagcccggtgcctga

SEQ ID NO: 5817 - DNA, 3396 bp, Artificial Sequence
  Synthetic Polynucloetide
atggccttaccagtgaccgccttgctcctgccgctggccttgctgctccacgccgccaggccggaggtgcaactggtggaaagcggcggaggctctgtgcagacaggcggctctctgagactgacctgtgccgccagcggcagaaccagcagatcctatggcatgggctggttcagacaggcccctggcaaagaacgcgagttcgtgtccggcatctcttggagaggcgacagcaccggctacgccgatagcgtgaagggccggttcaccatcagccgggacaacgccaagaacaccgtggacctgcagatgaacagcctgaagcccgaggacaccgccatctactactgtgccgctgccgccggatctgcttggtacggcacactgtacgagtacgactactggggccagggcacccttgtgaccgtgtcatctggcggaggaagcggcggaggatctgaagtgcaactggtggaatctggaggctctctggtgcagccagggggaagcctgagactgtcttgtgccgcttccggcttcaccttcgacgactacgccatgagctgggtgcgccaggtgccaggcaaaggcctggaatgggtgtccagcatcaactggagcggcacccacaccgattacgccgactccgtgaaaggcagattcacaatcagcagaaacaacgccaacaataccctgtacctgcagatgaactccctgaagtctgaggatacagcagtgtattattgcgccaagaactggcgggacgccggcaccacttggtttgagaaaagcggctctgccggacagggaacccaagtgacagtgtcctccggtaccggcggaggcggatctggcggcggaggtagcggtggcggaggatctgaattcgacatccagatgacacagagccctagcagcctgtctgccagcgtgggagacagagtgaccatcacatgcaaggccagcgaccacatcaacaactggctggcctggtatcagcagaagcctggacaggcccctaagctgctgatctacggcgctaccacactggaaacaggcgtgcccagcagattttctggcagcggctctggcaccgactacaccctgacaatatccagcctccagcctgaggacttcgccacctactactgtcagcagagctggaacaccccttggacattcggccagggcaccaagctggaaatcaagagactcgagatccagaaccctgatcctgccgtgtaccagctgcgggatagcaagagcagcgacaagagcgtgtgtctgttcaccgacttcgacagccagaccaacgtgtcccagagcaaggactccgacgtgtacatcaccgataagtgcgtgctggacatgcggagcatggacttcaagagcaactccgccgtggcctggtccaacaagtccgatttcgcctgcgccaacgccttcaacaacagcattatccccgaggacacattcttcccaagcagcgacgtgccctgcgacgtgaagctggtggaaaagagcttcgagacagacaccaacctgaacttccagaacctgagcgtgatcggcttcagaatcctgctgctgaaagtggccggctttaacctgctgatgaccctgcggctgtggtccagccgcgccaagagaagcggatctggcgtgaagcagaccctgaatttcgacctgctgaagctggctggcgacgtggaatccaacccaggccctactagtatggactggatttggcgcatccttttccttgtcggcgctgctaccggcgcgcattccttcgaacaagttcagcttcaacagcctggcgctgagctggtcaaacctggcgcttctgtgaagatgagctgcaaagccagcggctacgccttcagcagctactggatcaactggatgaagcagaaacccggccagggactcgaatggatcggccaaatctatcccggcgacggcgacaccaactacaacggcaagttcaagggcagagccacactgaccgccgatacctctagcagcacagcctacatgcagctgagcagcctgaccagcgaagatagcgccgtgtacttctgtgcccggtccatcacaacagtcgtgggctgcgctatggactattggggccagggaacaagcgtgaccgtgtctagtacgcgtgaggacctgaagaacgtgttcccacctgaggtggccgtgttcgagcctagcaaggccgagatcgcccacacccagaaagccaccctcgtgtgcctggctaccggcttctaccccgaccatgtggaactgtcttggtgggtcaacggcaaagaggtgcacagcggcgtgtgtaccgacccccagccactgaaagaacagcccgccctgaacgacagccggtactgcctgagcagcagactgagagtgtccgccaccttctggcagaacccccggaaccacttcagatgccaggtgcagttctacggcctgagcgagaacgacgagtggacccaggacagagccaagcccgtgacccagatcgtgtctgccgaagcctggggcagagccgattgcggcatcaccagcgccagctaccaccagggcgtgctgagcgccaccatcctgtacgagatcctgctgggcaaggccaccctgtacgccgtgctggtgtctgccctggtgctgatggctatggtcaagcggaaggacagccggggaagggccaagcgatctggatctggagcaacaaacttctcactactcaaacaagcaggtgacgtggaggagaatcccgggccttctagaggccatatgaccgagtacaagcccacggtgcgcctcgccacccgcgacgacgtccccagggccgtacgcaccctcgccgccgcgttcgccgactaccccgccacgcgccacaccgtcgatccggaccgccacatcgagcgggtcaccgagctgcaagaactcttcctcacgcgcgtcgggctcgacatcggcaaggtgtgggtcgcggacgacggcgccgcggtggcggtctggaccacgccggagagcgtcgaagcgggggcggtgttcgccgagatcggcccgcgcatggccgagttgagcggttcccggctggccgcgcagcaacagatggaaggcctcctggcgccgcaccggcccaaggagcccgcgtggttcctggccaccgtcggcgtctcgcccgaccaccagggcaagggtctgggcagcgccgtcgtgctccccggagtggaggcggccgagcgcgccggggtgcccgccttcctggagacctccgcgccccgcaacctccccttctacgagcggctcggcttcaccgtcaccgccgacgtcgaggtgcccgaaggaccgcgcacctggtgcatgacccgcaagcccggtgcctga

SEQ ID NO: 5818 - DNA, 3393 bp, Artificial Sequence
  Synthetic Polynucloetide
atggccttaccagtgaccgccttgctcctgccgctggccttgctgctccacgccgccaggccggaggtgcaactggtggaaagcggcggaggctctgtgcagacaggcggctctctgagactgacctgtgccgccagcggcagaaccagcagatcctatggcatgggctggttcagacaggcccctggcaaagaacgcgagttcgtgtccggcatctcttggagaggcgacagcaccggctacgccgatagcgtgaagggccggttcaccatcagccgggacaacgccaagaacaccgtggacctgcagatgaacagcctgaagcccgaggacaccgccatctactactgtgccgctgccgccggatctgcttggtacggcacactgtacgagtacgactactggggccagggcacccttgtgaccgtgtcatctggcggaggaagcggcggaggatctgaagtgcaactggtggaatctggaggctctctggtgcagccagggggaagcctgagactgtcttgtgccgcttccggcttcaccttcgacgactacgccatgagctgggtgcgccaggtgccaggcaaaggcctggaatgggtgtccagcatcaactggagcggcacccacaccgattacgccgactccgtgaaaggcagattcacaatcagcagaaacaacgccaacaataccctgtacctgcagatgaactccctgaagtctgaggatacagcagtgtattattgcgccaagaactggcgggacgccggcaccacttggtttgagaaaagcggctctgccggacagggaacccaagtgacagtgtcctccggtaccggcggaggcggatctggcggcggaggtagcggtggcggaggatctgaattcgacatccagatgacacagagccctagcagcctgtctgccagcgtgggagacagagtgaccatcacatgcaaggccagcgaccacatcaacaactggctggcctggtatcagcagaagcctggacaggcccctaagctgctgatctacggcgctaccacactggaaacaggcgtgcccagcagattttctggcagcggctctggcaccgactacaccctgacaatatccagcctccagcctgaggacttcgccacctactactgtcagcagagctggaacaccccttggacattcggccagggcaccaagctggaaatcaagagactcgaggacctgaagaacgtgttcccacctgaggtggccgtgttcgagcctagcaaggccgagatcgcccacacccagaaagccaccctcgtgtgcctggctaccggcttctaccccgaccatgtggaactgtcttggtgggtcaacggcaaagaggtgcacagcggcgtgtgtaccgacccccagccactgaaagaacagcccgccctgaacgacagccggtactgcctgagcagcagactgagagtgtccgccaccttctggcagaacccccggaaccacttcagatgccaggtgcagttctacggcctgagcgagaacgacgagtggacccaggacagagccaagcccgtgacccagatcgtgtctgccgaagcctggggcagagccgattgcggcatcaccagcgccagctaccaccagggcgtgctgagcgccaccatcctgtacgagatcctgctgggcaaggccaccctgtacgccgtgctggtgtctgccctggtgctgatggctatggtcaagcggaaggacagccggggaagggccaagcgatctggatctggagcaacaaacttctcactactcaaacaagcaggtgacgtggaggagaatcccgggcctactagtatggactggatttggcgcatccttttccttgtcggcgctgctaccggcgcgcattccttcgaacaagttcagcttcaacagcctggcgctgagctggtcaaacctggcgcttctgtgaagatgagctgcaaagccagcggctacgccttcagcagctactggatcaactggatgaagcagaaacccggccagggactcgaatggatcggccaaatctatcccggcgacggcgacaccaactacaacggcaagttcaagggcagagccacactgaccgccgatacctctagcagcacagcctacatgcagctgagcagcctgaccagcgaagatagcgccgtgtacttctgtgcccggtccatcacaacagtcgtgggctgcgctatggactattggggccagggaacaagcgtgaccgtgtctagtacgcgtatccagaaccctgatcctgccgtgtaccagctgcgggatagcaagagcagcgacaagagcgtgtgtctgttcaccgacttcgacagccagaccaacgtgtcccagagcaaggactccgacgtgtacatcaccgataagtgcgtgctggacatgcggagcatggacttcaagagcaactccgccgtggcctggtccaacaagtccgatttcgcctgcgccaacgccttcaacaacagcattatccccgaggacacattcttcccaagcagcgacgtgccctgcgacgtgaagctggtggaaaagagcttcgagacagacaccaacctgaacttccagaacctgagcgtgatcggcttcagaatcctgctgctgaaagtggccggctttaacctgctgatgaccctgcggctgtggtccagccgcgccaagagaagcggatctggcgtgaagcagaccctgaatttcgacctgctgaagctggctggcgacgtggaatccaacccaggcccttctagaggccatatgaccgagtacaagcccacggtgcgcctcgccacccgcgacgacgtccccagggccgtacgcaccctcgccgccgcgttcgccgactaccccgccacgcgccacaccgtcgatccggaccgccacatcgagcgggtcaccgagctgcaagaactcttcctcacgcgcgtcgggctcgacatcggcaaggtgtgggtcgcggacgacggcgccgcggtggcggtctggaccacgccggagagcgtcgaagcgggggcggtgttcgccgagatcggcccgcgcatggccgagttgagcggttcccggctggccgcgcagcaacagatggaaggcctcctggcgccgcaccggcccaaggagcccgcgtggttcctggccaccgtcggcgtctcgcccgaccaccagggcaagggtctgggcagcgccgtcgtgctccccggagtggaggcggccgagcgcgccggggtgcccgccttcctggagacctccgcgccccgcaacctccccttctacgagcggctcggcttcaccgtcaccgccgacgtcgaggtgcccgaaggaccgcgcacctggtgcatgacccgcaagcccggtgcctga

SEQ ID NO: 5819 - DNA, 2691 bp, Artificial Sequence
  Synthetic Polynucloetide
atggccttaccagtgaccgccttgctcctgccgctggccttgctgctccacgccgccaggccggaggtgcaactggtggaaagcggcggaggctctgtgcagacaggcggctctctgagactgacctgtgccgccagcggcagaaccagcagatcctatggcatgggctggttcagacaggcccctggcaaagaacgcgagttcgtgtccggcatctcttggagaggcgacagcaccggctacgccgatagcgtgaagggccggttcaccatcagccgggacaacgccaagaacaccgtggacctgcagatgaacagcctgaagcccgaggacaccgccatctactactgtgccgctgccgccggatctgcttggtacggcacactgtacgagtacgactactggggccagggcacccttgtgaccgtgtcatctggcggaggaagcggcggaggatctgaagtgcaactggtggaatctggaggctctctggtgcagccagggggaagcctgagactgtcttgtgccgcttccggcttcaccttcgacgactacgccatgagctgggtgcgccaggtgccaggcaaaggcctggaatgggtgtccagcatcaactggagcggcacccacaccgattacgccgactccgtgaaaggcagattcacaatcagcagaaacaacgccaacaataccctgtacctgcagatgaactccctgaagtctgaggatacagcagtgtattattgcgccaagaactggcgggacgccggcaccacttggtttgagaaaagcggctctgccggacagggaacccaagtgacagtgtcctccggtaccggcggaggcggatctggcggcggaggtagcggtggcggaggatctgaattcgacatccagatgacacagagccctagcagcctgtctgccagcgtgggagacagagtgaccatcacatgcaaggccagcgaccacatcaacaactggctggcctggtatcagcagaagcctggacaggcccctaagctgctgatctacggcgctaccacactggaaacaggcgtgcccagcagattttctggcagcggctctggcaccgactacaccctgacaatatccagcctccagcctgaggacttcgccacctactactgtcagcagagctggaacaccccttggacattcggccagggcaccaagctggaaatcaagagactcgaggacctgaagaacgtgttcccacctgaggtggccgtgttcgagcctagcgaggccgagatcagccacacccagaaagccaccctcgtgtgcctggctaccggcttctaccccgaccatgtggaactgtcttggtgggtcaacggcaaagaggtgcacagcggcgtgtgtaccgacccccagccactgaaagaacagcccgccctgaacgacagccggtactgcctgagcagcagactgagagtgtccgccaccttctggcagaacccccggaaccacttcagatgccaggtgcagttctacggcctgagcgagaacgacgagtggacccaggacagagccaagcccgtgacccagatcgtgtctgccgaagcctggggcagagccgattgcggctttaccagcgagagctaccagcagggcgtgctgagcgccaccatcctgtacgagatcctgctgggcaaggccaccctgtacgccgtgctggtgtctgccctggtgctgatggctatggtcaagcggaaggacagccggggaagggccaagcgatctggatctggagcaacaaacttctcactactcaaacaagcaggtgacgtggaggagaatcccgggcctactagtatggactggatttggcgcatccttttccttgtcggcgctgctaccggcgcgcattccttcgaacaagttcagcttcaacagcctggcgctgagctggtcaaacctggcgcttctgtgaagatgagctgcaaagccagcggctacgccttcagcagctactggatcaactggatgaagcagaaacccggccagggactcgaatggatcggccaaatctatcccggcgacggcgacaccaactacaacggcaagttcaagggcagagccacactgaccgccgatacctctagcagcacagcctacatgcagctgagcagcctgaccagcgaagatagcgccgtgtacttctgtgcccggtccatcacaacagtcgtgggctgcgctatggactattggggccagggaacaagcgtgaccgtgtctagtacgcgtatccagaaccctgatcctgccgtgtaccagctgcgggatagcaagagcagcgacaagagcgtgtgtctgttcaccgacttcgacagccagaccaacgtgtcccagagcaaggactccgacgtgtacatcaccgataagtgcgtgctggacatgcggagcatggacttcaagagcaactccgccgtggcctggtccaacaagtccgatttcgcctgcgccaacgccttcaacaacagcattatccccgaggacacattcttcccaagccccgagagcagctgcgacgtgaagctggtggaaaagagcttcgagacagacaccaacctgaacttccagaacctgagcgtgatcggcttcagaatcctgctgctgaaagtggccggctttaacctgctgatgaccctgcggctgtggtccagc

SEQ ID NO: 5820 - DNA, 3366 bp, Artificial Sequence
  Synthetic Polynucloetide
atggccttaccagtgaccgccttgctcctgccgctggccttgctgctccacgccgccaggccggaggtgcaactggtggaaagcggcggaggctctgtgcagacaggcggctctctgagactgacctgtgccgccagcggcagaaccagcagatcctatggcatgggctggttcagacaggcccctggcaaagaacgcgagttcgtgtccggcatctcttggagaggcgacagcaccggctacgccgatagcgtgaagggccggttcaccatcagccgggacaacgccaagaacaccgtggacctgcagatgaacagcctgaagcccgaggacaccgccatctactactgtgccgctgccgccggatctgcttggtacggcacactgtacgagtacgactactggggccagggcacccttgtgaccgtgtcatctggcggaggaagcggcggaggatctgaagtgcaactggtggaatctggaggctctctggtgcagccagggggaagcctgagactgtcttgtgccgcttccggcttcaccttcgacgactacgccatgagctgggtgcgccaggtgccaggcaaaggcctggaatgggtgtccagcatcaactggagcggcacccacaccgattacgccgactccgtgaaaggcagattcacaatcagcagaaacaacgccaacaataccctgtacctgcagatgaactccctgaagtctgaggatacagcagtgtattattgcgccaagaactggcgggacgccggcaccacttggtttgagaaaagcggctctgccggacagggaacccaagtgacagtgtcctccggtaccggcggaggcggatctggcggcggaggtagcggtggcggaggatctgaattcgacatccagatgacacagagccctagcagcctgtctgccagcgtgggagacagagtgaccatcacatgcaaggccagcgaccacatcaacaactggctggcctggtatcagcagaagcctggacaggcccctaagctgctgatctacggcgctaccacactggaaacaggcgtgcccagcagattttctggcagcggctctggcaccgactacaccctgacaatatccagcctccagcctgaggacttcgccacctactactgtcagcagagctggaacaccccttggacattcggccagggcaccaagctggaaatcaagagactcgaggacctgaagaacgtgttcccacctgaggtggccgtgttcgagcctagcgaggccgagatcagccacacccagaaagccaccctcgtgtgcctggctaccggcttctaccccgaccatgtggaactgtcttggtgggtcaacggcaaagaggtgcacagcggcgtgtgtaccgacccccagccactgaaagaacagcccgccctgaacgacagccggtactgcctgagcagcagactgagagtgtccgccaccttctggcagaacccccggaaccacttcagatgccaggtgcagttctacggcctgagcgagaacgacgagtggacccaggacagagccaagcccgtgacccagatcgtgtctgccgaagcctggggcagagccgattgcggctttaccagcgagagctaccagcagggcgtgctgagcgccaccatcctgtacgagatcctgctgggcaaggccaccctgtacgccgtgctggtgtctgccctggtgctgatggctatggtcaagcggaaggacagccggggaagggccaagcgatctggatctggagcaacaaacttctcactactcaaacaagcaggtgacgtggaggagaatcccgggcctactagtatggactggatttggcgcatccttttccttgtcggcgctgctaccggcgcgcattccttcgaacaagttcagcttcaacagcctggcgctgagctggtcaaacctggcgcttctgtgaagatgagctgcaaagccagcggctacgccttcagcagctactggatcaactggatgaagcagaaacccggccagggactcgaatggatcggccaaatctatcccggcgacggcgacaccaactacaacggcaagttcaagggcagagccacactgaccgccgatacctctagcagcacagcctacatgcagctgagcagcctgaccagcgaagatagcgccgtgtacttctgtgcccggtccatcacaacagtcgtgggctgcgctatggactattggggccagggaacaagcgtgaccgtgtctagtacgcgtatccagaaccctgatcctgccgtgtaccagctgcgggatagcaagagcagcgacaagagcgtgtgtctgttcaccgacttcgacagccagaccaacgtgtcccagagcaaggactccgacgtgtacatcaccgataagtgcgtgctggacatgcggagcatggacttcaagagcaactccgccgtggcctggtccaacaagtccgatttcgcctgcgccaacgccttcaacaacagcattatccccgaggacacattcttcccaagccccgagagcagctgcgacgtgaagctggtggaaaagagcttcgagacagacaccaacctgaacttccagaacctgagcgtgatcggcttcagaatcctgctgctgaaagtggccggctttaacctgctgatgaccctgcggctgtggtccagccgcgccaagagaagcggatctggcgtgaagcagaccctgaatttcgacctgctgaagctggctggcgacgtggaatccaacccaggcccttctagaggcgggatccacaccatggctacctacgaggtgctgtgcgaggtggcaagaaagctgggcaccgacgacagagaagtggtgctgttcctgctgaacgtgttcatccctcagcctacactggcccagctgatcggtgcactgagagccctgaaagaggaaggccggctgacctttcctctgctggccgaatgcctgttcagagccggaagaagggatctgctgcgggacctgctgcatctggaccccagatttctggaaagacacctggccggcaccatgagctacttcagcccttaccagctgaccgtgctgcacgttgacggcgaactgtgcgccagagatattcggagcctgatcttcctgagcaaggacaccatcggcagccggtctacccctcagacatttctgcactgggtgtactgcatggaaaacctggacctgctcggccccacagatgtggatgccctgatgtccatgctgagaagcctgagcagagtggacctccagagacaggtgcagacactgatgggactgcacctgagcggacctagccacagccagcactacagacacacccct

SEQ ID NO: 5821 - DNA, 2703 bp, Artificial Sequence
  Synthetic Polynucloetide
atggccttaccagtgaccgccttgctcctgccgctggccttgctgctccacgccgccaggccggaggtgcaactggtggaaagcggcggaggctctgtgcagacaggcggctctctgagactgacctgtgccgccagcggcagaaccagcagatcctatggcatgggctggttcagacaggcccctggcaaagaacgcgagttcgtgtccggcatctcttggagaggcgacagcaccggctacgccgatagcgtgaagggccggttcaccatcagccgggacaacgccaagaacaccgtggacctgcagatgaacagcctgaagcccgaggacaccgccatctactactgtgccgctgccgccggatctgcttggtacggcacactgtacgagtacgactactggggccagggcacccttgtgaccgtgtcatctggcggaggaagcggcggaggatctgaagtgcaactggtggaatctggaggctctctggtgcagccagggggaagcctgagactgtcttgtgccgcttccggcttcaccttcgacgactacgccatgagctgggtgcgccaggtgccaggcaaaggcctggaatgggtgtccagcatcaactggagcggcacccacaccgattacgccgactccgtgaaaggcagattcacaatcagcagaaacaacgccaacaataccctgtacctgcagatgaactccctgaagtctgaggatacagcagtgtattattgcgccaagaactggcgggacgccggcaccacttggtttgagaaaagcggctctgccggacagggaacccaagtgacagtgtcctccggtaccggcggaggcggatctggcggcggaggtagcggtggcggaggatctgaattcgacatccagatgacacagagccctagcagcctgtctgccagcgtgggagacagagtgaccatcacatgcaaggccagcgaccacatcaacaactggctggcctggtatcagcagaagcctggacaggcccctaagctgctgatctacggcgctaccacactggaaacaggcgtgcccagcagattttctggcagcggctctggcaccgactacaccctgacaatatccagcctccagcctgaggacttcgccacctactactgtcagcagagctggaacaccccttggacattcggccagggcaccaagctggaaatcaagagactcgagatccagaaccctgatcctgccgtgtaccagctgcgggatagcaagagcagcgacaagagcgtgtgtctgttcaccgacttcgacagccagaccaacgtgtcccagagcaaggactccgacgtgtacatcaccgataagtgcgtgctggacatgcggagcatggacttcaagagcaactccgccgtggcctggtccaacaagtccgatttcgcctgcgccaacgccttcaacaacagcattatccccgaggacacattcttcccaagccccgagagcagctgcgacgtgaagctggtggaaaagagcttcgagacagacaccaacctgaacttccagaacctgagcgtgatcggcttcagaatcctgctgctgaaagtggccggctttaacctgctgatgaccctgcggctgtggtccagccgcgccaagagaagcggatctggcgtgaagcagaccctgaatttcgacctgctgaagctggctggcgacgtggaatccaacccaggccctactagtatggactggatttggcgcatccttttccttgtcggcgctgctaccggcgcgcattccttcgaacaagttcagcttcaacagcctggcgctgagctggtcaaacctggcgcttctgtgaagatgagctgcaaagccagcggctacgccttcagcagctactggatcaactggatgaagcagaaacccggccagggactcgaatggatcggccaaatctatcccggcgacggcgacaccaactacaacggcaagttcaagggcagagccacactgaccgccgatacctctagcagcacagcctacatgcagctgagcagcctgaccagcgaagatagcgccgtgtacttctgtgcccggtccatcacaacagtcgtgggctgcgctatggactattggggccagggaacaagcgtgaccgtgtctagtacgcgtgaggacctgaagaacgtgttcccacctgaggtggccgtgttcgagcctagcgaggccgagatcagccacacccagaaagccaccctcgtgtgcctggctaccggcttctaccccgaccatgtggaactgtcttggtgggtcaacggcaaagaggtgcacagcggcgtgtgtaccgacccccagccactgaaagaacagcccgccctgaacgacagccggtactgcctgagcagcagactgagagtgtccgccaccttctggcagaacccccggaaccacttcagatgccaggtgcagttctacggcctgagcgagaacgacgagtggacccaggacagagccaagcccgtgacccagatcgtgtctgccgaagcctggggcagagccgattgcggctttaccagcgagagctaccagcagggcgtgctgagcgccaccatcctgtacgagatcctgctgggcaaggccaccctgtacgccgtgctggtgtctgccctggtgctgatggctatggtcaagcggaaggacagccgggga

SEQ ID NO: 5822 - DNA, 3369 bp, Artificial Sequence
  Synthetic Polynucloetide
atggccttaccagtgaccgccttgctcctgccgctggccttgctgctccacgccgccaggccggaggtgcaactggtggaaagcggcggaggctctgtgcagacaggcggctctctgagactgacctgtgccgccagcggcagaaccagcagatcctatggcatgggctggttcagacaggcccctggcaaagaacgcgagttcgtgtccggcatctcttggagaggcgacagcaccggctacgccgatagcgtgaagggccggttcaccatcagccgggacaacgccaagaacaccgtggacctgcagatgaacagcctgaagcccgaggacaccgccatctactactgtgccgctgccgccggatctgcttggtacggcacactgtacgagtacgactactggggccagggcacccttgtgaccgtgtcatctggcggaggaagcggcggaggatctgaagtgcaactggtggaatctggaggctctctggtgcagccagggggaagcctgagactgtcttgtgccgcttccggcttcaccttcgacgactacgccatgagctgggtgcgccaggtgccaggcaaaggcctggaatgggtgtccagcatcaactggagcggcacccacaccgattacgccgactccgtgaaaggcagattcacaatcagcagaaacaacgccaacaataccctgtacctgcagatgaactccctgaagtctgaggatacagcagtgtattattgcgccaagaactggcgggacgccggcaccacttggtttgagaaaagcggctctgccggacagggaacccaagtgacagtgtcctccggtaccggcggaggcggatctggcggcggaggtagcggtggcggaggatctgaattcgacatccagatgacacagagccctagcagcctgtctgccagcgtgggagacagagtgaccatcacatgcaaggccagcgaccacatcaacaactggctggcctggtatcagcagaagcctggacaggcccctaagctgctgatctacggcgctaccacactggaaacaggcgtgcccagcagattttctggcagcggctctggcaccgactacaccctgacaatatccagcctccagcctgaggacttcgccacctactactgtcagcagagctggaacaccccttggacattcggccagggcaccaagctggaaatcaagagactcgagatccagaaccctgatcctgccgtgtaccagctgcgggatagcaagagcagcgacaagagcgtgtgtctgttcaccgacttcgacagccagaccaacgtgtcccagagcaaggactccgacgtgtacatcaccgataagtgcgtgctggacatgcggagcatggacttcaagagcaactccgccgtggcctggtccaacaagtccgatttcgcctgcgccaacgccttcaacaacagcattatccccgaggacacattcttcccaagccccgagagcagctgcgacgtgaagctggtggaaaagagcttcgagacagacaccaacctgaacttccagaacctgagcgtgatcggcttcagaatcctgctgctgaaagtggccggctttaacctgctgatgaccctgcggctgtggtccagccgcgccaagagaagcggatctggcgtgaagcagaccctgaatttcgacctgctgaagctggctggcgacgtggaatccaacccaggccctactagtatggactggatttggcgcatccttttccttgtcggcgctgctaccggcgcgcattccttcgaacaagttcagcttcaacagcctggcgctgagctggtcaaacctggcgcttctgtgaagatgagctgcaaagccagcggctacgccttcagcagctactggatcaactggatgaagcagaaacccggccagggactcgaatggatcggccaaatctatcccggcgacggcgacaccaactacaacggcaagttcaagggcagagccacactgaccgccgatacctctagcagcacagcctacatgcagctgagcagcctgaccagcgaagatagcgccgtgtacttctgtgcccggtccatcacaacagtcgtgggctgcgctatggactattggggccagggaacaagcgtgaccgtgtctagtacgcgtgaggacctgaagaacgtgttcccacctgaggtggccgtgttcgagcctagcgaggccgagatcagccacacccagaaagccaccctcgtgtgcctggctaccggcttctaccccgaccatgtggaactgtcttggtgggtcaacggcaaagaggtgcacagcggcgtgtgtaccgacccccagccactgaaagaacagcccgccctgaacgacagccggtactgcctgagcagcagactgagagtgtccgccaccttctggcagaacccccggaaccacttcagatgccaggtgcagttctacggcctgagcgagaacgacgagtggacccaggacagagccaagcccgtgacccagatcgtgtctgccgaagcctggggcagagccgattgcggctttaccagcgagagctaccagcagggcgtgctgagcgccaccatcctgtacgagatcctgctgggcaaggccaccctgtacgccgtgctggtgtctgccctggtgctgatggctatggtcaagcggaaggacagccggggaagggccaagcgatctggatctggagcaacaaacttctcactactcaaacaagcaggtgacgtggaggagaatcccgggccttctagaggcgggatccacaccatggctacctacgaggtgctgtgcgaggtggcaagaaagctgggcaccgacgacagagaagtggtgctgttcctgctgaacgtgttcatccctcagcctacactggcccagctgatcggtgcactgagagccctgaaagaggaaggccggctgacctttcctctgctggccgaatgcctgttcagagccggaagaagggatctgctgcgggacctgctgcatctggaccccagatttctggaaagacacctggccggcaccatgagctacttcagcccttaccagctgaccgtgctgcacgttgacggcgaactgtgcgccagagatattcggagcctgatcttcctgagcaaggacaccatcggcagccggtctacccctcagacatttctgcactgggtgtactgcatggaaaacctggacctgctcggccccacagatgtggatgccctgatgtccatgctgagaagcctgagcagagtggacctccagagacaggtgcagacactgatgggactgcacctgagcggacctagccacagccagcactacagacacacccct

SEQ ID NO: 5823 - DNA, 3528 bp, Artificial Sequence
  Synthetic Polynucloetide
atggccttaccagtgaccgccttgctcctgccgctggccttgctgctccacgccgccaggccgctcgaggggaaaccaattcccaaccctcttctgggactggattcaaccggcagcggcgaggacctgaagaacgtgttcccacctgaggtggccgtgttcgagcctagcaaggccgagatcgcccacacccagaaagccaccctcgtgtgcctggctaccggcttctaccccgaccatgtggaactgtcttggtgggtcaacggcaaagaggtgcacagcggcgtgtgtaccgacccccagccactgaaagaacagcccgccctgaacgacagccggtactgcctgagcagcagactgagagtgtccgccaccttctggcagaacccccggaaccacttcagatgccaggtgcagttctacggcctgagcgagaacgacgagtggacccaggacagagccaagcccgtgacccagatcgtgtctgccgaagcctggggcagagccgattgcggcatcaccagcgccagctaccaccagggcgtgctgagcgccaccatcctgtacgagatcctgctgggcaaggccaccctgtacgccgtgctggtgtctgccctggtgctgatggctatggtcaagcggaaggacagccggggaagggccaagcgatctggatctggagcaacaaacttctcactactcaaacaagcaggtgacgtggaggagaatcccgggcctactagcatggccttaccagtgaccgccttgctcctgccgctggccttgctgctccacgccgccaggccggaggtgcaactggtggaaagcggcggaggctctgtgcagacaggcggctctctgagactgacctgtgccgccagcggcagaaccagcagatcctatggcatgggctggttcagacaggcccctggcaaagaacgcgagttcgtgtccggcatctcttggagaggcgacagcaccggctacgccgatagcgtgaagggccggttcaccatcagccgggacaacgccaagaacaccgtggacctgcagatgaacagcctgaagcccgaggacaccgccatctactactgtgccgctgccgccggatctgcttggtacggcacactgtacgagtacgactactggggccagggcacccttgtgaccgtgtcatctggcggaggaagcggcggaggatctgaagtgcaactggtggaatctggaggctctctggtgcagccagggggaagcctgagactgtcttgtgccgcttccggcttcaccttcgacgactacgccatgagctgggtgcgccaggtgccaggcaaaggcctggaatgggtgtccagcatcaactggagcggcacccacaccgattacgccgactccgtgaaaggcagattcacaatcagcagaaacaacgccaacaataccctgtacctgcagatgaactccctgaagtctgaggatacagcagtgtattattgcgccaagaactggcgggacgccggcaccacttggtttgagaaaagcggctctgccggacagggaacccaagtgacagtgtcctccggtaccggcggaggcggatctggcggcggaggtagcggtggcggaggatctgaattcgacatccagatgacacagagccctagcagcctgtctgccagcgtgggagacagagtgaccatcacatgcaaggccagcgaccacatcaacaactggctggcctggtatcagcagaagcctggacaggcccctaagctgctgatctacggcgctaccacactggaaacaggcgtgcccagcagattttctggcagcggctctggcaccgactacaccctgacaatatccagcctccagcctgaggacttcgccacctactactgtcagcagagctggaacaccccttggacattcggccagggcaccaagctggaaatcaagagaggcggaggcggaagtggaggcggaggatctggcggcggaggctctcaagttcagcttcaacagcctggcgctgagctggtcaaacctggcgcttctgtgaagatgagctgcaaagccagcggctacgccttcagcagctactggatcaactggatgaagcagaaacccggccagggactcgaatggatcggccaaatctatcccggcgacggcgacaccaactacaacggcaagttcaagggcagagccacactgaccgccgatacctctagcagcacagcctacatgcagctgagcagcctgaccagcgaagatagcgccgtgtacttctgtgcccggtccatcacaacagtcgtgggctgcgctatggactattggggccagggaacaagcgtgaccgtgtctagtacgcgtgagcagaaactgatctcggaagaggatgggagcggcatccagaaccctgatcctgccgtgtaccagctgcgggatagcaagagcagcgacaagagcgtgtgtctgttcaccgacttcgacagccagaccaacgtgtcccagagcaaggactccgacgtgtacatcaccgataagtgcgtgctggacatgcggagcatggacttcaagagcaactccgccgtggcctggtccaacaagtccgatttcgcctgcgccaacgccttcaacaacagcattatccccgaggacacattcttcccaagcagcgacgtgccctgcgacgtgaagctggtggaaaagagcttcgagacagacaccaacctgaacttccagaacctgagcgtgatcggcttcagaatcctgctgctgaaagtggccggctttaacctgctgatgaccctgcggctgtggtccagccgcgccaagagaagcggatctggcgtgaagcagaccctgaatttcgacctgctgaagctggctggcgacgtggaatccaacccaggcccttctagaggccatatgaccgagtacaagcccacggtgcgcctcgccacccgcgacgacgtccccagggccgtacgcaccctcgccgccgcgttcgccgactaccccgccacgcgccacaccgtcgatccggaccgccacatcgagcgggtcaccgagctgcaagaactcttcctcacgcgcgtcgggctcgacatcggcaaggtgtgggtcgcggacgacggcgccgcggtggcggtctggaccacgccggagagcgtcgaagcgggggcggtgttcgccgagatcggcccgcgcatggccgagttgagcggttcccggctggccgcgcagcaacagatggaaggcctcctggcgccgcaccggcccaaggagcccgcgtggttcctggccaccgtcggcgtctcgcccgaccaccagggcaagggtctgggcagcgccgtcgtgctccccggagtggaggcggccgagcgcgccggggtgcccgccttcctggagacctccgcgccccgcaacctccccttctacgagcggctcggcttcaccgtcaccgccgacgtcgaggtgcccgaaggaccgcgcacctggtgcatgacccgcaagcccggtgcctga

SEQ ID NO: 5824 - DNA, 3531 bp, Artificial Sequence
  Synthetic Polynucloetide
atggccttaccagtgaccgccttgctcctgccgctggccttgctgctccacgccgccaggccgctcgagcagaaactgatctcggaagaggatctgggctccggcgatcgccctgatcctgccgtgtaccagctgcgggatagcaagagcagcgacaagagcgtgtgtctgttcaccgacttcgacagccagaccaacgtgtcccagagcaaggactccgacgtgtacatcaccgataagtgcgtgctggacatgcggagcatggacttcaagagcaactccgccgtggcctggtccaacaagtccgatttcgcctgcgccaacgccttcaacaacagcattatccccgaggacacattcttcccaagccccgagagcagctgcgacgtgaagctggtggaaaagagcttcgagacagacaccaacctgaacttccagaacctgagcgtgatcggcttcagaatcctgctgctgaaagtggccggctttaacctgctgatgaccctgcggctgtggtccagctctagtcgcgccaagagaagcggatctggcgtgaagcagaccctgaatttcgacctgctgaagctggctggcgacgtggaatccaacccaggccccactagcatggccttaccagtgaccgccttgctcctgccgctggccttgctgctccacgccgccaggccggaggtgcaactggtggaaagcggcggaggctctgtgcagacaggcggctctctgagactgacctgtgccgccagcggcagaaccagcagatcctatggcatgggctggttcagacaggcccctggcaaagaacgcgagttcgtgtccggcatctcttggagaggcgacagcaccggctacgccgatagcgtgaagggccggttcaccatcagccgggacaacgccaagaacaccgtggacctgcagatgaacagcctgaagcccgaggacaccgccatctactactgtgccgctgccgccggatctgcttggtacggcacactgtacgagtacgactactggggccagggcacccttgtgaccgtgtcatctggcggaggaagcggcggaggatctgaagtgcaactggtggaatctggaggctctctggtgcagccagggggaagcctgagactgtcttgtgccgcttccggcttcaccttcgacgactacgccatgagctgggtgcgccaggtgccaggcaaaggcctggaatgggtgtccagcatcaactggagcggcacccacaccgattacgccgactccgtgaaaggcagattcacaatcagcagaaacaacgccaacaataccctgtacctgcagatgaactccctgaagtctgaggatacagcagtgtattattgcgccaagaactggcgggacgccggcaccacttggtttgagaaaagcggctctgccggacagggaacccaagtgacagtgtcctccggtaccggcggaggcggatctggcggcggaggtagcggtggcggaggatctgaattcgacatccagatgacacagagccctagcagcctgtctgccagcgtgggagacagagtgaccatcacatgcaaggccagcgaccacatcaacaactggctggcctggtatcagcagaagcctggacaggcccctaagctgctgatctacggcgctaccacactggaaacaggcgtgcccagcagattttctggcagcggctctggcaccgactacaccctgacaatatccagcctccagcctgaggacttcgccacctactactgtcagcagagctggaacaccccttggacattcggccagggcaccaagctggaaatcaagagaggcggaggcggaagtggaggcggaggatctggcggcggaggctctcaagttcagcttcaacagcctggcgctgagctggtcaaacctggcgcttctgtgaagatgagctgcaaagccagcggctacgccttcagcagctactggatcaactggatgaagcagaaacccggccagggactcgaatggatcggccaaatctatcccggcgacggcgacaccaactacaacggcaagttcaagggcagagccacactgaccgccgatacctctagcagcacagcctacatgcagctgagcagcctgaccagcgaagatagcgccgtgtacttctgtgcccggtccatcacaacagtcgtgggctgcgctatggactattggggccagggaacaagcgtgaccgtgtctagtacgcgtgggaaaccaattcccaaccctcttctgggactggattcaaccggcagcggcgaggacctgaagaacgtgttcccacctgaggtggccgtgttcgagcctagcgaggccgagatcagccacacccagaaagccaccctcgtgtgcctggctaccggcttctaccccgaccatgtggaactgtcttggtgggtcaacggcaaagaggtgcacagcggcgtgtgtaccgacccccagccactgaaagaacagcccgccctgaacgacagccggtactgcctgagcagcagactgagagtgtccgccaccttctggcagaacccccggaaccacttcagatgccaggtgcagttctacggcctgagcgagaacgacgagtggacccaggacagagccaagcccgtgacccagatcgtgtctgccgaagcctggggcagagccgattgcggctttaccagcgagagctaccagcagggcgtgctgagcgccaccatcctgtacgagatcctgctgggcaaggccaccctgtacgccgtgctggtgtctgccctggtgctgatggctatggtcaagcggaaggacagccggggaagggccaagcgatctggatctggagcaacaaacttctcactactcaaacaagcaggtgacgtggaggagaatcccgggccttctagaggccatatgaccgagtacaagcccacggtgcgcctcgccacccgcgacgacgtccccagggccgtacgcaccctcgccgccgcgttcgccgactaccccgccacgcgccacaccgtcgatccggaccgccacatcgagcgggtcaccgagctgcaagaactcttcctcacgcgcgtcgggctcgacatcggcaaggtgtgggtcgcggacgacggcgccgcggtggcggtctggaccacgccggagagcgtcgaagcgggggcggtgttcgccgagatcggcccgcgcatggccgagttgagcggttcccggctggccgcgcagcaacagatggaaggcctcctggcgccgcaccggcccaaggagcccgcgtggttcctggccaccgtcggcgtctcgcccgaccaccagggcaagggtctgggcagcgccgtcgtgctccccggagtggaggcggccgagcgcgccggggtgcccgccttcctggagacctccgcgccccgcaacctccccttctacgagcggctcggcttcaccgtcaccgccgacgtcgaggtgcccgaaggaccgcgcacctggtgcatgacccgcaagcccggtgcctga

SEQ ID NO: 5825 - DNA, 3393 bp, Artificial Sequence
  Synthetic Polynucloetide
atggccttaccagtgaccgccttgctcctgccgctggccttgctgctccacgccgccaggccggaggtgcaactggtggaaagcggcggaggctctgtgcagacaggcggctctctgagactgacctgtgccgccagcggcagaaccagcagatcctatggcatgggctggttcagacaggcccctggcaaagaacgcgagttcgtgtccggcatctcttggagaggcgacagcaccggctacgccgatagcgtgaagggccggttcaccatcagccgggacaacgccaagaacaccgtggacctgcagatgaacagcctgaagcccgaggacaccgccatctactactgtgccgctgccgccggatctgcttggtacggcacactgtacgagtacgactactggggccagggcacccttgtgaccgtgtcatctggcggaggaagcggcggaggatctgaagtgcaactggtggaatctggaggctctctggtgcagccagggggaagcctgagactgtcttgtgccgcttccggcttcaccttcgacgactacgccatgagctgggtgcgccaggtgccaggcaaaggcctggaatgggtgtccagcatcaactggagcggcacccacaccgattacgccgactccgtgaaaggcagattcacaatcagcagaaacaacgccaacaataccctgtacctgcagatgaactccctgaagtctgaggatacagcagtgtattattgcgccaagaactggcgggacgccggcaccacttggtttgagaaaagcggctctgccggacagggaacccaagtgacagtgtcctccggtaccggcggaggcggatctggcggcggaggtagcggtggcggaggatctgaattcgacatccagatgacacagagccctagcagcctgtctgccagcgtgggagacagagtgaccatcacatgcaaggccagcgaccacatcaacaactggctggcctggtatcagcagaagcctggacaggcccctaagctgctgatctacggcgctaccacactggaaacaggcgtgcccagcagattttctggcagcggctctggcaccgactacaccctgacaatatccagcctccagcctgaggacttcgccacctactactgtcagcagagctggaacaccccttggacattcggccagggcaccaagctggaaatcaagagactcgaggacctgaagaacgtgttcccacctgaggtggccgtgttcgagcctagcgaggccgagatcagccacacccagaaagccaccctcgtgtgcctggctaccggcttctaccccgaccatgtggaactgtcttggtgggtcaacggcaaagaggtgcacagcggcgtgtctaccgacccccagccactgaaagaacagcccgccctgaacgacagccggtactgcctgagcagcagactgagagtgtccgccaccttctggcagaacccccggaaccacttcagatgccaggtgcagttctacggcctgagcgagaacgacgagtggacccaggacagagccaagcccgtgacccagatcgtgtctgccgaagcctggggcagagccgattgcggctttaccagcgagagctaccagcagggcgtgctgagcgccaccatcctgtacgagatcctgctgggcaaggccaccctgtacgccgtgctggtgtctgccctggtgctgatggctatggtcaagcggaaggacagccggggaagggccaagcgatctggatctggagcaacaaacttctcactactcaaacaagcaggtgacgtggaggagaatcccgggcctactagtatggactggatttggcgcatccttttccttgtcggcgctgctaccggcgcgcattccttcgaacaagttcagcttcaacagcctggcgctgagctggtcaaacctggcgcttctgtgaagatgagctgcaaagccagcggctacgccttcagcagctactggatcaactggatgaagcagaaacccggccagggactcgaatggatcggccaaatctatcccggcgacggcgacaccaactacaacggcaagttcaagggcagagccacactgaccgccgatacctctagcagcacagcctacatgcagctgagcagcctgaccagcgaagatagcgccgtgtacttctgtgcccggtccatcacaacagtcgtgggctgcgctatggactattggggccagggaacaagcgtgaccgtgtctagtacgcgtatccagaaccctgatcctgccgtgtaccagctgcgggatagcaagagcagcgacaagagcgtgtgtctgttcaccgacttcgacagccagaccaacgtgtcccagagcaaggactccgacgtgtacatcaccgataagaccgtgctggacatgcggagcatggacttcaagagcaactccgccgtggcctggtccaacaagtccgatttcgcctgcgccaacgccttcaacaacagcattatccccgaggacacattcttcccaagccccgagagcagctgcgacgtgaagctggtggaaaagagcttcgagacagacaccaacctgaacttccagaacctgagcgtgatcggcttcagaatcctgctgctgaaagtggccggctttaacctgctgatgaccctgcggctgtggtccagccgcgccaagagaagcggatctggcgtgaagcagaccctgaatttcgacctgctgaagctggctggcgacgtggaatccaacccaggcccttctagaggccatatgaccgagtacaagcccacggtgcgcctcgccacccgcgacgacgtccccagggccgtacgcaccctcgccgccgcgttcgccgactaccccgccacgcgccacaccgtcgatccggaccgccacatcgagcgggtcaccgagctgcaagaactcttcctcacgcgcgtcgggctcgacatcggcaaggtgtgggtcgcggacgacggcgccgcggtggcggtctggaccacgccggagagcgtcgaagcgggggcggtgttcgccgagatcggcccgcgcatggccgagttgagcggttcccggctggccgcgcagcaacagatggaaggcctcctggcgccgcaccggcccaaggagcccgcgtggttcctggccaccgtcggcgtctcgcccgaccaccagggcaagggtctgggcagcgccgtcgtgctccccggagtggaggcggccgagcgcgccggggtgcccgccttcctggagacctccgcgccccgcaacctccccttctacgagcggctcggcttcaccgtcaccgccgacgtcgaggtgcccgaaggaccgcgcacctggtgcatgacccgcaagcccggtgcctga

SEQ ID NO: 5826 - DNA, 3639 bp, Artificial Sequence
  Synthetic Polynucloetide
atggccttaccagtgaccgccttgctcctgccgctggccttgctgctccacgccgccaggccggaggtgcaactggtggaaagcggcggaggctctgtgcagacaggcggctctctgagactgacctgtgccgccagcggcagaaccagcagatcctatggcatgggctggttcagacaggcccctggcaaagaacgcgagttcgtgtccggcatctcttggagaggcgacagcaccggctacgccgatagcgtgaagggccggttcaccatcagccgggacaacgccaagaacaccgtggacctgcagatgaacagcctgaagcccgaggacaccgccatctactactgtgccgctgccgccggatctgcttggtacggcacactgtacgagtacgactactggggccagggcacccttgtgaccgtgtcatctggcggaggaagcggcggaggatctgaagtgcaactggtggaatctggaggctctctggtgcagccagggggaagcctgagactgtcttgtgccgcttccggcttcaccttcgacgactacgccatgagctgggtgcgccaggtgccaggcaaaggcctggaatgggtgtccagcatcaactggagcggcacccacaccgattacgccgactccgtgaaaggcagattcacaatcagcagaaacaacgccaacaataccctgtacctgcagatgaactccctgaagtctgaggatacagcagtgtattattgcgccaagaactggcgggacgccggcaccacttggtttgagaaaagcggctctgccggacagggaacccaagtgacagtgtcctccggtaccggcggaggcggatctggcggcggaggtagcggtggcggaggatctgaattcgacatccagatgacacagagccctagcagcctgtctgccagcgtgggagacagagtgaccatcacatgcaaggccagcgaccacatcaacaactggctggcctggtatcagcagaagcctggacaggcccctaagctgctgatctacggcgctaccacactggaaacaggcgtgcccagcagattttctggcagcggctctggcaccgactacaccctgacaatatccagcctccagcctgaggacttcgccacctactactgtcagcagagctggaacaccccttggacattcggccagggcaccaagctggaaatcaagagactcgaggacctgaagaacgtgttcccacctgaggtggccgtgttcgagcctagcgaggccgagatcagccacacccagaaagccaccctcgtgtgcctggctaccggcttctaccccgaccatgtggaactgtcttggtgggtcaacggcaaagaggtgcacagcggcgtgtctaccgacccccagccactgaaagaacagcccgccctgaacgacagccggtactgcctgagcagcagactgagagtgtccgccaccttctggcagaacccccggaaccacttcagatgccaggtgcagttctacggcctgagcgagaacgacgagtggacccaggacagagccaagcccgtgacccagatcgtgtctgccgaagcctggggcagagccgattgcggctttaccagcgagagctaccagcagggcgtgctgagcgccaccatcctgtacgagatcctgctgggcaaggccaccctgtacgccgtgctggtgtctgccctggtgctgatggctatggtcaagcggaaggacagccggggaagggccaagcgatctggatctggagcaacaaacttctcactactcaaacaagcaggtgacgtggaggagaatcccgggcctactagtatggactggatttggcgcatccttttccttgtcggcgctgctaccggcgcgcattccttcgaacaagttcagcttcaacagcctggcgctgagctggtcaaacctggcgcttctgtgaagatgagctgcaaagccagcggctacgccttcagcagctactggatcaactggatgaagcagaaacccggccagggactcgaatggatcggccaaatctatcccggcgacggcgacaccaactacaacggcaagttcaagggcagagccacactgaccgccgatacctctagcagcacagcctacatgcagctgagcagcctgaccagcgaagatagcgccgtgtacttctgtgcccggtccatcacaacagtcgtgggctgcgctatggactattggggccagggaacaagcgtgaccgtgtctagtacgcgtgagcagaaactgatctcggaagaggatgggagcggcaccccattcccttctctggcccctcccatcatgctgctggtggacggcaagcagcagatggtggtcgtgtgcctggtgctggatgtggccccacctggactggacagccccatctggtttagcgccggcaatggctctgccctggacgcctttacctacggcccaagccctgccaccgatggcacctggacaaatctggcccacctgagcctgcccagcgaggaactggcttcttgggagcctctcgtgtgccacacaggacctggcgctgagggacacagcagatccacccagcctatgcacctgtctggcgaggccagcaccgccagaacctgtcctcaggaacctctgagaggcacccctggcggagcactgtggctgggagtgctgagactgctgctgttcaagctgctgctgtttgacctgctgctgacctgctcctgtctgtgcgatcctgccggccctctgccttctcctgccaccaccacaagactgagagccctgggcagccacagactgcaccctgccacagagacaggcggcagagaggccacaagcagccctagaccccagcccagagacagaagatggggcgataccccccctggcagaaagcctggatctccagtccgcgccaagagaagcggatctggcgtgaagcagaccctgaatttcgacctgctgaagctggctggcgacgtggaatccaacccaggcccttctagaggccatatgaccgagtacaagcccacggtgcgcctcgccacccgcgacgacgtccccagggccgtacgcaccctcgccgccgcgttcgccgactaccccgccacgcgccacaccgtcgatccggaccgccacatcgagcgggtcaccgagctgcaagaactcttcctcacgcgcgtcgggctcgacatcggcaaggtgtgggtcgcggacgacggcgccgcggtggcggtctggaccacgccggagagcgtcgaagcgggggcggtgttcgccgagatcggcccgcgcatggccgagttgagcggttcccggctggccgcgcagcaacagatggaaggcctcctggcgccgcaccggcccaaggagcccgcgtggttcctggccaccgtcggcgtctcgcccgaccaccagggcaagggtctgggcagcgccgtcgtgctccccggagtggaggcggccgagcgcgccggggtgcccgccttcctggagacctccgcgccccgcaacctccccttctacgagcggctcggcttcaccgtcaccgccgacgtcgaggtgcccgaaggaccgcgcacctggtgcatgacccgcaagcccggtgcctga

SEQ ID NO: 5827 - DNA, 3693 bp, Artificial Sequence
  Synthetic Polynucloetide
atggccttaccagtgaccgccttgctcctgccgctggccttgctgctccacgccgccaggccgctcgaggacctgaagaacgtgttcccacctgaggtggccgtgttcgagcctagcgaggccgagatcagccacacccagaaagccaccctcgtgtgcctggctaccggcttctaccccgaccatgtggaactgtcttggtgggtcaacggcaaagaggtgcacagcggcgtgtctaccgacccccagccactgaaagaacagcccgccctgaacgacagccggtactgcctgagcagcagactgagagtgtccgccaccttctggcagaacccccggaaccacttcagatgccaggtgcagttctacggcctgagcgagaacgacgagtggacccaggacagagccaagcccgtgacccagatcgtgtctgccgaagcctggggcagagccgattgcggctttaccagcgagagctaccagcagggcgtgctgagcgccaccatcctgtacgagatcctgctgggcaaggccaccctgtacgccgtgctggtgtctgccctggtgctgatggctatggtcaagcggaaggacagccggggaagggccaagcgatctggatctggagcaacaaacttctcactactcaaacaagcaggtgacgtggaggagaatcccgggcctactagcatggccttaccagtgaccgccttgctcctgccgctggccttgctgctccacgccgccaggccggaggtgcaactggtggaaagcggcggaggctctgtgcagacaggcggctctctgagactgacctgtgccgccagcggcagaaccagcagatcctatggcatgggctggttcagacaggcccctggcaaagaacgcgagttcgtgtccggcatctcttggagaggcgacagcaccggctacgccgatagcgtgaagggccggttcaccatcagccgggacaacgccaagaacaccgtggacctgcagatgaacagcctgaagcccgaggacaccgccatctactactgtgccgctgccgccggatctgcttggtacggcacactgtacgagtacgactactggggccagggcacccttgtgaccgtgtcatctggcggaggaagcggcggaggatctgaagtgcaactggtggaatctggaggctctctggtgcagccagggggaagcctgagactgtcttgtgccgcttccggcttcaccttcgacgactacgccatgagctgggtgcgccaggtgccaggcaaaggcctggaatgggtgtccagcatcaactggagcggcacccacaccgattacgccgactccgtgaaaggcagattcacaatcagcagaaacaacgccaacaataccctgtacctgcagatgaactccctgaagtctgaggatacagcagtgtattattgcgccaagaactggcgggacgccggcaccacttggtttgagaaaagcggctctgccggacagggaacccaagtgacagtgtcctccggtaccggcggaggcggatctggcggcggaggtagcggtggcggaggatctgaattcgacatccagatgacacagagccctagcagcctgtctgccagcgtgggagacagagtgaccatcacatgcaaggccagcgaccacatcaacaactggctggcctggtatcagcagaagcctggacaggcccctaagctgctgatctacggcgctaccacactggaaacaggcgtgcccagcagattttctggcagcggctctggcaccgactacaccctgacaatatccagcctccagcctgaggacttcgccacctactactgtcagcagagctggaacaccccttggacattcggccagggcaccaagctggaaatcaagagaggcggaggcggaagtggaggcggaggatctggcggcggaggctctcaagttcagcttcaacagcctggcgctgagctggtcaaacctggcgcttctgtgaagatgagctgcaaagccagcggctacgccttcagcagctactggatcaactggatgaagcagaaacccggccagggactcgaatggatcggccaaatctatcccggcgacggcgacaccaactacaacggcaagttcaagggcagagccacactgaccgccgatacctctagcagcacagcctacatgcagctgagcagcctgaccagcgaagatagcgccgtgtacttctgtgcccggtccatcacaacagtcgtgggctgcgctatggactattggggccagggaacaagcgtgaccgtgtctagtacgcgtgagcagaaactgatctcggaagaggatctggggagcggcaccccattcccttctctggcccctcccatcatgctgctggtggacggcaagcagcagatggtggtcgtgtgcctggtgctggatgtggccccacctggactggacagccccatctggtttagcgccggcaatggctctgccctggacgcctttacctacggcccaagccctgccaccgatggcacctggacaaatctggcccacctgagcctgcccagcgaggaactggcttcttgggagcctctcgtgtgccacacaggacctggcgctgagggacacagcagatccacccagcctatgcacctgtctggcgaggccagcaccgccagaacctgtcctcaggaacctctgagaggcacccctggcggagcactgtggctgggagtgctgagactgctgctgttcaagctgctgctgtttgacctgctgctgacctgctcctgtctgtgcgatcctgccggccctctgccttctcctgccaccaccacaagactgagagccctgggcagccacagactgcaccctgccacagagacaggcggcagagaggccacaagcagccctagaccccagcccagagacagaagatggggcgataccccccctggcagaaagcctggatctccagtccgcgccaagagaagcggatctggcgtgaagcagaccctgaatttcgacctgctgaagctggctggcgacgtggaatccaacccaggcccttctagatctagaggccatatgaccgagtacaagcccacggtgcgcctcgccacccgcgacgacgtccccagggccgtacgcaccctcgccgccgcgttcgccgactaccccgccacgcgccacaccgtcgatccggaccgccacatcgagcgggtcaccgagctgcaagaactcttcctcacgcgcgtcgggctcgacatcggcaaggtgtgggtcgcggacgacggcgccgcggtggcggtctggaccacgccggagagcgtcgaagcgggggcggtgttcgccgagatcggcccgcgcatggccgagttgagcggttcccggctggccgcgcagcaacagatggaaggcctcctggcgccgcaccggcccaaggagcccgcgtggttcctggccaccgtcggcgtctcgcccgaccaccagggcaagggtctgggcagcgccgtcgtgctccccggagtggaggcggccgagcgcgccggggtgcccgccttcctggagacctccgcgccccgcaacctccccttctacgagcggctcggcttcaccgtcaccgccgacgtcgaggtgcccgaaggaccgcgcacctggtgcatgacccgcaagcccggtgcctga

SEQ ID NO: 5828 - DNA, 3504 bp, Artificial Sequence
  Synthetic Polynucloetide
atggccttaccagtgaccgccttgctcctgccgctggccttgctgctccacgccgccaggccggaggtgcaactggtggaaagcggcggaggctctgtgcagacaggcggctctctgagactgacctgtgccgccagcggcagaaccagcagatcctatggcatgggctggttcagacaggcccctggcaaagaacgcgagttcgtgtccggcatctcttggagaggcgacagcaccggctacgccgatagcgtgaagggccggttcaccatcagccgggacaacgccaagaacaccgtggacctgcagatgaacagcctgaagcccgaggacaccgccatctactactgtgccgctgccgccggatctgcttggtacggcacactgtacgagtacgactactggggccagggcacccttgtgaccgtgtcatctggcggaggaagcggcggaggatctgaagtgcaactggtggaatctggaggctctctggtgcagccagggggaagcctgagactgtcttgtgccgcttccggcttcaccttcgacgactacgccatgagctgggtgcgccaggtgccaggcaaaggcctggaatgggtgtccagcatcaactggagcggcacccacaccgattacgccgactccgtgaaaggcagattcacaatcagcagaaacaacgccaacaataccctgtacctgcagatgaactccctgaagtctgaggatacagcagtgtattattgcgccaagaactggcgggacgccggcaccacttggtttgagaaaagcggctctgccggacagggaacccaagtgacagtgtcctccggtaccggcggaggcggatctggcggcggaggtagcggtggcggaggatctgaattcgacatccagatgacacagagccctagcagcctgtctgccagcgtgggagacagagtgaccatcacatgcaaggccagcgaccacatcaacaactggctggcctggtatcagcagaagcctggacaggcccctaagctgctgatctacggcgctaccacactggaaacaggcgtgcccagcagattttctggcagcggctctggcaccgactacaccctgacaatatccagcctccagcctgaggacttcgccacctactactgtcagcagagctggaacaccccttggacattcggccagggcaccaagctggaaatcaagagactcgaggggaaaccaattcccaaccctcttctgggactggattcaaccggcagcggcgacaagcagctggacgccgacgtgtcccccaagcctaccatcttcctgccctctatcgccgagacaaagctccagaaggccggcacctacctgtgcctgctggaaaagttcttcccagatgtgattaagatccactggcaggaaaagaagtccaacaccatcctgggcagccaggaaggcaacaccatgaagaccaacgacacctacatgaagttcagctggctgaccgtgcccgagaagtccctggacaaagaacacagatgcatcgtgcggcacgaaaacaacaagaacggcgtggaccaggaaatcatcttcccacccatcaagaccgatgtgattacaatggaccccaaggacaactgctccaaggacgccaacgataccctgctgctccagctgaccaacaccagcgcctactacatgtacttgttgctgctgctgaagtccgtggtgtacttcgccatcatcacatgctgcctgctgcggagaaccgccttctgctgcaacggcgagaagtctagggccaagcgatctggatctggagcaacaaacttctcactactcaaacaagcaggtgacgtggaggagaatcccgggcctactagtatggactggatttggcgcatccttttccttgtcggcgctgctaccggcgcgcattccttcgaacaagttcagcttcaacagcctggcgctgagctggtcaaacctggcgcttctgtgaagatgagctgcaaagccagcggctacgccttcagcagctactggatcaactggatgaagcagaaacccggccagggactcgaatggatcggccaaatctatcccggcgacggcgacaccaactacaacggcaagttcaagggcagagccacactgaccgccgatacctctagcagcacagcctacatgcagctgagcagcctgaccagcgaagatagcgccgtgtacttctgtgcccggtccatcacaacagtcgtgggctgcgctatggactattggggccagggaacaagcgtgaccgtgtctagtacgcgtgagcagaaactgatctcggaagaggatgggagcggcagccagcctcacaccaagcccagcgtgttcgtgatgaagaacggcaccaacgtggcctgcctcgtgaaagagttctaccccaaggacatcaggatcaacctggtgtccagcaagaagatcaccgagttcgaccccgccatcgtgatctcccccagcggcaagtacaacgccgtgaagctggggaagtacgaggacagcaacagcgtgacctgctccgtgcagcacgacaacaagaccgtgcacagcaccgactttgaagtgaaaaccgactccaccgaccacgtgaagcccaaagagacagagaacaccaagcagcccagcaagagctgccacaagcccaaggccatcgtgcacaccgagaaagtgaacatgatgagcctgaccgtgctgggcctgcggatgctgttcgccaaaaccgtggccgtgaacttcctgctgaccgccaagctgttcttcctccgcgccaagagaagcggatctggcgtgaagcagaccctgaatttcgacctgctgaagctggctggcgacgtggaatccaacccaggcccttctagaggccatatgaccgagtacaagcccacggtgcgcctcgccacccgcgacgacgtccccagggccgtacgcaccctcgccgccgcgttcgccgactaccccgccacgcgccacaccgtcgatccggaccgccacatcgagcgggtcaccgagctgcaagaactcttcctcacgcgcgtcgggctcgacatcggcaaggtgtgggtcgcggacgacggcgccgcggtggcggtctggaccacgccggagagcgtcgaagcgggggcggtgttcgccgagatcggcccgcgcatggccgagttgagcggttcccggctggccgcgcagcaacagatggaaggcctcctggcgccgcaccggcccaaggagcccgcgtggttcctggccaccgtcggcgtctcgcccgaccaccagggcaagggtctgggcagcgccgtcgtgctccccggagtggaggcggccgagcgcgccggggtgcccgccttcctggagacctccgcgccccgcaacctccccttctacgagcggctcggcttcaccgtcaccgccgacgtcgaggtgcccgaaggaccgcgcacctggtgcatgacccgcaagcccggtgcctga

SEQ ID NO: 5829 - DNA, 2715 bp, Artificial Sequence
  Synthetic Polynucloetide
atggccttaccagtgaccgccttgctcctgccgctggccttgctgctccacgccgccaggccggaggtgcaactggtggaaagcggcggaggctctgtgcagacaggcggctctctgagactgacctgtgccgccagcggcagaaccagcagatcctatggcatgggctggttcagacaggcccctggcaaagaacgcgagttcgtgtccggcatctcttggagaggcgacagcaccggctacgccgatagcgtgaagggccggttcaccatcagccgggacaacgccaagaacaccgtggacctgcagatgaacagcctgaagcccgaggacaccgccatctactactgtgccgctgccgccggatctgcttggtacggcacactgtacgagtacgactactggggccagggcacccttgtgaccgtgtcatctggcggaggaagcggcggaggatctgaagtgcaactggtggaatctggaggctctctggtgcagccagggggaagcctgagactgtcttgtgccgcttccggcttcaccttcgacgactacgccatgagctgggtgcgccaggtgccaggcaaaggcctggaatgggtgtccagcatcaactggagcggcacccacaccgattacgccgactccgtgaaaggcagattcacaatcagcagaaacaacgccaacaataccctgtacctgcagatgaactccctgaagtctgaggatacagcagtgtattattgcgccaagaactggcgggacgccggcaccacttggtttgagaaaagcggctctgccggacagggaacccaagtgacagtgtcctccggtaccggcggaggcggatctggcggcggaggtagcggtggcggaggatctgaattcgacatccagatgacacagagccctagcagcctgtctgccagcgtgggagacagagtgaccatcacatgcaaggccagcgaccacatcaacaactggctggcctggtatcagcagaagcctggacaggcccctaagctgctgatctacggcgctaccacactggaaacaggcgtgcccagcagattttctggcagcggctctggcaccgactacaccctgacaatatccagcctccagcctgaggacttcgccacctactactgtcagcagagctggaacaccccttggacattcggccagggcaccaagctggaaatcaagagactcgagagccagcctcacaccaagcccagcgtgttcgtgatgaagaacggcaccaacgtggcctgcctcgtgaaagagttctaccccaaggacatcaggatcaacctggtgtccagcaagaagatcaccgagttcgaccccgccatcgtgatctcccccagcggcaagtacaacgccgtgaagctggggaagtacgaggacagcaacagcgtgacctgctccgtgcagcacgacaacaagaccgtgcacagcaccgactttgaagtgaaaaccgactccaccgaccacgtgaagcccaaagagacagagaacaccaagcagcccagcaagagctgccacaagcccaaggccatcgtgcacaccgagaaagtgaacatgatgagcctgaccgtgctgggcctgcggatgctgttcgccaaaaccgtggccgtgaacttcctgctgaccgccaagctgttcttcctcagggccaagcgatctggatctggagcaacaaacttctcactactcaaacaagcaggtgacgtggaggagaatcccgggcctactagtatggactggatttggcgcatccttttccttgtcggcgctgctaccggcgcgcattccttcgaacaagttcagcttcaacagcctggcgctgagctggtcaaacctggcgcttctgtgaagatgagctgcaaagccagcggctacgccttcagcagctactggatcaactggatgaagcagaaacccggccagggactcgaatggatcggccaaatctatcccggcgacggcgacaccaactacaacggcaagttcaagggcagagccacactgaccgccgatacctctagcagcacagcctacatgcagctgagcagcctgaccagcgaagatagcgccgtgtacttctgtgcccggtccatcacaacagtcgtgggctgcgctatggactattggggccagggaacaagcgtgaccgtgtctagtacgcgtgacaagcagctggacgccgacgtgtcccccaagcctaccatcttcctgccctctatcgccgagacaaagctccagaaggccggcacctacctgtgcctgctggaaaagttcttcccagatgtgattaagatccactggcaggaaaagaagtccaacaccatcctgggcagccaggaaggcaacaccatgaagaccaacgacacctacatgaagttcagctggctgaccgtgcccgagaagtccctggacaaagaacacagatgcatcgtgcggcacgaaaacaacaagaacggcgtggaccaggaaatcatcttcccacccatcaagaccgatgtgattacaatggaccccaaggacaactgctccaaggacgccaacgataccctgctgctccagctgaccaacaccagcgcctactacatgtacttgttgctgctgctgaagtccgtggtgtacttcgccatcatcacatgctgcctgctgcggagaaccgccttctgctgcaacggcgagaagtct

SEQ ID NO: 5830 - DNA, 3549 bp, Artificial Sequence
  Synthetic Polynucloetide
atggccttaccagtgaccgccttgctcctgccgctggccttgctgctccacgccgccaggccgctcgaggggaaaccaattcccaaccctcttctgggactggattcaaccggcagcggcgacaagcagctggacgccgacgtgtcccccaagcctaccatcttcctgccctctatcgccgagacaaagctccagaaggccggcacctacctgtgcctgctggaaaagttcttcccagatgtgattaagatccactggcaggaaaagaagtccaacaccatcctgggcagccaggaaggcaacaccatgaagaccaacgacacctacatgaagttcagctggctgaccgtgcccgagaagtccctggacaaagaacacagatgcatcgtgcggcacgaaaacaacaagaacggcgtggaccaggaaatcatcttcccacccatcaagaccgatgtgattacaatggaccccaaggacaactgctccaaggacgccaacgataccctgctgctccagctgaccaacaccagcgcctactacatgtacttgttgctgctgctgaagtccgtggtgtacttcgccatcatcacatgctgcctgctgcggagaaccgccttctgctgcaacggcgagaagtctagggccaagcgatctggatctggagcaacaaacttctcactactcaaacaagcaggtgacgtggaggagaatcccgggcctactagcatggccttaccagtgaccgccttgctcctgccgctggccttgctgctccacgccgccaggccggaggtgcaactggtggaaagcggcggaggctctgtgcagacaggcggctctctgagactgacctgtgccgccagcggcagaaccagcagatcctatggcatgggctggttcagacaggcccctggcaaagaacgcgagttcgtgtccggcatctcttggagaggcgacagcaccggctacgccgatagcgtgaagggccggttcaccatcagccgggacaacgccaagaacaccgtggacctgcagatgaacagcctgaagcccgaggacaccgccatctactactgtgccgctgccgccggatctgcttggtacggcacactgtacgagtacgactactggggccagggcacccttgtgaccgtgtcatctggcggaggaagcggcggaggatctgaagtgcaactggtggaatctggaggctctctggtgcagccagggggaagcctgagactgtcttgtgccgcttccggcttcaccttcgacgactacgccatgagctgggtgcgccaggtgccaggcaaaggcctggaatgggtgtccagcatcaactggagcggcacccacaccgattacgccgactccgtgaaaggcagattcacaatcagcagaaacaacgccaacaataccctgtacctgcagatgaactccctgaagtctgaggatacagcagtgtattattgcgccaagaactggcgggacgccggcaccacttggtttgagaaaagcggctctgccggacagggaacccaagtgacagtgtcctccggtaccggcggaggcggatctggcggcggaggtagcggtggcggaggatctgaattcgacatccagatgacacagagccctagcagcctgtctgccagcgtgggagacagagtgaccatcacatgcaaggccagcgaccacatcaacaactggctggcctggtatcagcagaagcctggacaggcccctaagctgctgatctacggcgctaccacactggaaacaggcgtgcccagcagattttctggcagcggctctggcaccgactacaccctgacaatatccagcctccagcctgaggacttcgccacctactactgtcagcagagctggaacaccccttggacattcggccagggcaccaagctggaaatcaagagaggcggaggcggaagtggaggcggaggatctggcggcggaggctctcaagttcagcttcaacagcctggcgctgagctggtcaaacctggcgcttctgtgaagatgagctgcaaagccagcggctacgccttcagcagctactggatcaactggatgaagcagaaacccggccagggactcgaatggatcggccaaatctatcccggcgacggcgacaccaactacaacggcaagttcaagggcagagccacactgaccgccgatacctctagcagcacagcctacatgcagctgagcagcctgaccagcgaagatagcgccgtgtacttctgtgcccggtccatcacaacagtcgtgggctgcgctatggactattggggccagggaacaagcgtgaccgtgtctagtacgcgtgagcagaaactgatctcggaagaggatgggagcggcagccagcctcacaccaagcccagcgtgttcgtgatgaagaacggcaccaacgtggcctgcctcgtgaaagagttctaccccaaggacatcaggatcaacctggtgtccagcaagaagatcaccgagttcgaccccgccatcgtgatctcccccagcggcaagtacaacgccgtgaagctggggaagtacgaggacagcaacagcgtgacctgctccgtgcagcacgacaacaagaccgtgcacagcaccgactttgaagtgaaaaccgactccaccgaccacgtgaagcccaaagagacagagaacaccaagcagcccagcaagagctgccacaagcccaaggccatcgtgcacaccgagaaagtgaacatgatgagcctgaccgtgctgggcctgcggatgctgttcgccaaaaccgtggccgtgaacttcctgctgaccgccaagctgttcttcctccgcgccaagagaagcggatctggcgtgaagcagaccctgaatttcgacctgctgaagctggctggcgacgtggaatccaacccaggcccttctagaggccatatgaccgagtacaagcccacggtgcgcctcgccacccgcgacgacgtccccagggccgtacgcaccctcgccgccgcgttcgccgactaccccgccacgcgccacaccgtcgatccggaccgccacatcgagcgggtcaccgagctgcaagaactcttcctcacgcgcgtcgggctcgacatcggcaaggtgtgggtcgcggacgacggcgccgcggtggcggtctggaccacgccggagagcgtcgaagcgggggcggtgttcgccgagatcggcccgcgcatggccgagttgagcggttcccggctggccgcgcagcaacagatggaaggcctcctggcgccgcaccggcccaaggagcccgcgtggttcctggccaccgtcggcgtctcgcccgaccaccagggcaagggtctgggcagcgccgtcgtgctccccggagtggaggcggccgagcgcgccggggtgcccgccttcctggagacctccgcgccccgcaacctccccttctacgagcggctcggcttcaccgtcaccgccgacgtcgaggtgcccgaaggaccgcgcacctggtgcatgacccgcaagcccggtgcctga

SEQ ID NO: 5831 - DNA, 3924 bp, Artificial Sequence
  Synthetic Polynucloetide
atggccttaccagtgaccgccttgctcctgccgctggccttgctgctccacgccgccaggccggaggtgcaactggtggaaagcggcggaggctctgtgcagacaggcggctctctgagactgacctgtgccgccagcggcagaaccagcagatcctatggcatgggctggttcagacaggcccctggcaaagaacgcgagttcgtgtccggcatctcttggagaggcgacagcaccggctacgccgatagcgtgaagggccggttcaccatcagccgggacaacgccaagaacaccgtggacctgcagatgaacagcctgaagcccgaggacaccgccatctactactgtgccgctgccgccggatctgcttggtacggcacactgtacgagtacgactactggggccagggcacccttgtgaccgtgtcatctggcggaggaagcggcggaggatctgaagtgcaactggtggaatctggaggctctctggtgcagccagggggaagcctgagactgtcttgtgccgcttccggcttcaccttcgacgactacgccatgagctgggtgcgccaggtgccaggcaaaggcctggaatgggtgtccagcatcaactggagcggcacccacaccgattacgccgactccgtgaaaggcagattcacaatcagcagaaacaacgccaacaataccctgtacctgcagatgaactccctgaagtctgaggatacagcagtgtattattgcgccaagaactggcgggacgccggcaccacttggtttgagaaaagcggctctgccggacagggaacccaagtgacagtgtcctccggtaccggcggaggcggatctggcggcggaggtagcggtggcggaggatctgaattcgacatccagatgacacagagccctagcagcctgtctgccagcgtgggagacagagtgaccatcacatgcaaggccagcgaccacatcaacaactggctggcctggtatcagcagaagcctggacaggcccctaagctgctgatctacggcgctaccacactggaaacaggcgtgcccagcagattttctggcagcggctctggcaccgactacaccctgacaatatccagcctccagcctgaggacttcgccacctactactgtcagcagagctggaacaccccttggacattcggccagggcaccaagctggaaatcaagagaggacagcctaaggccaatcctaccgtgacactgttccctccaagcagcgaagaactccaggccaacaaggccacacttgtgtgcctgatctccgacttctaccctggggctgtgacagtggcttggaaggccgatggatctcctgtgaaagccggcgtggaaaccaccaagccatccaagcagagcaacaacaaatacgccgccagctcctacctgagcctgacacctgagcagtggaagtcccacagatcctacagctgccaagtgacccacgaaggcagcaccgtggaaaagacagtggcccctacagagtgcagcggatcccagagcttcggcctgctggaccccaagctgtgctacctgctggatggcatcctgttcatctacggcgtgatcctgaccgccctgttcctgagagtgaagttcagcagaagcgccgacgcccctgcctaccagcagggacagaaccaactgtacaacgagctgaacctgggcagacgggaagagtacgacgtgctggacaagcggagaggcagggaccctgagatgggcggaaagccccagcggagaaagaacccccaggaaggactgtataacgaactccagaaagacaagatggccgaagcctacagcgagatcggcatgaagggcgagcggagaagaggcaagggccacgatggcctgtaccagggcctgagcaccgccaccaaggacacctatgacgccctgcacatgcaggccctgcctccaagaagggccaagcgatctggatctggagcaacaaacttctcactactcaaacaagcaggtgacgtggaggagaatcccgggcctactagtatggactggatttggcgcatccttttccttgtcggcgctgctaccggcgcgcattccttcgaacaagttcagcttcaacagcctggcgctgagctggtcaaacctggcgcttctgtgaagatgagctgcaaagccagcggctacgccttcagcagctactggatcaactggatgaagcagaaacccggccagggactcgaatggatcggccaaatctatcccggcgacggcgacaccaactacaacggcaagttcaagggcagagccacactgaccgccgatacctctagcagcacagcctacatgcagctgagcagcctgaccagcgaagatagcgccgtgtacttctgtgcccggtccatcacaacagtcgtgggctgcgctatggactattggggccagggaacaagcgtgaccgtgtctagtgcctctacaaagggaccctccgtgtttcctctggctcccagcagcaagtctacaagcggaggaacagccgctctgggctgcctggtcaaggattactttcccgagcctgtgaccgtgtcctggaatagcggagcactgacaagcggcgtgcacacctttccagccgtgctgcaaagcagcggcctgtactctctgagcagcgtggtcacagtgcctagctctagcctgggcacccagacctacatctgcaatgtgaaccacaagcctagcaacaccaaggtggacaagagagtggaacccaagagctgtggtacccagagttttgggttgttggaccctaaattgtgctatctgttggacggaatcctgttcatttacggagtgatcctgaccgcattgttcctgcgggttaagttttccagatccgcagacgcacccgcttaccaacaagggcagaaccaactctacaatgaacttaatttggggcggagggaagagtacgacgttctggacaaaaggaggggacgagatcccgagatgggcggaaagcctcagcgaaggaagaatccgcaagaggggctttataacgaactccagaaagataaaatggcagaagcctatagtgagattgggatgaagggagaaaggaggaggggtaaaggtcacgatgggttgtaccaaggattgagcacagccactaaagatacctatgatgcgctccacatgcaggccctgccgccaagacgcgccaagagaagcggatctggcgtgaagcagaccctgaatttcgacctgctgaagctggctggcgacgtggaatccaacccaggcccttctagaggccatatgaccgagtacaagcccacggtgcgcctcgccacccgcgacgacgtccccagggccgtacgcaccctcgccgccgcgttcgccgactaccccgccacgcgccacaccgtcgatccggaccgccacatcgagcgggtcaccgagctgcaagaactcttcctcacgcgcgtcgggctcgacatcggcaaggtgtgggtcgcggacgacggcgccgcggtggcggtctggaccacgccggagagcgtcgaagcgggggcggtgttcgccgagatcggcccgcgcatggccgagttgagcggttcccggctggccgcgcagcaacagatggaaggcctcctggcgccgcaccggcccaaggagcccgcgtggttcctggccaccgtcggcgtctcgcccgaccaccagggcaagggtctgggcagcgccgtcgtgctccccggagtggaggcggccgagcgcgccggggtgcccgccttcctggagacctccgcgccccgcaacctccccttctacgagcggctcggcttcaccgtcaccgccgacgtcgaggtgcccgaaggaccgcgcacctggtgcatgacccgcaagcccggtgcctga

SEQ ID NO: 5832 - DNA, 3279 bp, Artificial Sequence
  Synthetic Polynucloetide
atggccttaccagtgaccgccttgctcctgccgctggccttgctgctccacgccgccaggccggaggtgcaactggtggaaagcggcggaggctctgtgcagacaggcggctctctgagactgacctgtgccgccagcggcagaaccagcagatcctatggcatgggctggttcagacaggcccctggcaaagaacgcgagttcgtgtccggcatctcttggagaggcgacagcaccggctacgccgatagcgtgaagggccggttcaccatcagccgggacaacgccaagaacaccgtggacctgcagatgaacagcctgaagcccgaggacaccgccatctactactgtgccgctgccgccggatctgcttggtacggcacactgtacgagtacgactactggggccagggcacccttgtgaccgtgtcatctggcggaggaagcggcggaggatctgaagtgcaactggtggaatctggaggctctctggtgcagccagggggaagcctgagactgtcttgtgccgcttccggcttcaccttcgacgactacgccatgagctgggtgcgccaggtgccaggcaaaggcctggaatgggtgtccagcatcaactggagcggcacccacaccgattacgccgactccgtgaaaggcagattcacaatcagcagaaacaacgccaacaataccctgtacctgcagatgaactccctgaagtctgaggatacagcagtgtattattgcgccaagaactggcgggacgccggcaccacttggtttgagaaaagcggctctgccggacagggaacccaagtgacagtgtcctccggtaccggcggaggcggatctggcggcggaggtagcggtggcggaggatctgaattcgacatccagatgacacagagccctagcagcctgtctgccagcgtgggagacagagtgaccatcacatgcaaggccagcgaccacatcaacaactggctggcctggtatcagcagaagcctggacaggcccctaagctgctgatctacggcgctaccacactggaaacaggcgtgcccagcagattttctggcagcggctctggcaccgactacaccctgacaatatccagcctccagcctgaggacttcgccacctactactgtcagcagagctggaacaccccttggacattcggccagggcaccaagctggaaatcaagagactcgaggacctgaagaacgtgttcccacctgaggtggccgtgttcgagcctagcgaggccgagatcagccacacccagaaagccaccctcgtgtgcctggctaccggcttctaccccgaccatgtggaactgtcttggtgggtcaacggcaaagaggtgcacagcggcgtgtctaccgacccccagccactgaaagaacagcccgccctgaacgacagccggtactgcctgagcagcagactgagagtgtccgccaccttctggcagaacccccggaaccacttcagatgccaggtgcagttctacggcctgagcgagaacgacgagtggacccaggacagagccaagcccgtgacccagatcgtgtctgccgaagcctggggcagagccgattgcggatcccagagcttcggcctgctggaccccaagctgtgctacctgctggatggcatcctgttcatctacggcgtgatcctgaccgccctgttcctgagagtgaagttcagcagaagcgccgacgcccctgcctaccagcagggacagaaccaactgtacaacgagctgaacctgggcagacgggaagagtacgacgtgctggacaagcggagaggcagggaccctgagatgggcggaaagccccagcggagaaagaacccccaggaaggactgtataacgaactccagaaagacaagatggccgaagcctacagcgagatcggcatgaagggcgagcggagaagaggcaagggccacgatggcctgtaccagggcctgagcaccgccaccaaggacacctatgacgccctgcacatgcaggccctgcctccaagaagggccaagcgatctggatctggagcaacaaacttctcactactcaaacaagcaggtgacgtggaggagaatcccgggcctactagtatggactggatttggcgcatccttttccttgtcggcgctgctaccggcgcgcattccttcgaacaagttcagcttcaacagcctggcgctgagctggtcaaacctggcgcttctgtgaagatgagctgcaaagccagcggctacgccttcagcagctactggatcaactggatgaagcagaaacccggccagggactcgaatggatcggccaaatctatcccggcgacggcgacaccaactacaacggcaagttcaagggcagagccacactgaccgccgatacctctagcagcacagcctacatgcagctgagcagcctgaccagcgaagatagcgccgtgtacttctgtgcccggtccatcacaacagtcgtgggctgcgctatggactattggggccagggaacaagcgtgaccgtgtctagtacgcgtatccagaaccctgatcctgccgtgtaccagctgcgggatagcaagagcagcgacaagagcgtgtgtctgttcaccgacttcgacagccagaccaacgtgtcccagagcaaggactccgacgtgtacatcaccgataagaccgtgctggacatgcggagcatggacttcaagagcaactccgccgtggcctggtccaacaagtccgatttcgcctgcgccaacgccttcaacaacagcattatccccgaggacacattcttcccaagccccgagagcagctgcggtacccagagttttgggttgttggaccctaaattgtgctatctgttggacggaatcctgttcatttacggagtgatcctgaccgcattgttcctgcgggttaagttttccagatccgcagacgcacccgcttaccaacaagggcagaaccaactctacaatgaacttaatttggggcggagggaagagtacgacgttctggacaaaaggaggggacgagatcccgagatgggcggaaagcctcagcgaaggaagaatccgcaagaggggctttataacgaactccagaaagataaaatggcagaagcctatagtgagattgggatgaagggagaaaggaggaggggtaaaggtcacgatgggttgtaccaaggattgagcacagccactaaagatacctatgatgcgctccacatgcaggccctgccgccaaga

SEQ ID NO: 5833 - DNA, 3279 bp, Artificial Sequence
  Synthetic Polynucloetide
atggccttaccagtgaccgccttgctcctgccgctggccttgctgctccacgccgccaggccggaggtgcaactggtggaaagcggcggaggctctgtgcagacaggcggctctctgagactgacctgtgccgccagcggcagaaccagcagatcctatggcatgggctggttcagacaggcccctggcaaagaacgcgagttcgtgtccggcatctcttggagaggcgacagcaccggctacgccgatagcgtgaagggccggttcaccatcagccgggacaacgccaagaacaccgtggacctgcagatgaacagcctgaagcccgaggacaccgccatctactactgtgccgctgccgccggatctgcttggtacggcacactgtacgagtacgactactggggccagggcacccttgtgaccgtgtcatctggcggaggaagcggcggaggatctgaagtgcaactggtggaatctggaggctctctggtgcagccagggggaagcctgagactgtcttgtgccgcttccggcttcaccttcgacgactacgccatgagctgggtgcgccaggtgccaggcaaaggcctggaatgggtgtccagcatcaactggagcggcacccacaccgattacgccgactccgtgaaaggcagattcacaatcagcagaaacaacgccaacaataccctgtacctgcagatgaactccctgaagtctgaggatacagcagtgtattattgcgccaagaactggcgggacgccggcaccacttggtttgagaaaagcggctctgccggacagggaacccaagtgacagtgtcctccggtaccggcggaggcggatctggcggcggaggtagcggtggcggaggatctgaattcgacatccagatgacacagagccctagcagcctgtctgccagcgtgggagacagagtgaccatcacatgcaaggccagcgaccacatcaacaactggctggcctggtatcagcagaagcctggacaggcccctaagctgctgatctacggcgctaccacactggaaacaggcgtgcccagcagattttctggcagcggctctggcaccgactacaccctgacaatatccagcctccagcctgaggacttcgccacctactactgtcagcagagctggaacaccccttggacattcggccagggcaccaagctggaaatcaagagactcgaggacctgaagaacgtgttcccacctgaggtggccgtgttcgagcctagcaaggccgagatcgcccacacccagaaagccaccctcgtgtgcctggctaccggcttctaccccgaccatgtggaactgtcttggtgggtcaacggcaaagaggtgcacagcggcgtgtgtaccgacccccagccactgaaagaacagcccgccctgaacgacagccggtactgcctgagcagcagactgagagtgtccgccaccttctggcagaacccccggaaccacttcagatgccaggtgcagttctacggcctgagcgagaacgacgagtggacccaggacagagccaagcccgtgacccagatcgtgtctgccgaagcctggggcagagccgattgcggatcccagagcttcggcctgctggaccccaagctgtgctacctgctggatggcatcctgttcatctacggcgtgatcctgaccgccctgttcctgagagtgaagttcagcagaagcgccgacgcccctgcctaccagcagggacagaaccaactgtacaacgagctgaacctgggcagacgggaagagtacgacgtgctggacaagcggagaggcagggaccctgagatgggcggaaagccccagcggagaaagaacccccaggaaggactgtataacgaactccagaaagacaagatggccgaagcctacagcgagatcggcatgaagggcgagcggagaagaggcaagggccacgatggcctgtaccagggcctgagcaccgccaccaaggacacctatgacgccctgcacatgcaggccctgcctccaagaagggccaagcgatctggatctggagcaacaaacttctcactactcaaacaagcaggtgacgtggaggagaatcccgggcctactagtatggactggatttggcgcatccttttccttgtcggcgctgctaccggcgcgcattccttcgaacaagttcagcttcaacagcctggcgctgagctggtcaaacctggcgcttctgtgaagatgagctgcaaagccagcggctacgccttcagcagctactggatcaactggatgaagcagaaacccggccagggactcgaatggatcggccaaatctatcccggcgacggcgacaccaactacaacggcaagttcaagggcagagccacactgaccgccgatacctctagcagcacagcctacatgcagctgagcagcctgaccagcgaagatagcgccgtgtacttctgtgcccggtccatcacaacagtcgtgggctgcgctatggactattggggccagggaacaagcgtgaccgtgtctagtacgcgtatccagaaccctgatcctgccgtgtaccagctgcgggatagcaagagcagcgacaagagcgtgtgtctgttcaccgacttcgacagccagaccaacgtgtcccagagcaaggactccgacgtgtacatcaccgataagtgcgtgctggacatgcggagcatggacttcaagagcaactccgccgtggcctggtccaacaagtccgatttcgcctgcgccaacgccttcaacaacagcattatccccgaggacacattcttcccaagcagcgacgtgccctgcggtacccagagttttgggttgttggaccctaaattgtgctatctgttggacggaatcctgttcatttacggagtgatcctgaccgcattgttcctgcgggttaagttttccagatccgcagacgcacccgcttaccaacaagggcagaaccaactctacaatgaacttaatttggggcggagggaagagtacgacgttctggacaaaaggaggggacgagatcccgagatgggcggaaagcctcagcgaaggaagaatccgcaagaggggctttataacgaactccagaaagataaaatggcagaagcctatagtgagattgggatgaagggagaaaggaggaggggtaaaggtcacgatgggttgtaccaaggattgagcacagccactaaagatacctatgatgcgctccacatgcaggccctgccgccaaga

SEQ ID NO: 5834 - DNA, 3492 bp, Artificial Sequence
  Synthetic Polynucloetide
atggccttaccagtgaccgccttgctcctgccgctggccttgctgctccacgccgccaggccggaggtgcaactggtggaaagcggcggaggctctgtgcagacaggcggctctctgagactgacctgtgccgccagcggcagaaccagcagatcctatggcatgggctggttcagacaggcccctggcaaagaacgcgagttcgtgtccggcatctcttggagaggcgacagcaccggctacgccgatagcgtgaagggccggttcaccatcagccgggacaacgccaagaacaccgtggacctgcagatgaacagcctgaagcccgaggacaccgccatctactactgtgccgctgccgccggatctgcttggtacggcacactgtacgagtacgactactggggccagggcacccttgtgaccgtgtcatctggcggaggaagcggcggaggatctgaagtgcaactggtggaatctggaggctctctggtgcagccagggggaagcctgagactgtcttgtgccgcttccggcttcaccttcgacgactacgccatgagctgggtgcgccaggtgccaggcaaaggcctggaatgggtgtccagcatcaactggagcggcacccacaccgattacgccgactccgtgaaaggcagattcacaatcagcagaaacaacgccaacaataccctgtacctgcagatgaactccctgaagtctgaggatacagcagtgtattattgcgccaagaactggcgggacgccggcaccacttggtttgagaaaagcggctctgccggacagggaacccaagtgacagtgtcctccggtaccggcggaggcggatctggcggcggaggtagcggtggcggaggatctgaattcgacatccagatgacacagagccctagcagcctgtctgccagcgtgggagacagagtgaccatcacatgcaaggccagcgaccacatcaacaactggctggcctggtatcagcagaagcctggacaggcccctaagctgctgatctacggcgctaccacactggaaacaggcgtgcccagcagattttctggcagcggctctggcaccgactacaccctgacaatatccagcctccagcctgaggacttcgccacctactactgtcagcagagctggaacaccccttggacattcggccagggcaccaagctggaaatcaagagactcgaggggaaaccaattcccaaccctcttctgggactggattcaaccggcagcggcgaggacctgaagaacgtgttcccacctgaggtggccgtgttcgagcctagcgaggccgagatcagccacacccagaaagccaccctcgtgtgcctggctaccggcttctaccccgaccatgtggaactgtcttggtgggtcaacggcaaagaggtgcacagcggcgtgtctaccgacccccagccactgaaagaacagcccgccctgaacgacagccggtactgcctgagcagcagactgagagtgtccgccaccttctggcagaacccccggaaccacttcagatgccaggtgcagttctacggcctgagcgagaacgacgagtggacccaggacagagccaagcccgtgacccagatcgtgtctgccgaagcctggggcagagccgattgcggatcccagagcttcggcctgctggaccccaagctgtgctacctgctggatggcatcctgttcatctacggcgtgatcctgaccgccctgttcctgagagtgaagttcagcagaagcgccgacgcccctgcctaccagcagggacagaaccaactgtacaacgagctgaacctgggcagacgggaagagtacgacgtgctggacaagcggagaggcagggaccctgagatgggcggaaagccccagcggagaaagaacccccaggaaggactgtataacgaactccagaaagacaagatggccgaagcctacagcgagatcggcatgaagggcgagcggagaagaggcaagggccacgatggcctgtaccagggcctgagcaccgccaccaaggacacctatgacgccctgcacatgcaggccctgcctccaagaagggccaagcgatctggatctggagcaacaaacttctcactactcaaacaagcaggtgacgtggaggagaatcccgggcctactagtatggactggatttggcgcatccttttccttgtcggcgctgctaccggcgcgcattccttcgaacaagttcagcttcaacagcctggcgctgagctggtcaaacctggcgcttctgtgaagatgagctgcaaagccagcggctacgccttcagcagctactggatcaactggatgaagcagaaacccggccagggactcgaatggatcggccaaatctatcccggcgacggcgacaccaactacaacggcaagttcaagggcagagccacactgaccgccgatacctctagcagcacagcctacatgcagctgagcagcctgaccagcgaagatagcgccgtgtacttctgtgcccggtccatcacaacagtcgtgggctgcgctatggactattggggccagggaacaagcgtgaccgtgtctagtacgcgtgagcagaaactgatctcggaagaggatgggagcggcatccagaaccctgatcctgccgtgtaccagctgcgggatagcaagagcagcgacaagagcgtgtgtctgttcaccgacttcgacagccagaccaacgtgtcccagagcaaggactccgacgtgtacatcaccgataagaccgtgctggacatgcggagcatggacttcaagagcaactccgccgtggcctggtccaacaagtccgatttcgcctgcgccaacgccttcaacaacagcattatccccgaggacacattcttcccaagccccgagagcagctgcggtacccagagttttgggttgttggaccctaaattgtgctatctgttggacggaatcctgttcatttacggagtgatcctgaccgcattgttcctgaggagcaagcggtcacggctgctccacagcgattacatgaatatgacaccacgaagaccgggtcctactcgcaaacactaccaaccctacgcacctccccgcgactttgcagcgtaccgatctcgggttaagttttccagatccgcagacgcacccgcttaccaacaagggcagaaccaactctacaatgaacttaatttggggcggagggaagagtacgacgttctggacaaaaggaggggacgagatcccgagatgggcggaaagcctcagcgaaggaagaatccgcaagaggggctttataacgaactccagaaagataaaatggcagaagcctatagtgagattgggatgaagggagaaaggaggaggggtaaaggtcacgatgggttgtaccaaggattgagcacagccactaaagatacctatgatgcgctccacatgcaggccctgccgccaaga

SEQ ID NO: 5835 - DNA, 3615 bp, Artificial Sequence
  Synthetic Polynucloetide
atggccttaccagtgaccgccttgctcctgccgctggccttgctgctccacgccgccaggccggaggtgcaactggtggaaagcggcggaggctctgtgcagacaggcggctctctgagactgacctgtgccgccagcggcagaaccagcagatcctatggcatgggctggttcagacaggcccctggcaaagaacgcgagttcgtgtccggcatctcttggagaggcgacagcaccggctacgccgatagcgtgaagggccggttcaccatcagccgggacaacgccaagaacaccgtggacctgcagatgaacagcctgaagcccgaggacaccgccatctactactgtgccgctgccgccggatctgcttggtacggcacactgtacgagtacgactactggggccagggcacccttgtgaccgtgtcatctggcggaggaagcggcggaggatctgaagtgcaactggtggaatctggaggctctctggtgcagccagggggaagcctgagactgtcttgtgccgcttccggcttcaccttcgacgactacgccatgagctgggtgcgccaggtgccaggcaaaggcctggaatgggtgtccagcatcaactggagcggcacccacaccgattacgccgactccgtgaaaggcagattcacaatcagcagaaacaacgccaacaataccctgtacctgcagatgaactccctgaagtctgaggatacagcagtgtattattgcgccaagaactggcgggacgccggcaccacttggtttgagaaaagcggctctgccggacagggaacccaagtgacagtgtcctccggtaccggcggaggcggatctggcggcggaggtagcggtggcggaggatctgaattcgacatccagatgacacagagccctagcagcctgtctgccagcgtgggagacagagtgaccatcacatgcaaggccagcgaccacatcaacaactggctggcctggtatcagcagaagcctggacaggcccctaagctgctgatctacggcgctaccacactggaaacaggcgtgcccagcagattttctggcagcggctctggcaccgactacaccctgacaatatccagcctccagcctgaggacttcgccacctactactgtcagcagagctggaacaccccttggacattcggccagggcaccaagctggaaatcaagagactcgaggggaaaccaattcccaaccctcttctgggactggattcaaccggcagcggcgaggacctgaagaacgtgttcccacctgaggtggccgtgttcgagcctagcgaggccgagatcagccacacccagaaagccaccctcgtgtgcctggctaccggcttctaccccgaccatgtggaactgtcttggtgggtcaacggcaaagaggtgcacagcggcgtgtctaccgacccccagccactgaaagaacagcccgccctgaacgacagccggtactgcctgagcagcagactgagagtgtccgccaccttctggcagaacccccggaaccacttcagatgccaggtgcagttctacggcctgagcgagaacgacgagtggacccaggacagagccaagcccgtgacccagatcgtgtctgccgaagcctggggcagagccgattgcggatcccagagcttcggcctgctggaccccaagctgtgctacctgctggatggcatcctgttcatctacggcgtgatcctgaccgccctgttcctgaggagtaagaggagcaggctcctgcacagtgactacatgaacatgactccacgccgccccggacccacccgcaagcattaccagccctatgccccaccacgcgacttcgcagcctatcgctccagagtgaagttcagcagaagcgccgacgcccctgcctaccagcagggacagaaccaactgtacaacgagctgaacctgggcagacgggaagagtacgacgtgctggacaagcggagaggcagggaccctgagatgggcggaaagccccagcggagaaagaacccccaggaaggactgtataacgaactccagaaagacaagatggccgaagcctacagcgagatcggcatgaagggcgagcggagaagaggcaagggccacgatggcctgtaccagggcctgagcaccgccaccaaggacacctatgacgccctgcacatgcaggccctgcctccaagaagggccaagcgatctggatctggagcaacaaacttctcactactcaaacaagcaggtgacgtggaggagaatcccgggcctactagtatggactggatttggcgcatccttttccttgtcggcgctgctaccggcgcgcattccttcgaacaagttcagcttcaacagcctggcgctgagctggtcaaacctggcgcttctgtgaagatgagctgcaaagccagcggctacgccttcagcagctactggatcaactggatgaagcagaaacccggccagggactcgaatggatcggccaaatctatcccggcgacggcgacaccaactacaacggcaagttcaagggcagagccacactgaccgccgatacctctagcagcacagcctacatgcagctgagcagcctgaccagcgaagatagcgccgtgtacttctgtgcccggtccatcacaacagtcgtgggctgcgctatggactattggggccagggaacaagcgtgaccgtgtctagtacgcgtgagcagaaactgatctcggaagaggatgggagcggcatccagaaccctgatcctgccgtgtaccagctgcgggatagcaagagcagcgacaagagcgtgtgtctgttcaccgacttcgacagccagaccaacgtgtcccagagcaaggactccgacgtgtacatcaccgataagaccgtgctggacatgcggagcatggacttcaagagcaactccgccgtggcctggtccaacaagtccgatttcgcctgcgccaacgccttcaacaacagcattatccccgaggacacattcttcccaagccccgagagcagctgcggtacccagagttttgggttgttggaccctaaattgtgctatctgttggacggaatcctgttcatttacggagtgatcctgaccgcattgttcctgaggagcaagcggtcacggctgctccacagcgattacatgaatatgacaccacgaagaccgggtcctactcgcaaacactaccaaccctacgcacctccccgcgactttgcagcgtaccgatctcgggttaagttttccagatccgcagacgcacccgcttaccaacaagggcagaaccaactctacaatgaacttaatttggggcggagggaagagtacgacgttctggacaaaaggaggggacgagatcccgagatgggcggaaagcctcagcgaaggaagaatccgcaagaggggctttataacgaactccagaaagataaaatggcagaagcctatagtgagattgggatgaagggagaaaggaggaggggtaaaggtcacgatgggttgtaccaaggattgagcacagccactaaagatacctatgatgcgctccacatgcaggccctgccgccaaga

SEQ ID NO: 5836 - DNA, 3498 bp, Artificial Sequence
  Synthetic Polynucloetide
atggccttaccagtgaccgccttgctcctgccgctggccttgctgctccacgccgccaggccggaggtgcaactggtggaaagcggcggaggctctgtgcagacaggcggctctctgagactgacctgtgccgccagcggcagaaccagcagatcctatggcatgggctggttcagacaggcccctggcaaagaacgcgagttcgtgtccggcatctcttggagaggcgacagcaccggctacgccgatagcgtgaagggccggttcaccatcagccgggacaacgccaagaacaccgtggacctgcagatgaacagcctgaagcccgaggacaccgccatctactactgtgccgctgccgccggatctgcttggtacggcacactgtacgagtacgactactggggccagggcacccttgtgaccgtgtcatctggcggaggaagcggcggaggatctgaagtgcaactggtggaatctggaggctctctggtgcagccagggggaagcctgagactgtcttgtgccgcttccggcttcaccttcgacgactacgccatgagctgggtgcgccaggtgccaggcaaaggcctggaatgggtgtccagcatcaactggagcggcacccacaccgattacgccgactccgtgaaaggcagattcacaatcagcagaaacaacgccaacaataccctgtacctgcagatgaactccctgaagtctgaggatacagcagtgtattattgcgccaagaactggcgggacgccggcaccacttggtttgagaaaagcggctctgccggacagggaacccaagtgacagtgtcctccggtaccggcggaggcggatctggcggcggaggtagcggtggcggaggatctgaattcgacatccagatgacacagagccctagcagcctgtctgccagcgtgggagacagagtgaccatcacatgcaaggccagcgaccacatcaacaactggctggcctggtatcagcagaagcctggacaggcccctaagctgctgatctacggcgctaccacactggaaacaggcgtgcccagcagattttctggcagcggctctggcaccgactacaccctgacaatatccagcctccagcctgaggacttcgccacctactactgtcagcagagctggaacaccccttggacattcggccagggcaccaagctggaaatcaagagactcgaggggaaaccaattcccaaccctcttctgggactggattcaaccggcagcggcgaggacctgaagaacgtgttcccacctgaggtggccgtgttcgagcctagcgaggccgagatcagccacacccagaaagccaccctcgtgtgcctggctaccggcttctaccccgaccatgtggaactgtcttggtgggtcaacggcaaagaggtgcacagcggcgtgtctaccgacccccagccactgaaagaacagcccgccctgaacgacagccggtactgcctgagcagcagactgagagtgtccgccaccttctggcagaacccccggaaccacttcagatgccaggtgcagttctacggcctgagcgagaacgacgagtggacccaggacagagccaagcccgtgacccagatcgtgtctgccgaagcctggggcagagccgattgcggatcccagagcttcggcctgctggaccccaagctgtgctacctgctggatggcatcctgttcatctacggcgtgatcctgaccgccctgttcctgagagtgaagttcagcagaagcgccgacgcccctgcctaccagcagggacagaaccaactgtacaacgagctgaacctgggcagacgggaagagtacgacgtgctggacaagcggagaggcagggaccctgagatgggcggaaagccccagcggagaaagaacccccaggaaggactgtataacgaactccagaaagacaagatggccgaagcctacagcgagatcggcatgaagggcgagcggagaagaggcaagggccacgatggcctgtaccagggcctgagcaccgccaccaaggacacctatgacgccctgcacatgcaggccctgcctccaagaagggccaagcgatctggatctggagcaacaaacttctcactactcaaacaagcaggtgacgtggaggagaatcccgggcctactagtatggactggatttggcgcatccttttccttgtcggcgctgctaccggcgcgcattccttcgaacaagttcagcttcaacagcctggcgctgagctggtcaaacctggcgcttctgtgaagatgagctgcaaagccagcggctacgccttcagcagctactggatcaactggatgaagcagaaacccggccagggactcgaatggatcggccaaatctatcccggcgacggcgacaccaactacaacggcaagttcaagggcagagccacactgaccgccgatacctctagcagcacagcctacatgcagctgagcagcctgaccagcgaagatagcgccgtgtacttctgtgcccggtccatcacaacagtcgtgggctgcgctatggactattggggccagggaacaagcgtgaccgtgtctagtacgcgtgagcagaaactgatctcggaagaggatctggggagcggcatccagaaccctgatcctgccgtgtaccagctgcgggatagcaagagcagcgacaagagcgtgtgtctgttcaccgacttcgacagccagaccaacgtgtcccagagcaaggactccgacgtgtacatcaccgataagaccgtgctggacatgcggagcatggacttcaagagcaactccgccgtggcctggtccaacaagtccgatttcgcctgcgccaacgccttcaacaacagcattatccccgaggacacattcttcccaagccccgagagcagctgcggtacccagagttttgggttgttggaccctaaattgtgctatctgttggacggaatcctgttcatttacggagtgatcctgaccgcattgttcctgaagagaggccggaagaagctgctgtacatcttcaagcagcctttcatgcggcccgtgcagaccacccaggaagaggacggctgctcctgccggttccccgaggaagaagaaggcggctgcgagctgcgggttaagttttccagatccgcagacgcacccgcttaccaacaagggcagaaccaactctacaatgaacttaatttggggcggagggaagagtacgacgttctggacaaaaggaggggacgagatcccgagatgggcggaaagcctcagcgaaggaagaatccgcaagaggggctttataacgaactccagaaagataaaatggcagaagcctatagtgagattgggatgaagggagaaaggaggaggggtaaaggtcacgatgggttgtaccaaggattgagcacagccactaaagatacctatgatgcgctccacatgcaggccctgccgccaaga

SEQ ID NO: 5837 - DNA, 3624 bp, Artificial Sequence
  Synthetic Polynucloetide
atggccttaccagtgaccgccttgctcctgccgctggccttgctgctccacgccgccaggccggaggtgcaactggtggaaagcggcggaggctctgtgcagacaggcggctctctgagactgacctgtgccgccagcggcagaaccagcagatcctatggcatgggctggttcagacaggcccctggcaaagaacgcgagttcgtgtccggcatctcttggagaggcgacagcaccggctacgccgatagcgtgaagggccggttcaccatcagccgggacaacgccaagaacaccgtggacctgcagatgaacagcctgaagcccgaggacaccgccatctactactgtgccgctgccgccggatctgcttggtacggcacactgtacgagtacgactactggggccagggcacccttgtgaccgtgtcatctggcggaggaagcggcggaggatctgaagtgcaactggtggaatctggaggctctctggtgcagccagggggaagcctgagactgtcttgtgccgcttccggcttcaccttcgacgactacgccatgagctgggtgcgccaggtgccaggcaaaggcctggaatgggtgtccagcatcaactggagcggcacccacaccgattacgccgactccgtgaaaggcagattcacaatcagcagaaacaacgccaacaataccctgtacctgcagatgaactccctgaagtctgaggatacagcagtgtattattgcgccaagaactggcgggacgccggcaccacttggtttgagaaaagcggctctgccggacagggaacccaagtgacagtgtcctccggtaccggcggaggcggatctggcggcggaggtagcggtggcggaggatctgaattcgacatccagatgacacagagccctagcagcctgtctgccagcgtgggagacagagtgaccatcacatgcaaggccagcgaccacatcaacaactggctggcctggtatcagcagaagcctggacaggcccctaagctgctgatctacggcgctaccacactggaaacaggcgtgcccagcagattttctggcagcggctctggcaccgactacaccctgacaatatccagcctccagcctgaggacttcgccacctactactgtcagcagagctggaacaccccttggacattcggccagggcaccaagctggaaatcaagagactcgaggggaaaccaattcccaaccctcttctgggactggattcaaccggcagcggcgaggacctgaagaacgtgttcccacctgaggtggccgtgttcgagcctagcgaggccgagatcagccacacccagaaagccaccctcgtgtgcctggctaccggcttctaccccgaccatgtggaactgtcttggtgggtcaacggcaaagaggtgcacagcggcgtgtctaccgacccccagccactgaaagaacagcccgccctgaacgacagccggtactgcctgagcagcagactgagagtgtccgccaccttctggcagaacccccggaaccacttcagatgccaggtgcagttctacggcctgagcgagaacgacgagtggacccaggacagagccaagcccgtgacccagatcgtgtctgccgaagcctggggcagagccgattgcggatcccagagcttcggcctgctggaccccaagctgtgctacctgctggatggcatcctgttcatctacggcgtgatcctgaccgccctgttcctgaaacggggcagaaagaaactcctgtatatattcaaacaaccatttatgagaccagtacaaactactcaagaggaagatggctgtagctgccgatttccagaagaagaagaaggaggatgtgaactgagagtgaagttcagcagaagcgccgacgcccctgcctaccagcagggacagaaccaactgtacaacgagctgaacctgggcagacgggaagagtacgacgtgctggacaagcggagaggcagggaccctgagatgggcggaaagccccagcggagaaagaacccccaggaaggactgtataacgaactccagaaagacaagatggccgaagcctacagcgagatcggcatgaagggcgagcggagaagaggcaagggccacgatggcctgtaccagggcctgagcaccgccaccaaggacacctatgacgccctgcacatgcaggccctgcctccaagaagggccaagcgatctggatctggagcaacaaacttctcactactcaaacaagcaggtgacgtggaggagaatcccgggcctactagtatggactggatttggcgcatccttttccttgtcggcgctgctaccggcgcgcattccttcgaacaagttcagcttcaacagcctggcgctgagctggtcaaacctggcgcttctgtgaagatgagctgcaaagccagcggctacgccttcagcagctactggatcaactggatgaagcagaaacccggccagggactcgaatggatcggccaaatctatcccggcgacggcgacaccaactacaacggcaagttcaagggcagagccacactgaccgccgatacctctagcagcacagcctacatgcagctgagcagcctgaccagcgaagatagcgccgtgtacttctgtgcccggtccatcacaacagtcgtgggctgcgctatggactattggggccagggaacaagcgtgaccgtgtctagtacgcgtgagcagaaactgatctcggaagaggatctggggagcggcatccagaaccctgatcctgccgtgtaccagctgcgggatagcaagagcagcgacaagagcgtgtgtctgttcaccgacttcgacagccagaccaacgtgtcccagagcaaggactccgacgtgtacatcaccgataagaccgtgctggacatgcggagcatggacttcaagagcaactccgccgtggcctggtccaacaagtccgatttcgcctgcgccaacgccttcaacaacagcattatccccgaggacacattcttcccaagccccgagagcagctgcggtacccagagttttgggttgttggaccctaaattgtgctatctgttggacggaatcctgttcatttacggagtgatcctgaccgcattgttcctgaagagaggccggaagaagctgctgtacatcttcaagcagcctttcatgcggcccgtgcagaccacccaggaagaggacggctgctcctgccggttccccgaggaagaagaaggcggctgcgagctgcgggttaagttttccagatccgcagacgcacccgcttaccaacaagggcagaaccaactctacaatgaacttaatttggggcggagggaagagtacgacgttctggacaaaaggaggggacgagatcccgagatgggcggaaagcctcagcgaaggaagaatccgcaagaggggctttataacgaactccagaaagataaaatggcagaagcctatagtgagattgggatgaagggagaaaggaggaggggtaaaggtcacgatgggttgtaccaaggattgagcacagccactaaagatacctatgatgcgctccacatgcaggccctgccgccaaga

SEQ ID NO: 5838 - DNA, 3297 bp, Artificial Sequence
  Synthetic Polynucloetide
atggccttaccagtgaccgccttgctcctgccgctggccttgctgctccacgccgccaggccggaggtgcaactggtggaaagcggcggaggctctgtgcagacaggcggctctctgagactgacctgtgccgccagcggcagaaccagcagatcctatggcatgggctggttcagacaggcccctggcaaagaacgcgagttcgtgtccggcatctcttggagaggcgacagcaccggctacgccgatagcgtgaagggccggttcaccatcagccgggacaacgccaagaacaccgtggacctgcagatgaacagcctgaagcccgaggacaccgccatctactactgtgccgctgccgccggatctgcttggtacggcacactgtacgagtacgactactggggccagggcacccttgtgaccgtgtcatctggcggaggaagcggcggaggatctgaagtgcaactggtggaatctggaggctctctggtgcagccagggggaagcctgagactgtcttgtgccgcttccggcttcaccttcgacgactacgccatgagctgggtgcgccaggtgccaggcaaaggcctggaatgggtgtccagcatcaactggagcggcacccacaccgattacgccgactccgtgaaaggcagattcacaatcagcagaaacaacgccaacaataccctgtacctgcagatgaactccctgaagtctgaggatacagcagtgtattattgcgccaagaactggcgggacgccggcaccacttggtttgagaaaagcggctctgccggacagggaacccaagtgacagtgtcctccggtaccggcggaggcggatctggcggcggaggtagcggtggcggaggatctgaattcgacatccagatgacacagagccctagcagcctgtctgccagcgtgggagacagagtgaccatcacatgcaaggccagcgaccacatcaacaactggctggcctggtatcagcagaagcctggacaggcccctaagctgctgatctacggcgctaccacactggaaacaggcgtgcccagcagattttctggcagcggctctggcaccgactacaccctgacaatatccagcctccagcctgaggacttcgccacctactactgtcagcagagctggaacaccccttggacattcggccagggcaccaagctggaaatcaagagactcgagcagagcttcggcctgctggaccccaagctgtgctacctgctggatggcatcctgttcatctacggcgtgatcctgaccgccctgttcctgagagtgaagttcagcagaagcgccgacgcccctgcctaccagcagggacagaaccaactgtacaacgagctgaacctgggcagacgggaagagtacgacgtgctggacaagcggagaggcagggaccctgagatgggcggaaagccccagcggagaaagaacccccaggaaggactgtataacgaactccagaaagacaagatggccgaagcctacagcgagatcggcatgaagggcgagcggagaagaggcaagggccacgatggcctgtaccagggcctgagcaccgccaccaaggacacctatgacgccctgcacatgcaggccctgcctccaagaagggccaagcgatctggatctggagcaacaaacttctcactactcaaacaagcaggtgacgtggaggagaatcccgggcctactagtatggactggatttggcgcatccttttccttgtcggcgctgctaccggcgcgcattccttcgaacaagttcagcttcaacagcctggcgctgagctggtcaaacctggcgcttctgtgaagatgagctgcaaagccagcggctacgccttcagcagctactggatcaactggatgaagcagaaacccggccagggactcgaatggatcggccaaatctatcccggcgacggcgacaccaactacaacggcaagttcaagggcagagccacactgaccgccgatacctctagcagcacagcctacatgcagctgagcagcctgaccagcgaagatagcgccgtgtacttctgtgcccggtccatcacaacagtcgtgggctgcgctatggactattggggccagggaacaagcgtgaccgtgtctagtacgcgtcagagttttgggttgttggaccctaaattgtgctatctgttggacggaatcctgttcatttacggagtgatcctgaccgcattgttcctgcgggttaagttttccagatccgcagacgcacccgcttaccaacaagggcagaaccaactctacaatgaacttaatttggggcggagggaagagtacgacgttctggacaaaaggaggggacgagatcccgagatgggcggaaagcctcagcgaaggaagaatccgcaagaggggctttataacgaactccagaaagataaaatggcagaagcctatagtgagattgggatgaagggagaaaggaggaggggtaaaggtcacgatgggttgtaccaaggattgagcacagccactaaagatacctatgatgcgctccacatgcaggccctgccgccaagacgcgccaagagaagcggatctggcgtgaagcagaccctgaatttcgacctgctgaagctggctggcgacgtggaatccaacccaggcccttctagaggccatatgaccgagtacaagcccacggtgcgcctcgccacccgcgacgacgtccccagggccgtacgcaccctcgccgccgcgttcgccgactaccccgccacgcgccacaccgtcgatccggaccgccacatcgagcgggtcaccgagctgcaagaactcttcctcacgcgcgtcgggctcgacatcggcaaggtgtgggtcgcggacgacggcgccgcggtggcggtctggaccacgccggagagcgtcgaagcgggggcggtgttcgccgagatcggcccgcgcatggccgagttgagcggttcccggctggccgcgcagcaacagatggaaggcctcctggcgccgcaccggcccaaggagcccgcgtggttcctggccaccgtcggcgtctcgcccgaccaccagggcaagggtctgggcagcgccgtcgtgctccccggagtggaggcggccgagcgcgccggggtgcccgccttcctggagacctccgcgccccgcaacctccccttctacgagcggctcggcttcaccgtcaccgccgacgtcgaggtgcccgaaggaccgcgcacctggtgcatgacccgcaagcccggtgcctga

SEQ ID NO: 5839 - DNA, 2769 bp, Artificial Sequence
  Synthetic Polynucloetide
atggccttaccagtgaccgccttgctcctgccgctggccttgctgctccacgccgccaggccggaggtgcaactggtggaaagcggcggaggctctgtgcagacaggcggctctctgagactgacctgtgccgccagcggcagaaccagcagatcctatggcatgggctggttcagacaggcccctggcaaagaacgcgagttcgtgtccggcatctcttggagaggcgacagcaccggctacgccgatagcgtgaagggccggttcaccatcagccgggacaacgccaagaacaccgtggacctgcagatgaacagcctgaagcccgaggacaccgccatctactactgtgccgctgccgccggatctgcttggtacggcacactgtacgagtacgactactggggccagggcacccttgtgaccgtgtcatctggcggaggaagcggcggaggatctgaagtgcaactggtggaatctggaggctctctggtgcagccagggggaagcctgagactgtcttgtgccgcttccggcttcaccttcgacgactacgccatgagctgggtgcgccaggtgccaggcaaaggcctggaatgggtgtccagcatcaactggagcggcacccacaccgattacgccgactccgtgaaaggcagattcacaatcagcagaaacaacgccaacaataccctgtacctgcagatgaactccctgaagtctgaggatacagcagtgtattattgcgccaagaactggcgggacgccggcaccacttggtttgagaaaagcggctctgccggacagggaacccaagtgacagtgtcctccggtaccggcggaggcggatctggcggcggaggtagcggtggcggaggatctgaattcgacatccagatgacacagagccctagcagcctgtctgccagcgtgggagacagagtgaccatcacatgcaaggccagcgaccacatcaacaactggctggcctggtatcagcagaagcctggacaggcccctaagctgctgatctacggcgctaccacactggaaacaggcgtgcccagcagattttctggcagcggctctggcaccgactacaccctgacaatatccagcctccagcctgaggacttcgccacctactactgtcagcagagctggaacaccccttggacattcggccagggcaccaagctggaaatcaagagactcgagggacagcctaaggccaatcctaccgtgacactgttccctccaagcagcgaagaactccaggccaacaaggccacacttgtgtgcctgatctccgacttctaccctggggctgtgacagtggcttggaaggccgatggatctcctgtgaaagccggcgtggaaaccaccaagccatccaagcagagcaacaacaaatacgccgccagctcctacctgagcctgacacctgagcagtggaagtcccacagatcctacagctgccaagtgacccacgaaggcagcaccgtggaaaagacagtggcccctacagagtgcagccccatcaagaccgatgtgattacaatggaccccaaggacaactgctccaaggacgccaacgataccctgctgctccagctgaccaacaccagcgcctactacatgtacttgttgctgctgctgaagtccgtggtgtacttcgccatcatcacatgctgcctgctgcggagaaccgccttctgctgcaacggcgagaagtctagggccaagcgatctggatctggagcaacaaacttctcactactcaaacaagcaggtgacgtggaggagaatcccgggcctactagtatggactggatttggcgcatccttttccttgtcggcgctgctaccggcgcgcattccttcgaacaagttcagcttcaacagcctggcgctgagctggtcaaacctggcgcttctgtgaagatgagctgcaaagccagcggctacgccttcagcagctactggatcaactggatgaagcagaaacccggccagggactcgaatggatcggccaaatctatcccggcgacggcgacaccaactacaacggcaagttcaagggcagagccacactgaccgccgatacctctagcagcacagcctacatgcagctgagcagcctgaccagcgaagatagcgccgtgtacttctgtgcccggtccatcacaacagtcgtgggctgcgctatggactattggggccagggaacaagcgtgaccgtgtctagtacgcgtgcctctacaaagggaccctccgtgtttcctctggctcccagcagcaagtctacaagcggaggaacagccgctctgggctgcctggtcaaggattactttcccgagcctgtgaccgtgtcctggaatagcggagcactgacaagcggcgtgcacacctttccagccgtgctgcaaagcagcggcctgtactctctgagcagcgtggtcacagtgcctagctctagcctgggcacccagacctacatctgcaatgtgaaccacaagcctagcaacaccaaggtggacaagagagtggaacccaagagctgtgaagtgaaaaccgactccaccgaccacgtgaagcccaaagagacagagaacaccaagcagcccagcaagagctgccacaagcccaaggccatcgtgcacaccgagaaagtgaacatgatgagcctgaccgtgctgggcctgcggatgctgttcgccaaaaccgtggccgtgaacttcctgctgaccgccaagctgttcttcctc

SEQ ID NO: 5840 - DNA, 2703 bp, Artificial Sequence
  Synthetic Polynucloetide
atggccttaccagtgaccgccttgctcctgccgctggccttgctgctccacgccgccaggccggaggtgcaactggtggaaagcggcggaggctctgtgcagacaggcggctctctgagactgacctgtgccgccagcggcagaaccagcagatcctatggcatgggctggttcagacaggcccctggcaaagaacgcgagttcgtgtccggcatctcttggagaggcgacagcaccggctacgccgatagcgtgaagggccggttcaccatcagccgggacaacgccaagaacaccgtggacctgcagatgaacagcctgaagcccgaggacaccgccatctactactgtgccgctgccgccggatctgcttggtacggcacactgtacgagtacgactactggggccagggcacccttgtgaccgtgtcatctggcggaggaagcggcggaggatctgaagtgcaactggtggaatctggaggctctctggtgcagccagggggaagcctgagactgtcttgtgccgcttccggcttcaccttcgacgactacgccatgagctgggtgcgccaggtgccaggcaaaggcctggaatgggtgtccagcatcaactggagcggcacccacaccgattacgccgactccgtgaaaggcagattcacaatcagcagaaacaacgccaacaataccctgtacctgcagatgaactccctgaagtctgaggatacagcagtgtattattgcgccaagaactggcgggacgccggcaccacttggtttgagaaaagcggctctgccggacagggaacccaagtgacagtgtcctccggtaccggcggaggcggatctggcggcggaggtagcggtggcggaggatctgaattcgacatccagatgacacagagccctagcagcctgtctgccagcgtgggagacagagtgaccatcacatgcaaggccagcgaccacatcaacaactggctggcctggtatcagcagaagcctggacaggcccctaagctgctgatctacggcgctaccacactggaaacaggcgtgcccagcagattttctggcagcggctctggcaccgactacaccctgacaatatccagcctccagcctgaggacttcgccacctactactgtcagcagagctggaacaccccttggacattcggccagggcaccaagctggaaatcaagagactcgagggacagcctaaggccaatcctaccgtgacactgttccctccaagcagcgaagaactccaggccaacaaggccacacttgtgtgcctgatctccgacttctaccctggggctgtgacagtggcttggaaggccgatggatctcctgtgaaagccggcgtggaaaccaccaagccatccaagcagagcaacaacaaatacgccgccagctcctacctgagcctgacacctgagcagtggaagtcccacagatcctacagctgccaagtgacccacgaaggcagcaccgtggaaaagacagtggcccctacagagtgcagcggcagagccgattgcggcatcaccagcgccagctaccaccagggcgtgctgagcgccaccatcctgtacgagatcctgctgggcaaggccaccctgtacgccgtgctggtgtctgccctggtgctgatggctatggtcaagcggaaggacagccggggaagggccaagcgatctggatctggagcaacaaacttctcactactcaaacaagcaggtgacgtggaggagaatcccgggcctactagtatggactggatttggcgcatccttttccttgtcggcgctgctaccggcgcgcattccttcgaacaagttcagcttcaacagcctggcgctgagctggtcaaacctggcgcttctgtgaagatgagctgcaaagccagcggctacgccttcagcagctactggatcaactggatgaagcagaaacccggccagggactcgaatggatcggccaaatctatcccggcgacggcgacaccaactacaacggcaagttcaagggcagagccacactgaccgccgatacctctagcagcacagcctacatgcagctgagcagcctgaccagcgaagatagcgccgtgtacttctgtgcccggtccatcacaacagtcgtgggctgcgctatggactattggggccagggaacaagcgtgaccgtgtctagtacgcgtgcctctacaaagggaccctccgtgtttcctctggctcccagcagcaagtctacaagcggaggaacagccgctctgggctgcctggtcaaggattactttcccgagcctgtgaccgtgtcctggaatagcggagcactgacaagcggcgtgcacacctttccagccgtgctgcaaagcagcggcctgtactctctgagcagcgtggtcacagtgcctagctctagcctgggcacccagacctacatctgcaatgtgaaccacaagcctagcaacaccaaggtggacaagagagtggaacccaagagctgtatccccgaggacacattcttcccaagcagcgacgtgccctgcgacgtgaagctggtggaaaagagcttcgagacagacaccaacctgaacttccagaacctgagcgtgatcggcttcagaatcctgctgctgaaagtggccggctttaacctgctgatgaccctgcggctgtggtccagc

SEQ ID NO: 5841 - DNA, 2703 bp, Artificial Sequence
  Synthetic Polynucloetide
atggccttaccagtgaccgccttgctcctgccgctggccttgctgctccacgccgccaggccggaggtgcaactggtggaaagcggcggaggctctgtgcagacaggcggctctctgagactgacctgtgccgccagcggcagaaccagcagatcctatggcatgggctggttcagacaggcccctggcaaagaacgcgagttcgtgtccggcatctcttggagaggcgacagcaccggctacgccgatagcgtgaagggccggttcaccatcagccgggacaacgccaagaacaccgtggacctgcagatgaacagcctgaagcccgaggacaccgccatctactactgtgccgctgccgccggatctgcttggtacggcacactgtacgagtacgactactggggccagggcacccttgtgaccgtgtcatctggcggaggaagcggcggaggatctgaagtgcaactggtggaatctggaggctctctggtgcagccagggggaagcctgagactgtcttgtgccgcttccggcttcaccttcgacgactacgccatgagctgggtgcgccaggtgccaggcaaaggcctggaatgggtgtccagcatcaactggagcggcacccacaccgattacgccgactccgtgaaaggcagattcacaatcagcagaaacaacgccaacaataccctgtacctgcagatgaactccctgaagtctgaggatacagcagtgtattattgcgccaagaactggcgggacgccggcaccacttggtttgagaaaagcggctctgccggacagggaacccaagtgacagtgtcctccggtaccggcggaggcggatctggcggcggaggtagcggtggcggaggatctgaattcgacatccagatgacacagagccctagcagcctgtctgccagcgtgggagacagagtgaccatcacatgcaaggccagcgaccacatcaacaactggctggcctggtatcagcagaagcctggacaggcccctaagctgctgatctacggcgctaccacactggaaacaggcgtgcccagcagattttctggcagcggctctggcaccgactacaccctgacaatatccagcctccagcctgaggacttcgccacctactactgtcagcagagctggaacaccccttggacattcggccagggcaccaagctggaaatcaagagactcgagggacagcctaaggccaatcctaccgtgacactgttccctccaagcagcgaagaactccaggccaacaaggccacacttgtgtgcctgatctccgacttctaccctggggctgtgacagtggcttggaaggccgatggatctcctgtgaaagccggcgtggaaaccaccaagccatccaagcagagcaacaacaaatacgccgccagctcctacctgagcctgacacctgagcagtggaagtcccacagatcctacagctgccaagtgacccacgaaggcagcaccgtggaaaagacagtggcccctacagagtgcagcggcagagccgattgcggctttaccagcgagagctaccagcagggcgtgctgagcgccaccatcctgtacgagatcctgctgggcaaggccaccctgtacgccgtgctggtgtctgccctggtgctgatggctatggtcaagcggaaggacagccggggaagggccaagcgatctggatctggagcaacaaacttctcactactcaaacaagcaggtgacgtggaggagaatcccgggcctactagtatggactggatttggcgcatccttttccttgtcggcgctgctaccggcgcgcattccttcgaacaagttcagcttcaacagcctggcgctgagctggtcaaacctggcgcttctgtgaagatgagctgcaaagccagcggctacgccttcagcagctactggatcaactggatgaagcagaaacccggccagggactcgaatggatcggccaaatctatcccggcgacggcgacaccaactacaacggcaagttcaagggcagagccacactgaccgccgatacctctagcagcacagcctacatgcagctgagcagcctgaccagcgaagatagcgccgtgtacttctgtgcccggtccatcacaacagtcgtgggctgcgctatggactattggggccagggaacaagcgtgaccgtgtctagtacgcgtgcctctacaaagggaccctccgtgtttcctctggctcccagcagcaagtctacaagcggaggaacagccgctctgggctgcctggtcaaggattactttcccgagcctgtgaccgtgtcctggaatagcggagcactgacaagcggcgtgcacacctttccagccgtgctgcaaagcagcggcctgtactctctgagcagcgtggtcacagtgcctagctctagcctgggcacccagacctacatctgcaatgtgaaccacaagcctagcaacaccaaggtggacaagagagtggaacccaagagctgtatccccgaggacacattcttcccaagccccgagagcagctgcgacgtgaagctggtggaaaagagcttcgagacagacaccaacctgaacttccagaacctgagcgtgatcggcttcagaatcctgctgctgaaagtggccggctttaacctgctgatgaccctgcggctgtggtccagc

SEQ ID NO: 5842 - DNA, 2181 bp, Artificial Sequence
  Synthetic Polynucloetide
atggccttaccagtgaccgccttgctcctgccgctggccttgctgctccacgccgccaggccggaggtgcaactggtggaaagcggcggaggctctgtgcagacaggcggctctctgagactgacctgtgccgccagcggcagaaccagcagatcctatggcatgggctggttcagacaggcccctggcaaagaacgcgagttcgtgtccggcatctcttggagaggcgacagcaccggctacgccgatagcgtgaagggccggttcaccatcagccgggacaacgccaagaacaccgtggacctgcagatgaacagcctgaagcccgaggacaccgccatctactactgtgccgctgccgccggatctgcttggtacggcacactgtacgagtacgactactggggccagggcacccttgtgaccgtgtcatctggcggaggaagcggcggaggatctgaagtgcaactggtggaatctggaggctctctggtgcagccagggggaagcctgagactgtcttgtgccgcttccggcttcaccttcgacgactacgccatgagctgggtgcgccaggtgccaggcaaaggcctggaatgggtgtccagcatcaactggagcggcacccacaccgattacgccgactccgtgaaaggcagattcacaatcagcagaaacaacgccaacaataccctgtacctgcagatgaactccctgaagtctgaggatacagcagtgtattattgcgccaagaactggcgggacgccggcaccacttggtttgagaaaagcggctctgccggacagggaacccaagtgacagtgtcctccggtaccggcggaggcggatctggcggcggaggtagcggtggcggaggatctgaattcgacatccagatgacacagagccctagcagcctgtctgccagcgtgggagacagagtgaccatcacatgcaaggccagcgaccacatcaacaactggctggcctggtatcagcagaagcctggacaggcccctaagctgctgatctacggcgctaccacactggaaacaggcgtgcccagcagattttctggcagcggctctggcaccgactacaccctgacaatatccagcctccagcctgaggacttcgccacctactactgtcagcagagctggaacaccccttggacattcggccagggcaccaagctggaaatcaagagaggcggaggcggaagtggaggcggaggatctggcggcggaggctctcaagttcagcttcaacagcctggcgctgagctggtcaaacctggcgcttctgtgaagatgagctgcaaagccagcggctacgccttcagcagctactggatcaactggatgaagcagaaacccggccagggactcgaatggatcggccaaatctatcccggcgacggcgacaccaactacaacggcaagttcaagggcagagccacactgaccgccgatacctctagcagcacagcctacatgcagctgagcagcctgaccagcgaagatagcgccgtgtacttctgtgcccggtccatcacaacagtcgtgggctgcgctatggactattggggccagggaacaagcgtgaccgtgtctagtacgcgtgacggtaacgaggagatgggaggaatcactcaaaccccttacaaagtctcaatttcaggaacaactgttatccttacatgtccccagtatcctggcagcgagatcctttggcagcataacgacaagaatatagggggagatgaagacgataagaatatcggatctgacgaggatcacttgagcctgaaagagttctccgagcttgaacaaagcggatattatgtgtgctatccgcgcgggtcaaagccggaagacgctaacttttacctttatctccgagccagagtgtgcgaaaattgcatggaaatggacgttatgtccgttgctacaatagttatcgtagatatatgcatcacgggtggactgcttctgctggtttattattggtccaagaatagaaaggccaaagctaaacccgtgaccagaggcgctggcgcaggcggaaggcaaaggggacaaaacaaagaacggccaccaccagtgccaaatccagattatgagcctattcggaaaggacagagggacctgtactctggcctgaatcagagaagaatc

SEQ ID NO: 5843 - DNA, 2076 bp, Artificial Sequence
  Synthetic Polynucloetide
atggccttaccagtgaccgccttgctcctgccgctggccttgctgctccacgccgccaggccggaggtgcaactggtggaaagcggcggaggctctgtgcagacaggcggctctctgagactgacctgtgccgccagcggcagaaccagcagatcctatggcatgggctggttcagacaggcccctggcaaagaacgcgagttcgtgtccggcatctcttggagaggcgacagcaccggctacgccgatagcgtgaagggccggttcaccatcagccgggacaacgccaagaacaccgtggacctgcagatgaacagcctgaagcccgaggacaccgccatctactactgtgccgctgccgccggatctgcttggtacggcacactgtacgagtacgactactggggccagggcacccttgtgaccgtgtcatctggcggaggaagcggcggaggatctgaagtgcaactggtggaatctggaggctctctggtgcagccagggggaagcctgagactgtcttgtgccgcttccggcttcaccttcgacgactacgccatgagctgggtgcgccaggtgccaggcaaaggcctggaatgggtgtccagcatcaactggagcggcacccacaccgattacgccgactccgtgaaaggcagattcacaatcagcagaaacaacgccaacaataccctgtacctgcagatgaactccctgaagtctgaggatacagcagtgtattattgcgccaagaactggcgggacgccggcaccacttggtttgagaaaagcggctctgccggacagggaacccaagtgacagtgtcctccggtaccggcggaggcggatctggcggcggaggtagcggtggcggaggatctgaattcgacatccagatgacacagagccctagcagcctgtctgccagcgtgggagacagagtgaccatcacatgcaaggccagcgaccacatcaacaactggctggcctggtatcagcagaagcctggacaggcccctaagctgctgatctacggcgctaccacactggaaacaggcgtgcccagcagattttctggcagcggctctggcaccgactacaccctgacaatatccagcctccagcctgaggacttcgccacctactactgtcagcagagctggaacaccccttggacattcggccagggcaccaagctggaaatcaagagaggcggaggcggaagtggaggcggaggatctggcggcggaggctctcaagttcagcttcaacagcctggcgctgagctggtcaaacctggcgcttctgtgaagatgagctgcaaagccagcggctacgccttcagcagctactggatcaactggatgaagcagaaacccggccagggactcgaatggatcggccaaatctatcccggcgacggcgacaccaactacaacggcaagttcaagggcagagccacactgaccgccgatacctctagcagcacagcctacatgcagctgagcagcctgaccagcgaagatagcgccgtgtacttctgtgcccggtccatcacaacagtcgtgggctgcgctatggactattggggccagggaacaagcgtgaccgtgtctagtacgcgtttcaagatccccatcgaggaactggaagatcgggtgttcgtgaactgcaacacctctatcacctgggtggaaggcaccgtgggaacactgctgagcgacatcaccagactggacctcggcaagcggattctggaccctcggggcatctacagatgcaacggcaccgacatctacaaggacaaagaaagcaccgtgcaggtccactacagaatgtgccagtcctgcgtggaactggaccctgctacagtggccggcatcatcgtgaccgatgtgatcgctactctgctgctggctctgggagtgttctgcttcgccggacacgaaacaggcagactgtctggcgctgccgatacacaggccctgctgagaaacgaccaagtgtatcagcccctgcgcgacagagatgatgcccagtattctcacctcggcggcaactgggctagaaacaag

SEQ ID NO: 5844 - DNA, 2106 bp, Artificial Sequence
  Synthetic Polynucloetide
atggccttaccagtgaccgccttgctcctgccgctggccttgctgctccacgccgccaggccggaggtgcaactggtggaaagcggcggaggctctgtgcagacaggcggctctctgagactgacctgtgccgccagcggcagaaccagcagatcctatggcatgggctggttcagacaggcccctggcaaagaacgcgagttcgtgtccggcatctcttggagaggcgacagcaccggctacgccgatagcgtgaagggccggttcaccatcagccgggacaacgccaagaacaccgtggacctgcagatgaacagcctgaagcccgaggacaccgccatctactactgtgccgctgccgccggatctgcttggtacggcacactgtacgagtacgactactggggccagggcacccttgtgaccgtgtcatctggcggaggaagcggcggaggatctgaagtgcaactggtggaatctggaggctctctggtgcagccagggggaagcctgagactgtcttgtgccgcttccggcttcaccttcgacgactacgccatgagctgggtgcgccaggtgccaggcaaaggcctggaatgggtgtccagcatcaactggagcggcacccacaccgattacgccgactccgtgaaaggcagattcacaatcagcagaaacaacgccaacaataccctgtacctgcagatgaactccctgaagtctgaggatacagcagtgtattattgcgccaagaactggcgggacgccggcaccacttggtttgagaaaagcggctctgccggacagggaacccaagtgacagtgtcctccggtaccggcggaggcggatctggcggcggaggtagcggtggcggaggatctgaattcgacatccagatgacacagagccctagcagcctgtctgccagcgtgggagacagagtgaccatcacatgcaaggccagcgaccacatcaacaactggctggcctggtatcagcagaagcctggacaggcccctaagctgctgatctacggcgctaccacactggaaacaggcgtgcccagcagattttctggcagcggctctggcaccgactacaccctgacaatatccagcctccagcctgaggacttcgccacctactactgtcagcagagctggaacaccccttggacattcggccagggcaccaagctggaaatcaagagaggcggaggcggaagtggaggcggaggatctggcggcggaggctctcaagttcagcttcaacagcctggcgctgagctggtcaaacctggcgcttctgtgaagatgagctgcaaagccagcggctacgccttcagcagctactggatcaactggatgaagcagaaacccggccagggactcgaatggatcggccaaatctatcccggcgacggcgacaccaactacaacggcaagttcaagggcagagccacactgaccgccgatacctctagcagcacagcctacatgcagctgagcagcctgaccagcgaagatagcgccgtgtacttctgtgcccggtccatcacaacagtcgtgggctgcgctatggactattggggccagggaacaagcgtgaccgtgtctagtacgcgtcagagcatcaagggcaaccacctggtcaaggtgtacgactaccaagaggacggcagcgtgctgctgacatgtgatgccgaggccaagaacatcacctggtttaaggacggcaagatgatcggcttcctgaccgaggacaagaagaagtggaacctgggcagcaacgctaaggaccccagaggcatgtatcagtgcaagggcagccagaacaagagcaagcccctccaggtgtactaccggatgtgccagaactgcatcgagctgaacgccgctaccatcagcggctttctgttcgccgagatcgtgtccatcttcgtgctggccgtgggcgtgtactttatcgctggacaggatggcgtgcggcagagcagagcttccgataagcaaaccctgctgcctaacgaccagctgtaccagcctctgaaggacagagaggacgaccagtacagccacctccagggcaatcagctgagaagaaac

SEQ ID NO: 5845 - DNA, 2055 bp, Artificial Sequence
  Synthetic Polynucloetide
atggccttaccagtgaccgccttgctcctgccgctggccttgctgctccacgccgccaggccggaggtgcaactggtggaaagcggcggaggctctgtgcagacaggcggctctctgagactgacctgtgccgccagcggcagaaccagcagatcctatggcatgggctggttcagacaggcccctggcaaagaacgcgagttcgtgtccggcatctcttggagaggcgacagcaccggctacgccgatagcgtgaagggccggttcaccatcagccgggacaacgccaagaacaccgtggacctgcagatgaacagcctgaagcccgaggacaccgccatctactactgtgccgctgccgccggatctgcttggtacggcacactgtacgagtacgactactggggccagggcacccttgtgaccgtgtcatctggcggaggaagcggcggaggatctgaagtgcaactggtggaatctggaggctctctggtgcagccagggggaagcctgagactgtcttgtgccgcttccggcttcaccttcgacgactacgccatgagctgggtgcgccaggtgccaggcaaaggcctggaatgggtgtccagcatcaactggagcggcacccacaccgattacgccgactccgtgaaaggcagattcacaatcagcagaaacaacgccaacaataccctgtacctgcagatgaactccctgaagtctgaggatacagcagtgtattattgcgccaagaactggcgggacgccggcaccacttggtttgagaaaagcggctctgccggacagggaacccaagtgacagtgtcctccggtaccggcggaggcggatctggcggcggaggtagcggtggcggaggatctgaattcgacatccagatgacacagagccctagcagcctgtctgccagcgtgggagacagagtgaccatcacatgcaaggccagcgaccacatcaacaactggctggcctggtatcagcagaagcctggacaggcccctaagctgctgatctacggcgctaccacactggaaacaggcgtgcccagcagattttctggcagcggctctggcaccgactacaccctgacaatatccagcctccagcctgaggacttcgccacctactactgtcagcagagctggaacaccccttggacattcggccagggcaccaagctggaaatcaagagaggcggaggcggaagtggaggcggaggatctggcggcggaggctctcaagttcagcttcaacagcctggcgctgagctggtcaaacctggcgcttctgtgaagatgagctgcaaagccagcggctacgccttcagcagctactggatcaactggatgaagcagaaacccggccagggactcgaatggatcggccaaatctatcccggcgacggcgacaccaactacaacggcaagttcaagggcagagccacactgaccgccgatacctctagcagcacagcctacatgcagctgagcagcctgaccagcgaagatagcgccgtgtacttctgtgcccggtccatcacaacagtcgtgggctgcgctatggactattggggccagggaacaagcgtgaccgtgtctagtacgcgtcagagttttgggttgttggaccctaaattgtgctatctgttggacggaatcctgttcatttacggagtgatcctgaccgcattgttcctgcgggttaagttttccagatccgcagacgcacccgcttaccaacaagggcagaaccaactctacaatgaacttaatttggggcggagggaagagtacgacgttctggacaaaaggaggggacgagatcccgagatgggcggaaagcctcagcgaaggaagaatccgcaagaggggctttataacgaactccagaaagataaaatggcagaagcctatagtgagattgggatgaagggagaaaggaggaggggtaaaggtcacgatgggttgtaccaaggattgagcacagccactaaagatacctatgatgcgctccacatgcaggccctgccgccaaga

SEQ ID NO: 5846 - DNA, 2757 bp, Artificial Sequence
  Synthetic Polynucloetide
atggccttaccagtgaccgccttgctcctgccgctggccttgctgctccacgccgccaggccggaggtgcaactggtggaaagcggcggaggctctgtgcagacaggcggctctctgagactgacctgtgccgccagcggcagaaccagcagatcctatggcatgggctggttcagacaggcccctggcaaagaacgcgagttcgtgtccggcatctcttggagaggcgacagcaccggctacgccgatagcgtgaagggccggttcaccatcagccgggacaacgccaagaacaccgtggacctgcagatgaacagcctgaagcccgaggacaccgccatctactactgtgccgctgccgccggatctgcttggtacggcacactgtacgagtacgactactggggccagggcacccttgtgaccgtgtcatctggcggaggaagcggcggaggatctgaagtgcaactggtggaatctggaggctctctggtgcagccagggggaagcctgagactgtcttgtgccgcttccggcttcaccttcgacgactacgccatgagctgggtgcgccaggtgccaggcaaaggcctggaatgggtgtccagcatcaactggagcggcacccacaccgattacgccgactccgtgaaaggcagattcacaatcagcagaaacaacgccaacaataccctgtacctgcagatgaactccctgaagtctgaggatacagcagtgtattattgcgccaagaactggcgggacgccggcaccacttggtttgagaaaagcggctctgccggacagggaacccaagtgacagtgtcctccggtaccggcggaggcggatctggcggcggaggtagcggtggcggaggatctgaattcgacatccagatgacacagagccctagcagcctgtctgccagcgtgggagacagagtgaccatcacatgcaaggccagcgaccacatcaacaactggctggcctggtatcagcagaagcctggacaggcccctaagctgctgatctacggcgctaccacactggaaacaggcgtgcccagcagattttctggcagcggctctggcaccgactacaccctgacaatatccagcctccagcctgaggacttcgccacctactactgtcagcagagctggaacaccccttggacattcggccagggcaccaagctggaaatcaagagaggcggaggcggaagtggaggcggaggatctggcggcggaggctctcaagttcagcttcaacagcctggcgctgagctggtcaaacctggcgcttctgtgaagatgagctgcaaagccagcggctacgccttcagcagctactggatcaactggatgaagcagaaacccggccagggactcgaatggatcggccaaatctatcccggcgacggcgacaccaactacaacggcaagttcaagggcagagccacactgaccgccgatacctctagcagcacagcctacatgcagctgagcagcctgaccagcgaagatagcgccgtgtacttctgtgcccggtccatcacaacagtcgtgggctgcgctatggactattggggccagggaacaagcgtgaccgtgtctagtacgcgtgggagcggcatccagaaccctgatcctgccgtgtaccagctgcgggatagcaagagcagcgacaagagcgtgtgtctgttcaccgacttcgacagccagaccaacgtgtcccagagcaaggactccgacgtgtacatcaccgataagaccgtgctggacatgcggagcatggacttcaagagcaactccgccgtggcctggtccaacaagtccgatttcgcctgcgccaacgccttcaacaacagcattatccccgaggacacattcttcccaagccccgagagcagctgcgacgtgaagctggtggaaaagagcttcgagacagacaccaacctgaacttccagaacctgagcgtgatcggcttcagaatcctgctgctgaaagtggccggctttaacctgctgatgaccctgcggctgtggtccagccgcgccaagagaagcggatctggcgtgaagcagaccctgaatttcgacctgctgaagctggctggcgacgtggaatccaacccaggcccttctagaggccatatgaccgagtacaagcccacggtgcgcctcgccacccgcgacgacgtccccagggccgtacgcaccctcgccgccgcgttcgccgactaccccgccacgcgccacaccgtcgatccggaccgccacatcgagcgggtcaccgagctgcaagaactcttcctcacgcgcgtcgggctcgacatcggcaaggtgtgggtcgcggacgacggcgccgcggtggcggtctggaccacgccggagagcgtcgaagcgggggcggtgttcgccgagatcggcccgcgcatggccgagttgagcggttcccggctggccgcgcagcaacagatggaaggcctcctggcgccgcaccggcccaaggagcccgcgtggttcctggccaccgtcggcgtctcgcccgaccaccagggcaagggtctgggcagcgccgtcgtgctccccggagtggaggcggccgagcgcgccggggtgcccgccttcctggagacctccgcgccccgcaacctccccttctacgagcggctcggcttcaccgtcaccgccgacgtcgaggtgcccgaaggaccgcgcacctggtgcatgacccgcaagcccggtgcctga

SEQ ID NO: 5847 - DNA, 2853 bp, Artificial Sequence
  Synthetic Polynucloetide
atggccttaccagtgaccgccttgctcctgccgctggccttgctgctccacgccgccaggccggaggtgcaactggtggaaagcggcggaggctctgtgcagacaggcggctctctgagactgacctgtgccgccagcggcagaaccagcagatcctatggcatgggctggttcagacaggcccctggcaaagaacgcgagttcgtgtccggcatctcttggagaggcgacagcaccggctacgccgatagcgtgaagggccggttcaccatcagccgggacaacgccaagaacaccgtggacctgcagatgaacagcctgaagcccgaggacaccgccatctactactgtgccgctgccgccggatctgcttggtacggcacactgtacgagtacgactactggggccagggcacccttgtgaccgtgtcatctggcggaggaagcggcggaggatctgaagtgcaactggtggaatctggaggctctctggtgcagccagggggaagcctgagactgtcttgtgccgcttccggcttcaccttcgacgactacgccatgagctgggtgcgccaggtgccaggcaaaggcctggaatgggtgtccagcatcaactggagcggcacccacaccgattacgccgactccgtgaaaggcagattcacaatcagcagaaacaacgccaacaataccctgtacctgcagatgaactccctgaagtctgaggatacagcagtgtattattgcgccaagaactggcgggacgccggcaccacttggtttgagaaaagcggctctgccggacagggaacccaagtgacagtgtcctccggtaccggcggaggcggatctggcggcggaggtagcggtggcggaggatctgaattcgacatccagatgacacagagccctagcagcctgtctgccagcgtgggagacagagtgaccatcacatgcaaggccagcgaccacatcaacaactggctggcctggtatcagcagaagcctggacaggcccctaagctgctgatctacggcgctaccacactggaaacaggcgtgcccagcagattttctggcagcggctctggcaccgactacaccctgacaatatccagcctccagcctgaggacttcgccacctactactgtcagcagagctggaacaccccttggacattcggccagggcaccaagctggaaatcaagagaggcggaggcggaagtggaggcggaggatctggcggcggaggctctcaagttcagcttcaacagcctggcgctgagctggtcaaacctggcgcttctgtgaagatgagctgcaaagccagcggctacgccttcagcagctactggatcaactggatgaagcagaaacccggccagggactcgaatggatcggccaaatctatcccggcgacggcgacaccaactacaacggcaagttcaagggcagagccacactgaccgccgatacctctagcagcacagcctacatgcagctgagcagcctgaccagcgaagatagcgccgtgtacttctgtgcccggtccatcacaacagtcgtgggctgcgctatggactattggggccagggaacaagcgtgaccgtgtctagtctcgaggacctgaagaacgtgttcccacctgaggtggccgtgttcgagcctagcgaggccgagatcagccacacccagaaagccaccctcgtgtgcctggctaccggcttctaccccgaccatgtggaactgtcttggtgggtcaacggcaaagaggtgcacagcggcgtgtctaccgacccccagccactgaaagaacagcccgccctgaacgacagccggtactgcctgagcagcagactgagagtgtccgccaccttctggcagaacccccggaaccacttcagatgccaggtgcagttctacggcctgagcgagaacgacgagtggacccaggacagagccaagcccgtgacccagatcgtgtctgccgaagcctggggcagagccgattgcggctttaccagcgagagctaccagcagggcgtgctgagcgccaccatcctgtacgagatcctgctgggcaaggccaccctgtacgccgtgctggtgtctgccctggtgctgatggctatggtcaagcggaaggacagccggggaagggccaagcgatctggatctggagcaacaaacttctcactactcaaacaagcaggtgacgtggaggagaatcccgggcctactagaggccatatgaccgagtacaagcccacggtgcgcctcgccacccgcgacgacgtccccagggccgtacgcaccctcgccgccgcgttcgccgactaccccgccacgcgccacaccgtcgatccggaccgccacatcgagcgggtcaccgagctgcaagaactcttcctcacgcgcgtcgggctcgacatcggcaaggtgtgggtcgcggacgacggcgccgcggtggcggtctggaccacgccggagagcgtcgaagcgggggcggtgttcgccgagatcggcccgcgcatggccgagttgagcggttcccggctggccgcgcagcaacagatggaaggcctcctggcgccgcaccggcccaaggagcccgcgtggttcctggccaccgtcggcgtctcgcccgaccaccagggcaagggtctgggcagcgccgtcgtgctccccggagtggaggcggccgagcgcgccggggtgcccgccttcctggagacctccgcgccccgcaacctccccttctacgagcggctcggcttcaccgtcaccgccgacgtcgaggtgcccgaaggaccgcgcacctggtgcatgacccgcaagcccggtgcctga

SEQ ID NO: 5848 - DNA, 3003 bp, Artificial Sequence
  Synthetic Polynucloetide
atggccttaccagtgaccgccttgctcctgccgctggccttgctgctccacgccgccaggccggaggtgcaactggtggaaagcggcggaggctctgtgcagacaggcggctctctgagactgacctgtgccgccagcggcagaaccagcagatcctatggcatgggctggttcagacaggcccctggcaaagaacgcgagttcgtgtccggcatctcttggagaggcgacagcaccggctacgccgatagcgtgaagggccggttcaccatcagccgggacaacgccaagaacaccgtggacctgcagatgaacagcctgaagcccgaggacaccgccatctactactgtgccgctgccgccggatctgcttggtacggcacactgtacgagtacgactactggggccagggcacccttgtgaccgtgtcatctggcggaggaagcggcggaggatctgaagtgcaactggtggaatctggaggctctctggtgcagccagggggaagcctgagactgtcttgtgccgcttccggcttcaccttcgacgactacgccatgagctgggtgcgccaggtgccaggcaaaggcctggaatgggtgtccagcatcaactggagcggcacccacaccgattacgccgactccgtgaaaggcagattcacaatcagcagaaacaacgccaacaataccctgtacctgcagatgaactccctgaagtctgaggatacagcagtgtattattgcgccaagaactggcgggacgccggcaccacttggtttgagaaaagcggctctgccggacagggaacccaagtgacagtgtcctccggtaccggcggaggcggatctggcggcggaggtagcggtggcggaggatctgaattcgacatccagatgacacagagccctagcagcctgtctgccagcgtgggagacagagtgaccatcacatgcaaggccagcgaccacatcaacaactggctggcctggtatcagcagaagcctggacaggcccctaagctgctgatctacggcgctaccacactggaaacaggcgtgcccagcagattttctggcagcggctctggcaccgactacaccctgacaatatccagcctccagcctgaggacttcgccacctactactgtcagcagagctggaacaccccttggacattcggccagggcaccaagctggaaatcaagagaggcggaggcggaagtggaggcggaggatctggcggcggaggctctcaagttcagcttcaacagcctggcgctgagctggtcaaacctggcgcttctgtgaagatgagctgcaaagccagcggctacgccttcagcagctactggatcaactggatgaagcagaaacccggccagggactcgaatggatcggccaaatctatcccggcgacggcgacaccaactacaacggcaagttcaagggcagagccacactgaccgccgatacctctagcagcacagcctacatgcagctgagcagcctgaccagcgaagatagcgccgtgtacttctgtgcccggtccatcacaacagtcgtgggctgcgctatggactattggggccagggaacaagcgtgaccgtgtctagtacgcgtgagcagaaactgatctcggaagaggatctggggagcggcaccccattcccttctctggcccctcccatcatgctgctggtggacggcaagcagcagatggtggtcgtgtgcctggtgctggatgtggccccacctggactggacagccccatctggtttagcgccggcaatggctctgccctggacgcctttacctacggcccaagccctgccaccgatggcacctggacaaatctggcccacctgagcctgcccagcgaggaactggcttcttgggagcctctcgtgtgccacacaggacctggcgctgagggacacagcagatccacccagcctatgcacctgtctggcgaggccagcaccgccagaacctgtcctcaggaacctctgagaggcacccctggcggagcactgtggctgggagtgctgagactgctgctgttcaagctgctgctgtttgacctgctgctgacctgctcctgtctgtgcgatcctgccggccctctgccttctcctgccaccaccacaagactgagagccctgggcagccacagactgcaccctgccacagagacaggcggcagagaggccacaagcagccctagaccccagcccagagacagaagatggggcgataccccccctggcagaaagcctggatctccagtccgcgccaagagaagcggatctggcgtgaagcagaccctgaatttcgacctgctgaagctggctggcgacgtggaatccaacccaggcccttctagatctagaggccatatgaccgagtacaagcccacggtgcgcctcgccacccgcgacgacgtccccagggccgtacgcaccctcgccgccgcgttcgccgactaccccgccacgcgccacaccgtcgatccggaccgccacatcgagcgggtcaccgagctgcaagaactcttcctcacgcgcgtcgggctcgacatcggcaaggtgtgggtcgcggacgacggcgccgcggtggcggtctggaccacgccggagagcgtcgaagcgggggcggtgttcgccgagatcggcccgcgcatggccgagttgagcggttcccggctggccgcgcagcaacagatggaaggcctcctggcgccgcaccggcccaaggagcccgcgtggttcctggccaccgtcggcgtctcgcccgaccaccagggcaagggtctgggcagcgccgtcgtgctccccggagtggaggcggccgagcgcgccggggtgcccgccttcctggagacctccgcgccccgcaacctccccttctacgagcggctcggcttcaccgtcaccgccgacgtcgaggtgcccgaaggaccgcgcacctggtgcatgacccgcaagcccggtgcctga

SEQ ID NO: 5849 - DNA, 2445 bp, Artificial Sequence
  Synthetic Polynucloetide
atggccttaccagtgaccgccttgctcctgccgctggccttgctgctccacgccgccaggccggaggtgcaactggtggaaagcggcggaggctctgtgcagacaggcggctctctgagactgacctgtgccgccagcggcagaaccagcagatcctatggcatgggctggttcagacaggcccctggcaaagaacgcgagttcgtgtccggcatctcttggagaggcgacagcaccggctacgccgatagcgtgaagggccggttcaccatcagccgggacaacgccaagaacaccgtggacctgcagatgaacagcctgaagcccgaggacaccgccatctactactgtgccgctgccgccggatctgcttggtacggcacactgtacgagtacgactactggggccagggcacccttgtgaccgtgtcatctggcggaggaagcggcggaggatctgaagtgcaactggtggaatctggaggctctctggtgcagccagggggaagcctgagactgtcttgtgccgcttccggcttcaccttcgacgactacgccatgagctgggtgcgccaggtgccaggcaaaggcctggaatgggtgtccagcatcaactggagcggcacccacaccgattacgccgactccgtgaaaggcagattcacaatcagcagaaacaacgccaacaataccctgtacctgcagatgaactccctgaagtctgaggatacagcagtgtattattgcgccaagaactggcgggacgccggcaccacttggtttgagaaaagcggctctgccggacagggaacccaagtgacagtgtcctccggtaccggcggaggcggatctggcggcggaggtagcggtggcggaggatctgaattcgacatccagatgacacagagccctagcagcctgtctgccagcgtgggagacagagtgaccatcacatgcaaggccagcgaccacatcaacaactggctggcctggtatcagcagaagcctggacaggcccctaagctgctgatctacggcgctaccacactggaaacaggcgtgcccagcagattttctggcagcggctctggcaccgactacaccctgacaatatccagcctccagcctgaggacttcgccacctactactgtcagcagagctggaacaccccttggacattcggccagggcaccaagctggaaatcaagagactcgaggacctgaagaacgtgttcccacctgaggtggccgtgttcgagcctagcgaggccgagatcagccacacccagaaagccaccctcgtgtgcctggctaccggcttctaccccgaccatgtggaactgtcttggtgggtcaacggcaaagaggtgcacagcggcgtgtctaccgacccccagccactgaaagaacagcccgccctgaacgacagccggtactgcctgagcagcagactgagagtgtccgccaccttctggcagaacccccggaaccacttcagatgccaggtgcagttctacggcctgagcgagaacgacgagtggacccaggacagagccaagcccgtgacccagatcgtgtctgccgaagcctggggcagagccgattgcggctttaccagcgagagctaccagcagggcgtgctgagcgccaccatcctgtacgagatcctgctgggcaaggccaccctgtacgccgtgctggtgtctgccctggtgctgatggctatggtcaagcggaaggacagccggggaagggccaagcgatctggatctggagcaacaaacttctcactactcaaacaagcaggtgacgtggaggagaatcccgggcctactagaggccatatgaccgagtacaagcccacggtgcgcctcgccacccgcgacgacgtccccagggccgtacgcaccctcgccgccgcgttcgccgactaccccgccacgcgccacaccgtcgatccggaccgccacatcgagcgggtcaccgagctgcaagaactcttcctcacgcgcgtcgggctcgacatcggcaaggtgtgggtcgcggacgacggcgccgcggtggcggtctggaccacgccggagagcgtcgaagcgggggcggtgttcgccgagatcggcccgcgcatggccgagttgagcggttcccggctggccgcgcagcaacagatggaaggcctcctggcgccgcaccggcccaaggagcccgcgtggttcctggccaccgtcggcgtctcgcccgaccaccagggcaagggtctgggcagcgccgtcgtgctccccggagtggaggcggccgagcgcgccggggtgcccgccttcctggagacctccgcgccccgcaacctccccttctacgagcggctcggcttcaccgtcaccgccgacgtcgaggtgcccgaaggaccgcgcacctggtgcatgacccgcaagcccggtgcctga

SEQ ID NO: 5850 - DNA, 1752 bp, Artificial Sequence
  Synthetic Polynucloetide
atggccttaccagtgaccgccttgctcctgccgctggccttgctgctccacgccgccaggccggaggtgcaactggtggaaagcggcggaggctctgtgcagacaggcggctctctgagactgacctgtgccgccagcggcagaaccagcagatcctatggcatgggctggttcagacaggcccctggcaaagaacgcgagttcgtgtccggcatctcttggagaggcgacagcaccggctacgccgatagcgtgaagggccggttcaccatcagccgggacaacgccaagaacaccgtggacctgcagatgaacagcctgaagcccgaggacaccgccatctactactgtgccgctgccgccggatctgcttggtacggcacactgtacgagtacgactactggggccagggcacccttgtgaccgtgtcatctggcggaggaagcggcggaggatctgaagtgcaactggtggaatctggaggctctctggtgcagccagggggaagcctgagactgtcttgtgccgcttccggcttcaccttcgacgactacgccatgagctgggtgcgccaggtgccaggcaaaggcctggaatgggtgtccagcatcaactggagcggcacccacaccgattacgccgactccgtgaaaggcagattcacaatcagcagaaacaacgccaacaataccctgtacctgcagatgaactccctgaagtctgaggatacagcagtgtattattgcgccaagaactggcgggacgccggcaccacttggtttgagaaaagcggctctgccggacagggaacccaagtgacagtgtcctccggtaccggcggaggcggatctggcggcggaggtagcggtggcggaggatctgaattcgacatccagatgacacagagccctagcagcctgtctgccagcgtgggagacagagtgaccatcacatgcaaggccagcgaccacatcaacaactggctggcctggtatcagcagaagcctggacaggcccctaagctgctgatctacggcgctaccacactggaaacaggcgtgcccagcagattttctggcagcggctctggcaccgactacaccctgacaatatccagcctccagcctgaggacttcgccacctactactgtcagcagagctggaacaccccttggacattcggccagggcaccaagctggaaatcaagagactcgaggacctgaagaacgtgttcccacctgaggtggccgtgttcgagcctagcgaggccgagatcagccacacccagaaagccaccctcgtgtgcctggctaccggcttctaccccgaccatgtggaactgtcttggtgggtcaacggcaaagaggtgcacagcggcgtgtctaccgacccccagccactgaaagaacagcccgccctgaacgacagccggtactgcctgagcagcagactgagagtgtccgccaccttctggcagaacccccggaaccacttcagatgccaggtgcagttctacggcctgagcgagaacgacgagtggacccaggacagagccaagcccgtgacccagatcgtgtctgccgaagcctggggcagagccgattgcggctttaccagcgagagctaccagcagggcgtgctgagcgccaccatcctgtacgagatcctgctgggcaaggccaccctgtacgccgtgctggtgtctgccctggtgctgatggctatggtcaagcggaaggacagccgggga

SEQ ID NO: 5851 - DNA, 2499 bp, Artificial Sequence
  Synthetic Polynucloetide
atggccttaccagtgaccgccttgctcctgccgctggccttgctgctccacgccgccaggccggaggtgcaactggtggaaagcggcggaggctctgtgcagacaggcggctctctgagactgacctgtgccgccagcggcagaaccagcagatcctatggcatgggctggttcagacaggcccctggcaaagaacgcgagttcgtgtccggcatctcttggagaggcgacagcaccggctacgccgatagcgtgaagggccggttcaccatcagccgggacaacgccaagaacaccgtggacctgcagatgaacagcctgaagcccgaggacaccgccatctactactgtgccgctgccgccggatctgcttggtacggcacactgtacgagtacgactactggggccagggcacccttgtgaccgtgtcatctggcggaggaagcggcggaggatctgaagtgcaactggtggaatctggaggctctctggtgcagccagggggaagcctgagactgtcttgtgccgcttccggcttcaccttcgacgactacgccatgagctgggtgcgccaggtgccaggcaaaggcctggaatgggtgtccagcatcaactggagcggcacccacaccgattacgccgactccgtgaaaggcagattcacaatcagcagaaacaacgccaacaataccctgtacctgcagatgaactccctgaagtctgaggatacagcagtgtattattgcgccaagaactggcgggacgccggcaccacttggtttgagaaaagcggctctgccggacagggaacccaagtgacagtgtcctccggtaccggcggaggcggatctggcggcggaggtagcggtggcggaggatctgaattcgacatccagatgacacagagccctagcagcctgtctgccagcgtgggagacagagtgaccatcacatgcaaggccagcgaccacatcaacaactggctggcctggtatcagcagaagcctggacaggcccctaagctgctgatctacggcgctaccacactggaaacaggcgtgcccagcagattttctggcagcggctctggcaccgactacaccctgacaatatccagcctccagcctgaggacttcgccacctactactgtcagcagagctggaacaccccttggacattcggccagggcaccaagctggaaatcaagagactcgaggggaaaccaattcccaaccctcttctgggactggattcaaccggcagcggcgaggacctgaagaacgtgttcccacctgaggtggccgtgttcgagcctagcgaggccgagatcagccacacccagaaagccaccctcgtgtgcctggctaccggcttctaccccgaccatgtggaactgtcttggtgggtcaacggcaaagaggtgcacagcggcgtgtgtaccgacccccagccactgaaagaacagcccgccctgaacgacagccggtactgcctgagcagcagactgagagtgtccgccaccttctggcagaacccccggaaccacttcagatgccaggtgcagttctacggcctgagcgagaacgacgagtggacccaggacagagccaagcccgtgacccagatcgtgtctgccgaagcctggggcagagccgattgcggctttaccagcgagagctaccagcagggcgtgctgagcgccaccatcctgtacgagatcctgctgggcaaggccaccctgtacgccgtgctggtgtctgccctggtgctgatggctatggtcaagcggaaggacagccggggaagggccaagcgatctggatctggagcaacaaacttctcactactcaaacaagcaggtgacgtggaggagaatcccgggcctactagaggccatatgaccgagtacaagcccacggtgcgcctcgccacccgcgacgacgtccccagggccgtacgcaccctcgccgccgcgttcgccgactaccccgccacgcgccacaccgtcgatccggaccgccacatcgagcgggtcaccgagctgcaagaactcttcctcacgcgcgtcgggctcgacatcggcaaggtgtgggtcgcggacgacggcgccgcggtggcggtctggaccacgccggagagcgtcgaagcgggggcggtgttcgccgagatcggcccgcgcatggccgagttgagcggttcccggctggccgcgcagcaacagatggaaggcctcctggcgccgcaccggcccaaggagcccgcgtggttcctggccaccgtcggcgtctcgcccgaccaccagggcaagggtctgggcagcgccgtcgtgctccccggagtggaggcggccgagcgcgccggggtgcccgccttcctggagacctccgcgccccgcaacctccccttctacgagcggctcggcttcaccgtcaccgccgacgtcgaggtgcccgaaggaccgcgcacctggtgcatgacccgcaagcccggtgcctga

SEQ ID NO: 5852 - DNA, 1809 bp, Artificial Sequence
  Synthetic Polynucloetide
atggccttaccagtgaccgccttgctcctgccgctggccttgctgctccacgccgccaggccggaggtgcaactggtggaaagcggcggaggctctgtgcagacaggcggctctctgagactgacctgtgccgccagcggcagaaccagcagatcctatggcatgggctggttcagacaggcccctggcaaagaacgcgagttcgtgtccggcatctcttggagaggcgacagcaccggctacgccgatagcgtgaagggccggttcaccatcagccgggacaacgccaagaacaccgtggacctgcagatgaacagcctgaagcccgaggacaccgccatctactactgtgccgctgccgccggatctgcttggtacggcacactgtacgagtacgactactggggccagggcacccttgtgaccgtgtcatctggcggaggaagcggcggaggatctgaagtgcaactggtggaatctggaggctctctggtgcagccagggggaagcctgagactgtcttgtgccgcttccggcttcaccttcgacgactacgccatgagctgggtgcgccaggtgccaggcaaaggcctggaatgggtgtccagcatcaactggagcggcacccacaccgattacgccgactccgtgaaaggcagattcacaatcagcagaaacaacgccaacaataccctgtacctgcagatgaactccctgaagtctgaggatacagcagtgtattattgcgccaagaactggcgggacgccggcaccacttggtttgagaaaagcggctctgccggacagggaacccaagtgacagtgtcctccggtaccggcggaggcggatctggcggcggaggtagcggtggcggaggatctgaattcgacatccagatgacacagagccctagcagcctgtctgccagcgtgggagacagagtgaccatcacatgcaaggccagcgaccacatcaacaactggctggcctggtatcagcagaagcctggacaggcccctaagctgctgatctacggcgctaccacactggaaacaggcgtgcccagcagattttctggcagcggctctggcaccgactacaccctgacaatatccagcctccagcctgaggacttcgccacctactactgtcagcagagctggaacaccccttggacattcggccagggcaccaagctggaaatcaagagactcgaggggaaaccaattcccaaccctcttctgggactggattcaaccggcagcggcgaggacctgaagaacgtgttcccacctgaggtggccgtgttcgagcctagcgaggccgagatcagccacacccagaaagccaccctcgtgtgcctggctaccggcttctaccccgaccatgtggaactgtcttggtgggtcaacggcaaagaggtgcacagcggcgtgtgtaccgacccccagccactgaaagaacagcccgccctgaacgacagccggtactgcctgagcagcagactgagagtgtccgccaccttctggcagaacccccggaaccacttcagatgccaggtgcagttctacggcctgagcgagaacgacgagtggacccaggacagagccaagcccgtgacccagatcgtgtctgccgaagcctggggcagagccgattgcggctttaccagcgagagctaccagcagggcgtgctgagcgccaccatcctgtacgagatcctgctgggcaaggccaccctgtacgccgtgctggtgtctgccctggtgctgatggctatggtcaagcggaaggacagccggggatga

SEQ ID NO: 5853 - DNA, 2757 bp, Artificial Sequence
  Synthetic Polynucloetide
atggccttaccagtgaccgccttgctcctgccgctggccttgctgctccacgccgccaggccggaggtgcaactggtggaaagcggcggaggctctgtgcagacaggcggctctctgagactgacctgtgccgccagcggcagaaccagcagatcctatggcatgggctggttcagacaggcccctggcaaagaacgcgagttcgtgtccggcatctcttggagaggcgacagcaccggctacgccgatagcgtgaagggccggttcaccatcagccgggacaacgccaagaacaccgtggacctgcagatgaacagcctgaagcccgaggacaccgccatctactactgtgccgctgccgccggatctgcttggtacggcacactgtacgagtacgactactggggccagggcacccttgtgaccgtgtcatctggcggaggaagcggcggaggatctgaagtgcaactggtggaatctggaggctctctggtgcagccagggggaagcctgagactgtcttgtgccgcttccggcttcaccttcgacgactacgccatgagctgggtgcgccaggtgccaggcaaaggcctggaatgggtgtccagcatcaactggagcggcacccacaccgattacgccgactccgtgaaaggcagattcacaatcagcagaaacaacgccaacaataccctgtacctgcagatgaactccctgaagtctgaggatacagcagtgtattattgcgccaagaactggcgggacgccggcaccacttggtttgagaaaagcggctctgccggacagggaacccaagtgacagtgtcctccggtaccggcggaggcggatctggcggcggaggtagcggtggcggaggatctgaattcgacatccagatgacacagagccctagcagcctgtctgccagcgtgggagacagagtgaccatcacatgcaaggccagcgaccacatcaacaactggctggcctggtatcagcagaagcctggacaggcccctaagctgctgatctacggcgctaccacactggaaacaggcgtgcccagcagattttctggcagcggctctggcaccgactacaccctgacaatatccagcctccagcctgaggacttcgccacctactactgtcagcagagctggaacaccccttggacattcggccagggcaccaagctggaaatcaagagaggcggaggcggaagtggaggcggaggatctggcggcggaggctctcaagttcagcttcaacagcctggcgctgagctggtcaaacctggcgcttctgtgaagatgagctgcaaagccagcggctacgccttcagcagctactggatcaactggatgaagcagaaacccggccagggactcgaatggatcggccaaatctatcccggcgacggcgacaccaactacaacggcaagttcaagggcagagccacactgaccgccgatacctctagcagcacagcctacatgcagctgagcagcctgaccagcgaagatagcgccgtgtacttctgtgcccggtccatcacaacagtcgtgggctgcgctatggactattggggccagggaacaagcgtgaccgtgtctagtacgcgtgggagcggcatccagaaccctgatcctgccgtgtaccagctgcgggatagcaagagcagcgacaagagcgtgtgtctgttcaccgacttcgacagccagaccaacgtgtcccagagcaaggactccgacgtgtacatcaccgataagaccgtgctggacatgcggagcatggacttcaagagcaactccgccgtggcctggtccaacaagtccgatttcgcctgcgccaacgccttcaacaacagcattatccccgaggacacattcttcccaagcagcgacgtgccctgcgacgtgaagctggtggaaaagagcttcgagacagacaccaacctgaacttccagaacctgagcgtgatcggcttcagaatcctgctgctgaaagtggccggctttaacctgctgatgaccctgcggctgtggtccagccgcgccaagagaagcggatctggcgtgaagcagaccctgaatttcgacctgctgaagctggctggcgacgtggaatccaacccaggcccttctagaggccatatgaccgagtacaagcccacggtgcgcctcgccacccgcgacgacgtccccagggccgtacgcaccctcgccgccgcgttcgccgactaccccgccacgcgccacaccgtcgatccggaccgccacatcgagcgggtcaccgagctgcaagaactcttcctcacgcgcgtcgggctcgacatcggcaaggtgtgggtcgcggacgacggcgccgcggtggcggtctggaccacgccggagagcgtcgaagcgggggcggtgttcgccgagatcggcccgcgcatggccgagttgagcggttcccggctggccgcgcagcaacagatggaaggcctcctggcgccgcaccggcccaaggagcccgcgtggttcctggccaccgtcggcgtctcgcccgaccaccagggcaagggtctgggcagcgccgtcgtgctccccggagtggaggcggccgagcgcgccggggtgcccgccttcctggagacctccgcgccccgcaacctccccttctacgagcggctcggcttcaccgtcaccgccgacgtcgaggtgcccgaaggaccgcgcacctggtgcatgacccgcaagcccggtgcctga

SEQ ID NO: 5854 - DNA, 2853 bp, Artificial Sequence
  Synthetic Polynucloetide
atggccttaccagtgaccgccttgctcctgccgctggccttgctgctccacgccgccaggccggaggtgcaactggtggaaagcggcggaggctctgtgcagacaggcggctctctgagactgacctgtgccgccagcggcagaaccagcagatcctatggcatgggctggttcagacaggcccctggcaaagaacgcgagttcgtgtccggcatctcttggagaggcgacagcaccggctacgccgatagcgtgaagggccggttcaccatcagccgggacaacgccaagaacaccgtggacctgcagatgaacagcctgaagcccgaggacaccgccatctactactgtgccgctgccgccggatctgcttggtacggcacactgtacgagtacgactactggggccagggcacccttgtgaccgtgtcatctggcggaggaagcggcggaggatctgaagtgcaactggtggaatctggaggctctctggtgcagccagggggaagcctgagactgtcttgtgccgcttccggcttcaccttcgacgactacgccatgagctgggtgcgccaggtgccaggcaaaggcctggaatgggtgtccagcatcaactggagcggcacccacaccgattacgccgactccgtgaaaggcagattcacaatcagcagaaacaacgccaacaataccctgtacctgcagatgaactccctgaagtctgaggatacagcagtgtattattgcgccaagaactggcgggacgccggcaccacttggtttgagaaaagcggctctgccggacagggaacccaagtgacagtgtcctccggtaccggcggaggcggatctggcggcggaggtagcggtggcggaggatctgaattcgacatccagatgacacagagccctagcagcctgtctgccagcgtgggagacagagtgaccatcacatgcaaggccagcgaccacatcaacaactggctggcctggtatcagcagaagcctggacaggcccctaagctgctgatctacggcgctaccacactggaaacaggcgtgcccagcagattttctggcagcggctctggcaccgactacaccctgacaatatccagcctccagcctgaggacttcgccacctactactgtcagcagagctggaacaccccttggacattcggccagggcaccaagctggaaatcaagagaggcggaggcggaagtggaggcggaggatctggcggcggaggctctcaagttcagcttcaacagcctggcgctgagctggtcaaacctggcgcttctgtgaagatgagctgcaaagccagcggctacgccttcagcagctactggatcaactggatgaagcagaaacccggccagggactcgaatggatcggccaaatctatcccggcgacggcgacaccaactacaacggcaagttcaagggcagagccacactgaccgccgatacctctagcagcacagcctacatgcagctgagcagcctgaccagcgaagatagcgccgtgtacttctgtgcccggtccatcacaacagtcgtgggctgcgctatggactattggggccagggaacaagcgtgaccgtgtctagtctcgaggacctgaagaacgtgttcccacctgaggtggccgtgttcgagcctagcaaggccgagatcgcccacacccagaaagccaccctcgtgtgcctggctaccggcttctaccccgaccatgtggaactgtcttggtgggtcaacggcaaagaggtgcacagcggcgtgtctaccgacccccagccactgaaagaacagcccgccctgaacgacagccggtactgcctgagcagcagactgagagtgtccgccaccttctggcagaacccccggaaccacttcagatgccaggtgcagttctacggcctgagcgagaacgacgagtggacccaggacagagccaagcccgtgacccagatcgtgtctgccgaagcctggggcagagccgattgcggcatcaccagcgccagctaccaccagggcgtgctgagcgccaccatcctgtacgagatcctgctgggcaaggccaccctgtacgccgtgctggtgtctgccctggtgctgatggctatggtcaagcggaaggacagccggggaagggccaagcgatctggatctggagcaacaaacttctcactactcaaacaagcaggtgacgtggaggagaatcccgggcctactagaggccatatgaccgagtacaagcccacggtgcgcctcgccacccgcgacgacgtccccagggccgtacgcaccctcgccgccgcgttcgccgactaccccgccacgcgccacaccgtcgatccggaccgccacatcgagcgggtcaccgagctgcaagaactcttcctcacgcgcgtcgggctcgacatcggcaaggtgtgggtcgcggacgacggcgccgcggtggcggtctggaccacgccggagagcgtcgaagcgggggcggtgttcgccgagatcggcccgcgcatggccgagttgagcggttcccggctggccgcgcagcaacagatggaaggcctcctggcgccgcaccggcccaaggagcccgcgtggttcctggccaccgtcggcgtctcgcccgaccaccagggcaagggtctgggcagcgccgtcgtgctccccggagtggaggcggccgagcgcgccggggtgcccgccttcctggagacctccgcgccccgcaacctccccttctacgagcggctcggcttcaccgtcaccgccgacgtcgaggtgcccgaaggaccgcgcacctggtgcatgacccgcaagcccggtgcctga

SEQ ID NO: 5855 - DNA, 3627 bp, Artificial Sequence
  Synthetic Polynucloetide
atggccttaccagtgaccgccttgctcctgccgctggccttgctgctccacgccgccaggccggaggtgcaactggtggaaagcggcggaggctctgtgcagacaggcggctctctgagactgacctgtgccgccagcggcagaaccagcagatcctatggcatgggctggttcagacaggcccctggcaaagaacgcgagttcgtgtccggcatctcttggagaggcgacagcaccggctacgccgatagcgtgaagggccggttcaccatcagccgggacaacgccaagaacaccgtggacctgcagatgaacagcctgaagcccgaggacaccgccatctactactgtgccgctgccgccggatctgcttggtacggcacactgtacgagtacgactactggggccagggcacccttgtgaccgtgtcatctggcggaggaagcggcggaggatctgaagtgcaactggtggaatctggaggctctctggtgcagccagggggaagcctgagactgtcttgtgccgcttccggcttcaccttcgacgactacgccatgagctgggtgcgccaggtgccaggcaaaggcctggaatgggtgtccagcatcaactggagcggcacccacaccgattacgccgactccgtgaaaggcagattcacaatcagcagaaacaacgccaacaataccctgtacctgcagatgaactccctgaagtctgaggatacagcagtgtattattgcgccaagaactggcgggacgccggcaccacttggtttgagaaaagcggctctgccggacagggaacccaagtgacagtgtcctccggtaccggcggaggcggatctggcggcggaggtagcggtggcggaggatctgaattcgacatccagatgacacagagccctagcagcctgtctgccagcgtgggagacagagtgaccatcacatgcaaggccagcgaccacatcaacaactggctggcctggtatcagcagaagcctggacaggcccctaagctgctgatctacggcgctaccacactggaaacaggcgtgcccagcagattttctggcagcggctctggcaccgactacaccctgacaatatccagcctccagcctgaggacttcgccacctactactgtcagcagagctggaacaccccttggacattcggccagggcaccaagctggaaatcaagagactcgagatccagaaccctgatcctgccgtgtaccagctgcgggatagcaagagcagcgacaagagcgtgtgtctgttcaccgacttcgacagccagaccaacgtgtcccagagcaaggactccgacgtgtacatcaccgataagtgcgtgctggacatgcggagcatggacttcaagagcaactccgccgtggcctggtccaacaagtccgatttcgcctgcgccaacgccttcaacaacagcattatccccgaggacacattcttcccaagcagcgacgtgccctgcgacgtgaagctggtggaaaagagcttcgagacagacaccaacctgaacttccagaacctgagcgtgatcggcttcagaatcctgctgctgaaagtggccggctttaacctgctgatgaccctgcggctgtggtccagccgcgccaagagaagcggatctggcgtgaagcagaccctgaatttcgacctgctgaagctggctggcgacgtggaatccaacccaggccctactagtatggactggatttggcgcatccttttccttgtcggcgctgctaccggcgcccattccgggcccgtggacaacaagttcaacaaagagcggtacagcgcctactacgagatttggcaactgcccaacctgaacgtgcggcagaaggccgccttcatcggatctctgcaggacgaccctagccagagcgccaatctgctggccgaggccaagaagctgaacgacgcccaggcccctaaaggatccggcggcggaggatctggcggaggcggatctgggggcggaggctctttcgaacaagttcagcttcaacagcctggcgctgagctggtcaaacctggcgcttctgtgaagatgagctgcaaagccagcggctacgccttcagcagctactggatcaactggatgaagcagaaacccggccagggactcgaatggatcggccaaatctatcccggcgacggcgacaccaactacaacggcaagttcaagggcagagccacactgaccgccgatacctctagcagcacagcctacatgcagctgagcagcctgaccagcgaagatagcgccgtgtacttctgtgcccggtccatcacaacagtcgtgggctgcgctatggactattggggccagggaacaagcgtgaccgtgtctagtacgcgtgaggacctgaagaacgtgttcccacctgaggtggccgtgttcgagcctagcaaggccgagatcgcccacacccagaaagccaccctcgtgtgcctggctaccggcttctaccccgaccatgtggaactgtcttggtgggtcaacggcaaagaggtgcacagcggcgtgtgtaccgacccccagccactgaaagaacagcccgccctgaacgacagccggtactgcctgagcagcagactgagagtgtccgccaccttctggcagaacccccggaaccacttcagatgccaggtgcagttctacggcctgagcgagaacgacgagtggacccaggacagagccaagcccgtgacccagatcgtgtctgccgaagcctggggcagagccgattgcggcatcaccagcgccagctaccaccagggcgtgctgagcgccaccatcctgtacgagatcctgctgggcaaggccaccctgtacgccgtgctggtgtctgccctggtgctgatggctatggtcaagcggaaggacagccggggaagggccaagcgatctggatctggagcaacaaacttctcactactcaaacaagcaggtgacgtggaggagaatcccgggccttctagaggccatatgaccgagtacaagcccacggtgcgcctcgccacccgcgacgacgtccccagggccgtacgcaccctcgccgccgcgttcgccgactaccccgccacgcgccacaccgtcgatccggaccgccacatcgagcgggtcaccgagctgcaagaactcttcctcacgcgcgtcgggctcgacatcggcaaggtgtgggtcgcggacgacggcgccgcggtggcggtctggaccacgccggagagcgtcgaagcgggggcggtgttcgccgagatcggcccgcgcatggccgagttgagcggttcccggctggccgcgcagcaacagatggaaggcctcctggcgccgcaccggcccaaggagcccgcgtggttcctggccaccgtcggcgtctcgcccgaccaccagggcaagggtctgggcagcgccgtcgtgctccccggagtggaggcggccgagcgcgccggggtgcccgccttcctggagacctccgcgccccgcaacctccccttctacgagcggctcggcttcaccgtcaccgccgacgtcgaggtgcccgaaggaccgcgcacctggtgcatgacccgcaagcccggtgcctga

SEQ ID NO: 5856 - DNA, 3624 bp, Artificial Sequence
  Synthetic Polynucloetide
atggccttaccagtgaccgccttgctcctgccgctggccttgctgctccacgccgccaggccggaggtgcaactggtggaaagcggcggaggctctgtgcagacaggcggctctctgagactgacctgtgccgccagcggcagaaccagcagatcctatggcatgggctggttcagacaggcccctggcaaagaacgcgagttcgtgtccggcatctcttggagaggcgacagcaccggctacgccgatagcgtgaagggccggttcaccatcagccgggacaacgccaagaacaccgtggacctgcagatgaacagcctgaagcccgaggacaccgccatctactactgtgccgctgccgccggatctgcttggtacggcacactgtacgagtacgactactggggccagggcacccttgtgaccgtgtcatctggcggaggaagcggcggaggatctgaagtgcaactggtggaatctggaggctctctggtgcagccagggggaagcctgagactgtcttgtgccgcttccggcttcaccttcgacgactacgccatgagctgggtgcgccaggtgccaggcaaaggcctggaatgggtgtccagcatcaactggagcggcacccacaccgattacgccgactccgtgaaaggcagattcacaatcagcagaaacaacgccaacaataccctgtacctgcagatgaactccctgaagtctgaggatacagcagtgtattattgcgccaagaactggcgggacgccggcaccacttggtttgagaaaagcggctctgccggacagggaacccaagtgacagtgtcctccggtaccggcggaggcggatctggcggcggaggtagcggtggcggaggatctgaattcgacatccagatgacacagagccctagcagcctgtctgccagcgtgggagacagagtgaccatcacatgcaaggccagcgaccacatcaacaactggctggcctggtatcagcagaagcctggacaggcccctaagctgctgatctacggcgctaccacactggaaacaggcgtgcccagcagattttctggcagcggctctggcaccgactacaccctgacaatatccagcctccagcctgaggacttcgccacctactactgtcagcagagctggaacaccccttggacattcggccagggcaccaagctggaaatcaagagactcgaggacctgaagaacgtgttcccacctgaggtggccgtgttcgagcctagcaaggccgagatcgcccacacccagaaagccaccctcgtgtgcctggctaccggcttctaccccgaccatgtggaactgtcttggtgggtcaacggcaaagaggtgcacagcggcgtgtgtaccgacccccagccactgaaagaacagcccgccctgaacgacagccggtactgcctgagcagcagactgagagtgtccgccaccttctggcagaacccccggaaccacttcagatgccaggtgcagttctacggcctgagcgagaacgacgagtggacccaggacagagccaagcccgtgacccagatcgtgtctgccgaagcctggggcagagccgattgcggcatcaccagcgccagctaccaccagggcgtgctgagcgccaccatcctgtacgagatcctgctgggcaaggccaccctgtacgccgtgctggtgtctgccctggtgctgatggctatggtcaagcggaaggacagccggggaagggccaagcgatctggatctggagcaacaaacttctcactactcaaacaagcaggtgacgtggaggagaatcccgggcctactagtatggactggatttggcgcatccttttccttgtcggcgctgctaccggcgcccattccgggcccgtggacaacaagttcaacaaagagcggtacagcgcctactacgagatttggcaactgcccaacctgaacgtgcggcagaaggccgccttcatcggatctctgcaggacgaccctagccagagcgccaatctgctggccgaggccaagaagctgaacgacgcccaggcccctaaaggatccggcggcggaggatctggcggaggcggatctgggggcggaggctctttcgaacaagttcagcttcaacagcctggcgctgagctggtcaaacctggcgcttctgtgaagatgagctgcaaagccagcggctacgccttcagcagctactggatcaactggatgaagcagaaacccggccagggactcgaatggatcggccaaatctatcccggcgacggcgacaccaactacaacggcaagttcaagggcagagccacactgaccgccgatacctctagcagcacagcctacatgcagctgagcagcctgaccagcgaagatagcgccgtgtacttctgtgcccggtccatcacaacagtcgtgggctgcgctatggactattggggccagggaacaagcgtgaccgtgtctagtacgcgtatccagaaccctgatcctgccgtgtaccagctgcgggatagcaagagcagcgacaagagcgtgtgtctgttcaccgacttcgacagccagaccaacgtgtcccagagcaaggactccgacgtgtacatcaccgataagtgcgtgctggacatgcggagcatggacttcaagagcaactccgccgtggcctggtccaacaagtccgatttcgcctgcgccaacgccttcaacaacagcattatccccgaggacacattcttcccaagcagcgacgtgccctgcgacgtgaagctggtggaaaagagcttcgagacagacaccaacctgaacttccagaacctgagcgtgatcggcttcagaatcctgctgctgaaagtggccggctttaacctgctgatgaccctgcggctgtggtccagccgcgccaagagaagcggatctggcgtgaagcagaccctgaatttcgacctgctgaagctggctggcgacgtggaatccaacccaggcccttctagaggccatatgaccgagtacaagcccacggtgcgcctcgccacccgcgacgacgtccccagggccgtacgcaccctcgccgccgcgttcgccgactaccccgccacgcgccacaccgtcgatccggaccgccacatcgagcgggtcaccgagctgcaagaactcttcctcacgcgcgtcgggctcgacatcggcaaggtgtgggtcgcggacgacggcgccgcggtggcggtctggaccacgccggagagcgtcgaagcgggggcggtgttcgccgagatcggcccgcgcatggccgagttgagcggttcccggctggccgcgcagcaacagatggaaggcctcctggcgccgcaccggcccaaggagcccgcgtggttcctggccaccgtcggcgtctcgcccgaccaccagggcaagggtctgggcagcgccgtcgtgctccccggagtggaggcggccgagcgcgccggggtgcccgccttcctggagacctccgcgccccgcaacctccccttctacgagcggctcggcttcaccgtcaccgccgacgtcgaggtgcccgaaggaccgcgcacctggtgcatgacccgcaagcccggtgcctga

SEQ ID NO: 5857 - DNA, 3624 bp, Artificial Sequence
  Synthetic Polynucloetide
atggccttaccagtgaccgccttgctcctgccgctggccttgctgctccacgccgccaggccggaggtgcaactggtggaaagcggcggaggctctgtgcagacaggcggctctctgagactgacctgtgccgccagcggcagaaccagcagatcctatggcatgggctggttcagacaggcccctggcaaagaacgcgagttcgtgtccggcatctcttggagaggcgacagcaccggctacgccgatagcgtgaagggccggttcaccatcagccgggacaacgccaagaacaccgtggacctgcagatgaacagcctgaagcccgaggacaccgccatctactactgtgccgctgccgccggatctgcttggtacggcacactgtacgagtacgactactggggccagggcacccttgtgaccgtgtcatctggcggaggaagcggcggaggatctgaagtgcaactggtggaatctggaggctctctggtgcagccagggggaagcctgagactgtcttgtgccgcttccggcttcaccttcgacgactacgccatgagctgggtgcgccaggtgccaggcaaaggcctggaatgggtgtccagcatcaactggagcggcacccacaccgattacgccgactccgtgaaaggcagattcacaatcagcagaaacaacgccaacaataccctgtacctgcagatgaactccctgaagtctgaggatacagcagtgtattattgcgccaagaactggcgggacgccggcaccacttggtttgagaaaagcggctctgccggacagggaacccaagtgacagtgtcctccggtaccggcggaggcggatctggcggcggaggtagcggtggcggaggatctgaattcgacatccagatgacacagagccctagcagcctgtctgccagcgtgggagacagagtgaccatcacatgcaaggccagcgaccacatcaacaactggctggcctggtatcagcagaagcctggacaggcccctaagctgctgatctacggcgctaccacactggaaacaggcgtgcccagcagattttctggcagcggctctggcaccgactacaccctgacaatatccagcctccagcctgaggacttcgccacctactactgtcagcagagctggaacaccccttggacattcggccagggcaccaagctggaaatcaagagactcgaggacctgaagaacgtgttcccacctgaggtggccgtgttcgagcctagcgaggccgagatcagccacacccagaaagccaccctcgtgtgcctggctaccggcttctaccccgaccatgtggaactgtcttggtgggtcaacggcaaagaggtgcacagcggcgtgtgtaccgacccccagccactgaaagaacagcccgccctgaacgacagccggtactgcctgagcagcagactgagagtgtccgccaccttctggcagaacccccggaaccacttcagatgccaggtgcagttctacggcctgagcgagaacgacgagtggacccaggacagagccaagcccgtgacccagatcgtgtctgccgaagcctggggcagagccgattgcggctttaccagcgagagctaccagcagggcgtgctgagcgccaccatcctgtacgagatcctgctgggcaaggccaccctgtacgccgtgctggtgtctgccctggtgctgatggctatggtcaagcggaaggacagccggggaagggccaagcgatctggatctggagcaacaaacttctcactactcaaacaagcaggtgacgtggaggagaatcccgggcctactagtatggactggatttggcgcatccttttccttgtcggcgctgctaccggcgcccattccgggcccgtggacaacaagttcaacaaagagcggtacagcgcctactacgagatttggcaactgcccaacctgaacgtgcggcagaaggccgccttcatcggatctctgcaggacgaccctagccagagcgccaatctgctggccgaggccaagaagctgaacgacgcccaggcccctaaaggatccggcggcggaggatctggcggaggcggatctgggggcggaggctctttcgaacaagttcagcttcaacagcctggcgctgagctggtcaaacctggcgcttctgtgaagatgagctgcaaagccagcggctacgccttcagcagctactggatcaactggatgaagcagaaacccggccagggactcgaatggatcggccaaatctatcccggcgacggcgacaccaactacaacggcaagttcaagggcagagccacactgaccgccgatacctctagcagcacagcctacatgcagctgagcagcctgaccagcgaagatagcgccgtgtacttctgtgcccggtccatcacaacagtcgtgggctgcgctatggactattggggccagggaacaagcgtgaccgtgtctagtacgcgtatccagaaccctgatcctgccgtgtaccagctgcgggatagcaagagcagcgacaagagcgtgtgtctgttcaccgacttcgacagccagaccaacgtgtcccagagcaaggactccgacgtgtacatcaccgataagtgcgtgctggacatgcggagcatggacttcaagagcaactccgccgtggcctggtccaacaagtccgatttcgcctgcgccaacgccttcaacaacagcattatccccgaggacacattcttcccaagccccgagagcagctgcgacgtgaagctggtggaaaagagcttcgagacagacaccaacctgaacttccagaacctgagcgtgatcggcttcagaatcctgctgctgaaagtggccggctttaacctgctgatgaccctgcggctgtggtccagccgcgccaagagaagcggatctggcgtgaagcagaccctgaatttcgacctgctgaagctggctggcgacgtggaatccaacccaggcccttctagaggccatatgaccgagtacaagcccacggtgcgcctcgccacccgcgacgacgtccccagggccgtacgcaccctcgccgccgcgttcgccgactaccccgccacgcgccacaccgtcgatccggaccgccacatcgagcgggtcaccgagctgcaagaactcttcctcacgcgcgtcgggctcgacatcggcaaggtgtgggtcgcggacgacggcgccgcggtggcggtctggaccacgccggagagcgtcgaagcgggggcggtgttcgccgagatcggcccgcgcatggccgagttgagcggttcccggctggccgcgcagcaacagatggaaggcctcctggcgccgcaccggcccaaggagcccgcgtggttcctggccaccgtcggcgtctcgcccgaccaccagggcaagggtctgggcagcgccgtcgtgctccccggagtggaggcggccgagcgcgccggggtgcccgccttcctggagacctccgcgccccgcaacctccccttctacgagcggctcggcttcaccgtcaccgccgacgtcgaggtgcccgaaggaccgcgcacctggtgcatgacccgcaagcccggtgcctga

SEQ ID NO: 5858 - DNA, 2922 bp, Artificial Sequence
  Synthetic Polynucloetide
atggccttaccagtgaccgccttgctcctgccgctggccttgctgctccacgccgccaggccggaggtgcaactggtggaaagcggcggaggctctgtgcagacaggcggctctctgagactgacctgtgccgccagcggcagaaccagcagatcctatggcatgggctggttcagacaggcccctggcaaagaacgcgagttcgtgtccggcatctcttggagaggcgacagcaccggctacgccgatagcgtgaagggccggttcaccatcagccgggacaacgccaagaacaccgtggacctgcagatgaacagcctgaagcccgaggacaccgccatctactactgtgccgctgccgccggatctgcttggtacggcacactgtacgagtacgactactggggccagggcacccttgtgaccgtgtcatctggcggaggaagcggcggaggatctgaagtgcaactggtggaatctggaggctctctggtgcagccagggggaagcctgagactgtcttgtgccgcttccggcttcaccttcgacgactacgccatgagctgggtgcgccaggtgccaggcaaaggcctggaatgggtgtccagcatcaactggagcggcacccacaccgattacgccgactccgtgaaaggcagattcacaatcagcagaaacaacgccaacaataccctgtacctgcagatgaactccctgaagtctgaggatacagcagtgtattattgcgccaagaactggcgggacgccggcaccacttggtttgagaaaagcggctctgccggacagggaacccaagtgacagtgtcctccggtaccggcggaggcggatctggcggcggaggtagcggtggcggaggatctgaattcgacatccagatgacacagagccctagcagcctgtctgccagcgtgggagacagagtgaccatcacatgcaaggccagcgaccacatcaacaactggctggcctggtatcagcagaagcctggacaggcccctaagctgctgatctacggcgctaccacactggaaacaggcgtgcccagcagattttctggcagcggctctggcaccgactacaccctgacaatatccagcctccagcctgaggacttcgccacctactactgtcagcagagctggaacaccccttggacattcggccagggcaccaagctggaaatcaagagactcgaggacctgaagaacgtgttcccacctgaggtggccgtgttcgagcctagcgaggccgagatcagccacacccagaaagccaccctcgtgtgcctggctaccggcttctaccccgaccatgtggaactgtcttggtgggtcaacggcaaagaggtgcacagcggcgtgtgtaccgacccccagccactgaaagaacagcccgccctgaacgacagccggtactgcctgagcagcagactgagagtgtccgccaccttctggcagaacccccggaaccacttcagatgccaggtgcagttctacggcctgagcgagaacgacgagtggacccaggacagagccaagcccgtgacccagatcgtgtctgccgaagcctggggcagagccgattgcggctttaccagcgagagctaccagcagggcgtgctgagcgccaccatcctgtacgagatcctgctgggcaaggccaccctgtacgccgtgctggtgtctgccctggtgctgatggctatggtcaagcggaaggacagccggggaagggccaagcgatctggatctggagcaacaaacttctcactactcaaacaagcaggtgacgtggaggagaatcccgggcctactagtatggactggatttggcgcatccttttccttgtcggcgctgctaccggcgcccattccgggcccgtggacaacaagttcaacaaagagcggtacagcgcctactacgagatttggcaactgcccaacctgaacgtgcggcagaaggccgccttcatcggatctctgcaggacgaccctagccagagcgccaatctgctggccgaggccaagaagctgaacgacgcccaggcccctaaaggatccggcggcggaggatctggcggaggcggatctgggggcggaggctctttcgaacaagttcagcttcaacagcctggcgctgagctggtcaaacctggcgcttctgtgaagatgagctgcaaagccagcggctacgccttcagcagctactggatcaactggatgaagcagaaacccggccagggactcgaatggatcggccaaatctatcccggcgacggcgacaccaactacaacggcaagttcaagggcagagccacactgaccgccgatacctctagcagcacagcctacatgcagctgagcagcctgaccagcgaagatagcgccgtgtacttctgtgcccggtccatcacaacagtcgtgggctgcgctatggactattggggccagggaacaagcgtgaccgtgtctagtacgcgtatccagaaccctgatcctgccgtgtaccagctgcgggatagcaagagcagcgacaagagcgtgtgtctgttcaccgacttcgacagccagaccaacgtgtcccagagcaaggactccgacgtgtacatcaccgataagtgcgtgctggacatgcggagcatggacttcaagagcaactccgccgtggcctggtccaacaagtccgatttcgcctgcgccaacgccttcaacaacagcattatccccgaggacacattcttcccaagccccgagagcagctgcgacgtgaagctggtggaaaagagcttcgagacagacaccaacctgaacttccagaacctgagcgtgatcggcttcagaatcctgctgctgaaagtggccggctttaacctgctgatgaccctgcggctgtggtccagc

SEQ ID NO: 5859 - DNA, 3597 bp, Artificial Sequence
  Synthetic Polynucloetide
atggccttaccagtgaccgccttgctcctgccgctggccttgctgctccacgccgccaggccggaggtgcaactggtggaaagcggcggaggctctgtgcagacaggcggctctctgagactgacctgtgccgccagcggcagaaccagcagatcctatggcatgggctggttcagacaggcccctggcaaagaacgcgagttcgtgtccggcatctcttggagaggcgacagcaccggctacgccgatagcgtgaagggccggttcaccatcagccgggacaacgccaagaacaccgtggacctgcagatgaacagcctgaagcccgaggacaccgccatctactactgtgccgctgccgccggatctgcttggtacggcacactgtacgagtacgactactggggccagggcacccttgtgaccgtgtcatctggcggaggaagcggcggaggatctgaagtgcaactggtggaatctggaggctctctggtgcagccagggggaagcctgagactgtcttgtgccgcttccggcttcaccttcgacgactacgccatgagctgggtgcgccaggtgccaggcaaaggcctggaatgggtgtccagcatcaactggagcggcacccacaccgattacgccgactccgtgaaaggcagattcacaatcagcagaaacaacgccaacaataccctgtacctgcagatgaactccctgaagtctgaggatacagcagtgtattattgcgccaagaactggcgggacgccggcaccacttggtttgagaaaagcggctctgccggacagggaacccaagtgacagtgtcctccggtaccggcggaggcggatctggcggcggaggtagcggtggcggaggatctgaattcgacatccagatgacacagagccctagcagcctgtctgccagcgtgggagacagagtgaccatcacatgcaaggccagcgaccacatcaacaactggctggcctggtatcagcagaagcctggacaggcccctaagctgctgatctacggcgctaccacactggaaacaggcgtgcccagcagattttctggcagcggctctggcaccgactacaccctgacaatatccagcctccagcctgaggacttcgccacctactactgtcagcagagctggaacaccccttggacattcggccagggcaccaagctggaaatcaagagactcgaggacctgaagaacgtgttcccacctgaggtggccgtgttcgagcctagcgaggccgagatcagccacacccagaaagccaccctcgtgtgcctggctaccggcttctaccccgaccatgtggaactgtcttggtgggtcaacggcaaagaggtgcacagcggcgtgtgtaccgacccccagccactgaaagaacagcccgccctgaacgacagccggtactgcctgagcagcagactgagagtgtccgccaccttctggcagaacccccggaaccacttcagatgccaggtgcagttctacggcctgagcgagaacgacgagtggacccaggacagagccaagcccgtgacccagatcgtgtctgccgaagcctggggcagagccgattgcggctttaccagcgagagctaccagcagggcgtgctgagcgccaccatcctgtacgagatcctgctgggcaaggccaccctgtacgccgtgctggtgtctgccctggtgctgatggctatggtcaagcggaaggacagccggggaagggccaagcgatctggatctggagcaacaaacttctcactactcaaacaagcaggtgacgtggaggagaatcccgggcctactagtatggactggatttggcgcatccttttccttgtcggcgctgctaccggcgcccattccgggcccgtggacaacaagttcaacaaagagcggtacagcgcctactacgagatttggcaactgcccaacctgaacgtgcggcagaaggccgccttcatcggatctctgcaggacgaccctagccagagcgccaatctgctggccgaggccaagaagctgaacgacgcccaggcccctaaaggatccggcggcggaggatctggcggaggcggatctgggggcggaggctctttcgaacaagttcagcttcaacagcctggcgctgagctggtcaaacctggcgcttctgtgaagatgagctgcaaagccagcggctacgccttcagcagctactggatcaactggatgaagcagaaacccggccagggactcgaatggatcggccaaatctatcccggcgacggcgacaccaactacaacggcaagttcaagggcagagccacactgaccgccgatacctctagcagcacagcctacatgcagctgagcagcctgaccagcgaagatagcgccgtgtacttctgtgcccggtccatcacaacagtcgtgggctgcgctatggactattggggccagggaacaagcgtgaccgtgtctagtacgcgtatccagaaccctgatcctgccgtgtaccagctgcgggatagcaagagcagcgacaagagcgtgtgtctgttcaccgacttcgacagccagaccaacgtgtcccagagcaaggactccgacgtgtacatcaccgataagtgcgtgctggacatgcggagcatggacttcaagagcaactccgccgtggcctggtccaacaagtccgatttcgcctgcgccaacgccttcaacaacagcattatccccgaggacacattcttcccaagccccgagagcagctgcgacgtgaagctggtggaaaagagcttcgagacagacaccaacctgaacttccagaacctgagcgtgatcggcttcagaatcctgctgctgaaagtggccggctttaacctgctgatgaccctgcggctgtggtccagccgcgccaagagaagcggatctggcgtgaagcagaccctgaatttcgacctgctgaagctggctggcgacgtggaatccaacccaggcccttctagaggcgggatccacaccatggctacctacgaggtgctgtgcgaggtggcaagaaagctgggcaccgacgacagagaagtggtgctgttcctgctgaacgtgttcatccctcagcctacactggcccagctgatcggtgcactgagagccctgaaagaggaaggccggctgacctttcctctgctggccgaatgcctgttcagagccggaagaagggatctgctgcgggacctgctgcatctggaccccagatttctggaaagacacctggccggcaccatgagctacttcagcccttaccagctgaccgtgctgcacgttgacggcgaactgtgcgccagagatattcggagcctgatcttcctgagcaaggacaccatcggcagccggtctacccctcagacatttctgcactgggtgtactgcatggaaaacctggacctgctcggccccacagatgtggatgccctgatgtccatgctgagaagcctgagcagagtggacctccagagacaggtgcagacactgatgggactgcacctgagcggacctagccacagccagcactacagacacacccct

SEQ ID NO: 5860 - DNA, 2934 bp, Artificial Sequence
  Synthetic Polynucloetide
atggccttaccagtgaccgccttgctcctgccgctggccttgctgctccacgccgccaggccggaggtgcaactggtggaaagcggcggaggctctgtgcagacaggcggctctctgagactgacctgtgccgccagcggcagaaccagcagatcctatggcatgggctggttcagacaggcccctggcaaagaacgcgagttcgtgtccggcatctcttggagaggcgacagcaccggctacgccgatagcgtgaagggccggttcaccatcagccgggacaacgccaagaacaccgtggacctgcagatgaacagcctgaagcccgaggacaccgccatctactactgtgccgctgccgccggatctgcttggtacggcacactgtacgagtacgactactggggccagggcacccttgtgaccgtgtcatctggcggaggaagcggcggaggatctgaagtgcaactggtggaatctggaggctctctggtgcagccagggggaagcctgagactgtcttgtgccgcttccggcttcaccttcgacgactacgccatgagctgggtgcgccaggtgccaggcaaaggcctggaatgggtgtccagcatcaactggagcggcacccacaccgattacgccgactccgtgaaaggcagattcacaatcagcagaaacaacgccaacaataccctgtacctgcagatgaactccctgaagtctgaggatacagcagtgtattattgcgccaagaactggcgggacgccggcaccacttggtttgagaaaagcggctctgccggacagggaacccaagtgacagtgtcctccggtaccggcggaggcggatctggcggcggaggtagcggtggcggaggatctgaattcgacatccagatgacacagagccctagcagcctgtctgccagcgtgggagacagagtgaccatcacatgcaaggccagcgaccacatcaacaactggctggcctggtatcagcagaagcctggacaggcccctaagctgctgatctacggcgctaccacactggaaacaggcgtgcccagcagattttctggcagcggctctggcaccgactacaccctgacaatatccagcctccagcctgaggacttcgccacctactactgtcagcagagctggaacaccccttggacattcggccagggcaccaagctggaaatcaagagactcgagatccagaaccctgatcctgccgtgtaccagctgcgggatagcaagagcagcgacaagagcgtgtgtctgttcaccgacttcgacagccagaccaacgtgtcccagagcaaggactccgacgtgtacatcaccgataagtgcgtgctggacatgcggagcatggacttcaagagcaactccgccgtggcctggtccaacaagtccgatttcgcctgcgccaacgccttcaacaacagcattatccccgaggacacattcttcccaagccccgagagcagctgcgacgtgaagctggtggaaaagagcttcgagacagacaccaacctgaacttccagaacctgagcgtgatcggcttcagaatcctgctgctgaaagtggccggctttaacctgctgatgaccctgcggctgtggtccagccgcgccaagagaagcggatctggcgtgaagcagaccctgaatttcgacctgctgaagctggctggcgacgtggaatccaacccaggccctactagtatggactggatttggcgcatccttttccttgtcggcgctgctaccggcgcccattccgggcccgtggacaacaagttcaacaaagagcggtacagcgcctactacgagatttggcaactgcccaacctgaacgtgcggcagaaggccgccttcatcggatctctgcaggacgaccctagccagagcgccaatctgctggccgaggccaagaagctgaacgacgcccaggcccctaaaggatccggcggcggaggatctggcggaggcggatctgggggcggaggctctttcgaacaagttcagcttcaacagcctggcgctgagctggtcaaacctggcgcttctgtgaagatgagctgcaaagccagcggctacgccttcagcagctactggatcaactggatgaagcagaaacccggccagggactcgaatggatcggccaaatctatcccggcgacggcgacaccaactacaacggcaagttcaagggcagagccacactgaccgccgatacctctagcagcacagcctacatgcagctgagcagcctgaccagcgaagatagcgccgtgtacttctgtgcccggtccatcacaacagtcgtgggctgcgctatggactattggggccagggaacaagcgtgaccgtgtctagtacgcgtgaggacctgaagaacgtgttcccacctgaggtggccgtgttcgagcctagcgaggccgagatcagccacacccagaaagccaccctcgtgtgcctggctaccggcttctaccccgaccatgtggaactgtcttggtgggtcaacggcaaagaggtgcacagcggcgtgtgtaccgacccccagccactgaaagaacagcccgccctgaacgacagccggtactgcctgagcagcagactgagagtgtccgccaccttctggcagaacccccggaaccacttcagatgccaggtgcagttctacggcctgagcgagaacgacgagtggacccaggacagagccaagcccgtgacccagatcgtgtctgccgaagcctggggcagagccgattgcggctttaccagcgagagctaccagcagggcgtgctgagcgccaccatcctgtacgagatcctgctgggcaaggccaccctgtacgccgtgctggtgtctgccctggtgctgatggctatggtcaagcggaaggacagccgggga

SEQ ID NO: 5861 - DNA, 3600 bp, Artificial Sequence
  Synthetic Polynucloetide
atggccttaccagtgaccgccttgctcctgccgctggccttgctgctccacgccgccaggccggaggtgcaactggtggaaagcggcggaggctctgtgcagacaggcggctctctgagactgacctgtgccgccagcggcagaaccagcagatcctatggcatgggctggttcagacaggcccctggcaaagaacgcgagttcgtgtccggcatctcttggagaggcgacagcaccggctacgccgatagcgtgaagggccggttcaccatcagccgggacaacgccaagaacaccgtggacctgcagatgaacagcctgaagcccgaggacaccgccatctactactgtgccgctgccgccggatctgcttggtacggcacactgtacgagtacgactactggggccagggcacccttgtgaccgtgtcatctggcggaggaagcggcggaggatctgaagtgcaactggtggaatctggaggctctctggtgcagccagggggaagcctgagactgtcttgtgccgcttccggcttcaccttcgacgactacgccatgagctgggtgcgccaggtgccaggcaaaggcctggaatgggtgtccagcatcaactggagcggcacccacaccgattacgccgactccgtgaaaggcagattcacaatcagcagaaacaacgccaacaataccctgtacctgcagatgaactccctgaagtctgaggatacagcagtgtattattgcgccaagaactggcgggacgccggcaccacttggtttgagaaaagcggctctgccggacagggaacccaagtgacagtgtcctccggtaccggcggaggcggatctggcggcggaggtagcggtggcggaggatctgaattcgacatccagatgacacagagccctagcagcctgtctgccagcgtgggagacagagtgaccatcacatgcaaggccagcgaccacatcaacaactggctggcctggtatcagcagaagcctggacaggcccctaagctgctgatctacggcgctaccacactggaaacaggcgtgcccagcagattttctggcagcggctctggcaccgactacaccctgacaatatccagcctccagcctgaggacttcgccacctactactgtcagcagagctggaacaccccttggacattcggccagggcaccaagctggaaatcaagagactcgagatccagaaccctgatcctgccgtgtaccagctgcgggatagcaagagcagcgacaagagcgtgtgtctgttcaccgacttcgacagccagaccaacgtgtcccagagcaaggactccgacgtgtacatcaccgataagtgcgtgctggacatgcggagcatggacttcaagagcaactccgccgtggcctggtccaacaagtccgatttcgcctgcgccaacgccttcaacaacagcattatccccgaggacacattcttcccaagccccgagagcagctgcgacgtgaagctggtggaaaagagcttcgagacagacaccaacctgaacttccagaacctgagcgtgatcggcttcagaatcctgctgctgaaagtggccggctttaacctgctgatgaccctgcggctgtggtccagccgcgccaagagaagcggatctggcgtgaagcagaccctgaatttcgacctgctgaagctggctggcgacgtggaatccaacccaggccctactagtatggactggatttggcgcatccttttccttgtcggcgctgctaccggcgcccattccgggcccgtggacaacaagttcaacaaagagcggtacagcgcctactacgagatttggcaactgcccaacctgaacgtgcggcagaaggccgccttcatcggatctctgcaggacgaccctagccagagcgccaatctgctggccgaggccaagaagctgaacgacgcccaggcccctaaaggatccggcggcggaggatctggcggaggcggatctgggggcggaggctctttcgaacaagttcagcttcaacagcctggcgctgagctggtcaaacctggcgcttctgtgaagatgagctgcaaagccagcggctacgccttcagcagctactggatcaactggatgaagcagaaacccggccagggactcgaatggatcggccaaatctatcccggcgacggcgacaccaactacaacggcaagttcaagggcagagccacactgaccgccgatacctctagcagcacagcctacatgcagctgagcagcctgaccagcgaagatagcgccgtgtacttctgtgcccggtccatcacaacagtcgtgggctgcgctatggactattggggccagggaacaagcgtgaccgtgtctagtacgcgtgaggacctgaagaacgtgttcccacctgaggtggccgtgttcgagcctagcgaggccgagatcagccacacccagaaagccaccctcgtgtgcctggctaccggcttctaccccgaccatgtggaactgtcttggtgggtcaacggcaaagaggtgcacagcggcgtgtgtaccgacccccagccactgaaagaacagcccgccctgaacgacagccggtactgcctgagcagcagactgagagtgtccgccaccttctggcagaacccccggaaccacttcagatgccaggtgcagttctacggcctgagcgagaacgacgagtggacccaggacagagccaagcccgtgacccagatcgtgtctgccgaagcctggggcagagccgattgcggctttaccagcgagagctaccagcagggcgtgctgagcgccaccatcctgtacgagatcctgctgggcaaggccaccctgtacgccgtgctggtgtctgccctggtgctgatggctatggtcaagcggaaggacagccggggaagggccaagcgatctggatctggagcaacaaacttctcactactcaaacaagcaggtgacgtggaggagaatcccgggccttctagaggcgggatccacaccatggctacctacgaggtgctgtgcgaggtggcaagaaagctgggcaccgacgacagagaagtggtgctgttcctgctgaacgtgttcatccctcagcctacactggcccagctgatcggtgcactgagagccctgaaagaggaaggccggctgacctttcctctgctggccgaatgcctgttcagagccggaagaagggatctgctgcgggacctgctgcatctggaccccagatttctggaaagacacctggccggcaccatgagctacttcagcccttaccagctgaccgtgctgcacgttgacggcgaactgtgcgccagagatattcggagcctgatcttcctgagcaaggacaccatcggcagccggtctacccctcagacatttctgcactgggtgtactgcatggaaaacctggacctgctcggccccacagatgtggatgccctgatgtccatgctgagaagcctgagcagagtggacctccagagacaggtgcagacactgatgggactgcacctgagcggacctagccacagccagcactacagacacacccct

SEQ ID NO: 5862 - DNA, 3624 bp, Artificial Sequence
  Synthetic Polynucloetide
atggccttaccagtgaccgccttgctcctgccgctggccttgctgctccacgccgccaggccggaggtgcaactggtggaaagcggcggaggctctgtgcagacaggcggctctctgagactgacctgtgccgccagcggcagaaccagcagatcctatggcatgggctggttcagacaggcccctggcaaagaacgcgagttcgtgtccggcatctcttggagaggcgacagcaccggctacgccgatagcgtgaagggccggttcaccatcagccgggacaacgccaagaacaccgtggacctgcagatgaacagcctgaagcccgaggacaccgccatctactactgtgccgctgccgccggatctgcttggtacggcacactgtacgagtacgactactggggccagggcacccttgtgaccgtgtcatctggcggaggaagcggcggaggatctgaagtgcaactggtggaatctggaggctctctggtgcagccagggggaagcctgagactgtcttgtgccgcttccggcttcaccttcgacgactacgccatgagctgggtgcgccaggtgccaggcaaaggcctggaatgggtgtccagcatcaactggagcggcacccacaccgattacgccgactccgtgaaaggcagattcacaatcagcagaaacaacgccaacaataccctgtacctgcagatgaactccctgaagtctgaggatacagcagtgtattattgcgccaagaactggcgggacgccggcaccacttggtttgagaaaagcggctctgccggacagggaacccaagtgacagtgtcctccggtaccggcggaggcggatctggcggcggaggtagcggtggcggaggatctgaattcgacatccagatgacacagagccctagcagcctgtctgccagcgtgggagacagagtgaccatcacatgcaaggccagcgaccacatcaacaactggctggcctggtatcagcagaagcctggacaggcccctaagctgctgatctacggcgctaccacactggaaacaggcgtgcccagcagattttctggcagcggctctggcaccgactacaccctgacaatatccagcctccagcctgaggacttcgccacctactactgtcagcagagctggaacaccccttggacattcggccagggcaccaagctggaaatcaagagactcgaggacctgaagaacgtgttcccacctgaggtggccgtgttcgagcctagcgaggccgagatcagccacacccagaaagccaccctcgtgtgcctggctaccggcttctaccccgaccatgtggaactgtcttggtgggtcaacggcaaagaggtgcacagcggcgtgtctaccgacccccagccactgaaagaacagcccgccctgaacgacagccggtactgcctgagcagcagactgagagtgtccgccaccttctggcagaacccccggaaccacttcagatgccaggtgcagttctacggcctgagcgagaacgacgagtggacccaggacagagccaagcccgtgacccagatcgtgtctgccgaagcctggggcagagccgattgcggctttaccagcgagagctaccagcagggcgtgctgagcgccaccatcctgtacgagatcctgctgggcaaggccaccctgtacgccgtgctggtgtctgccctggtgctgatggctatggtcaagcggaaggacagccggggaagggccaagcgatctggatctggagcaacaaacttctcactactcaaacaagcaggtgacgtggaggagaatcccgggcctactagtatggactggatttggcgcatccttttccttgtcggcgctgctaccggcgcccattccgggcccgtggacaacaagttcaacaaagagcggtacagcgcctactacgagatttggcaactgcccaacctgaacgtgcggcagaaggccgccttcatcggatctctgcaggacgaccctagccagagcgccaatctgctggccgaggccaagaagctgaacgacgcccaggcccctaaaggatccggcggcggaggatctggcggaggcggatctgggggcggaggctctttcgaacaagttcagcttcaacagcctggcgctgagctggtcaaacctggcgcttctgtgaagatgagctgcaaagccagcggctacgccttcagcagctactggatcaactggatgaagcagaaacccggccagggactcgaatggatcggccaaatctatcccggcgacggcgacaccaactacaacggcaagttcaagggcagagccacactgaccgccgatacctctagcagcacagcctacatgcagctgagcagcctgaccagcgaagatagcgccgtgtacttctgtgcccggtccatcacaacagtcgtgggctgcgctatggactattggggccagggaacaagcgtgaccgtgtctagtacgcgtatccagaaccctgatcctgccgtgtaccagctgcgggatagcaagagcagcgacaagagcgtgtgtctgttcaccgacttcgacagccagaccaacgtgtcccagagcaaggactccgacgtgtacatcaccgataagaccgtgctggacatgcggagcatggacttcaagagcaactccgccgtggcctggtccaacaagtccgatttcgcctgcgccaacgccttcaacaacagcattatccccgaggacacattcttcccaagccccgagagcagctgcgacgtgaagctggtggaaaagagcttcgagacagacaccaacctgaacttccagaacctgagcgtgatcggcttcagaatcctgctgctgaaagtggccggctttaacctgctgatgaccctgcggctgtggtccagccgcgccaagagaagcggatctggcgtgaagcagaccctgaatttcgacctgctgaagctggctggcgacgtggaatccaacccaggcccttctagaggccatatgaccgagtacaagcccacggtgcgcctcgccacccgcgacgacgtccccagggccgtacgcaccctcgccgccgcgttcgccgactaccccgccacgcgccacaccgtcgatccggaccgccacatcgagcgggtcaccgagctgcaagaactcttcctcacgcgcgtcgggctcgacatcggcaaggtgtgggtcgcggacgacggcgccgcggtggcggtctggaccacgccggagagcgtcgaagcgggggcggtgttcgccgagatcggcccgcgcatggccgagttgagcggttcccggctggccgcgcagcaacagatggaaggcctcctggcgccgcaccggcccaaggagcccgcgtggttcctggccaccgtcggcgtctcgcccgaccaccagggcaagggtctgggcagcgccgtcgtgctccccggagtggaggcggccgagcgcgccggggtgcccgccttcctggagacctccgcgccccgcaacctccccttctacgagcggctcggcttcaccgtcaccgccgacgtcgaggtgcccgaaggaccgcgcacctggtgcatgacccgcaagcccggtgcctga

SEQ ID NO: 5863 - DNA, 3870 bp, Artificial Sequence
  Synthetic Polynucloetide
atggccttaccagtgaccgccttgctcctgccgctggccttgctgctccacgccgccaggccggaggtgcaactggtggaaagcggcggaggctctgtgcagacaggcggctctctgagactgacctgtgccgccagcggcagaaccagcagatcctatggcatgggctggttcagacaggcccctggcaaagaacgcgagttcgtgtccggcatctcttggagaggcgacagcaccggctacgccgatagcgtgaagggccggttcaccatcagccgggacaacgccaagaacaccgtggacctgcagatgaacagcctgaagcccgaggacaccgccatctactactgtgccgctgccgccggatctgcttggtacggcacactgtacgagtacgactactggggccagggcacccttgtgaccgtgtcatctggcggaggaagcggcggaggatctgaagtgcaactggtggaatctggaggctctctggtgcagccagggggaagcctgagactgtcttgtgccgcttccggcttcaccttcgacgactacgccatgagctgggtgcgccaggtgccaggcaaaggcctggaatgggtgtccagcatcaactggagcggcacccacaccgattacgccgactccgtgaaaggcagattcacaatcagcagaaacaacgccaacaataccctgtacctgcagatgaactccctgaagtctgaggatacagcagtgtattattgcgccaagaactggcgggacgccggcaccacttggtttgagaaaagcggctctgccggacagggaacccaagtgacagtgtcctccggtaccggcggaggcggatctggcggcggaggtagcggtggcggaggatctgaattcgacatccagatgacacagagccctagcagcctgtctgccagcgtgggagacagagtgaccatcacatgcaaggccagcgaccacatcaacaactggctggcctggtatcagcagaagcctggacaggcccctaagctgctgatctacggcgctaccacactggaaacaggcgtgcccagcagattttctggcagcggctctggcaccgactacaccctgacaatatccagcctccagcctgaggacttcgccacctactactgtcagcagagctggaacaccccttggacattcggccagggcaccaagctggaaatcaagagactcgaggacctgaagaacgtgttcccacctgaggtggccgtgttcgagcctagcgaggccgagatcagccacacccagaaagccaccctcgtgtgcctggctaccggcttctaccccgaccatgtggaactgtcttggtgggtcaacggcaaagaggtgcacagcggcgtgtctaccgacccccagccactgaaagaacagcccgccctgaacgacagccggtactgcctgagcagcagactgagagtgtccgccaccttctggcagaacccccggaaccacttcagatgccaggtgcagttctacggcctgagcgagaacgacgagtggacccaggacagagccaagcccgtgacccagatcgtgtctgccgaagcctggggcagagccgattgcggctttaccagcgagagctaccagcagggcgtgctgagcgccaccatcctgtacgagatcctgctgggcaaggccaccctgtacgccgtgctggtgtctgccctggtgctgatggctatggtcaagcggaaggacagccggggaagggccaagcgatctggatctggagcaacaaacttctcactactcaaacaagcaggtgacgtggaggagaatcccgggcctactagtatggactggatttggcgcatccttttccttgtcggcgctgctaccggcgcccattccgggcccgtggacaacaagttcaacaaagagcggtacagcgcctactacgagatttggcaactgcccaacctgaacgtgcggcagaaggccgccttcatcggatctctgcaggacgaccctagccagagcgccaatctgctggccgaggccaagaagctgaacgacgcccaggcccctaaaggatccggcggcggaggatctggcggaggcggatctgggggcggaggctctttcgaacaagttcagcttcaacagcctggcgctgagctggtcaaacctggcgcttctgtgaagatgagctgcaaagccagcggctacgccttcagcagctactggatcaactggatgaagcagaaacccggccagggactcgaatggatcggccaaatctatcccggcgacggcgacaccaactacaacggcaagttcaagggcagagccacactgaccgccgatacctctagcagcacagcctacatgcagctgagcagcctgaccagcgaagatagcgccgtgtacttctgtgcccggtccatcacaacagtcgtgggctgcgctatggactattggggccagggaacaagcgtgaccgtgtctagtacgcgtgagcagaaactgatctcggaagaggatgggagcggcaccccattcccttctctggcccctcccatcatgctgctggtggacggcaagcagcagatggtggtcgtgtgcctggtgctggatgtggccccacctggactggacagccccatctggtttagcgccggcaatggctctgccctggacgcctttacctacggcccaagccctgccaccgatggcacctggacaaatctggcccacctgagcctgcccagcgaggaactggcttcttgggagcctctcgtgtgccacacaggacctggcgctgagggacacagcagatccacccagcctatgcacctgtctggcgaggccagcaccgccagaacctgtcctcaggaacctctgagaggcacccctggcggagcactgtggctgggagtgctgagactgctgctgttcaagctgctgctgtttgacctgctgctgacctgctcctgtctgtgcgatcctgccggccctctgccttctcctgccaccaccacaagactgagagccctgggcagccacagactgcaccctgccacagagacaggcggcagagaggccacaagcagccctagaccccagcccagagacagaagatggggcgataccccccctggcagaaagcctggatctccagtccgcgccaagagaagcggatctggcgtgaagcagaccctgaatttcgacctgctgaagctggctggcgacgtggaatccaacccaggcccttctagaggccatatgaccgagtacaagcccacggtgcgcctcgccacccgcgacgacgtccccagggccgtacgcaccctcgccgccgcgttcgccgactaccccgccacgcgccacaccgtcgatccggaccgccacatcgagcgggtcaccgagctgcaagaactcttcctcacgcgcgtcgggctcgacatcggcaaggtgtgggtcgcggacgacggcgccgcggtggcggtctggaccacgccggagagcgtcgaagcgggggcggtgttcgccgagatcggcccgcgcatggccgagttgagcggttcccggctggccgcgcagcaacagatggaaggcctcctggcgccgcaccggcccaaggagcccgcgtggttcctggccaccgtcggcgtctcgcccgaccaccagggcaagggtctgggcagcgccgtcgtgctccccggagtggaggcggccgagcgcgccggggtgcccgccttcctggagacctccgcgccccgcaacctccccttctacgagcggctcggcttcaccgtcaccgccgacgtcgaggtgcccgaaggaccgcgcacctggtgcatgacccgcaagcccggtgcctga

SEQ ID NO: 5864 - DNA, 3735 bp, Artificial Sequence
  Synthetic Polynucloetide
atggccttaccagtgaccgccttgctcctgccgctggccttgctgctccacgccgccaggccggaggtgcaactggtggaaagcggcggaggctctgtgcagacaggcggctctctgagactgacctgtgccgccagcggcagaaccagcagatcctatggcatgggctggttcagacaggcccctggcaaagaacgcgagttcgtgtccggcatctcttggagaggcgacagcaccggctacgccgatagcgtgaagggccggttcaccatcagccgggacaacgccaagaacaccgtggacctgcagatgaacagcctgaagcccgaggacaccgccatctactactgtgccgctgccgccggatctgcttggtacggcacactgtacgagtacgactactggggccagggcacccttgtgaccgtgtcatctggcggaggaagcggcggaggatctgaagtgcaactggtggaatctggaggctctctggtgcagccagggggaagcctgagactgtcttgtgccgcttccggcttcaccttcgacgactacgccatgagctgggtgcgccaggtgccaggcaaaggcctggaatgggtgtccagcatcaactggagcggcacccacaccgattacgccgactccgtgaaaggcagattcacaatcagcagaaacaacgccaacaataccctgtacctgcagatgaactccctgaagtctgaggatacagcagtgtattattgcgccaagaactggcgggacgccggcaccacttggtttgagaaaagcggctctgccggacagggaacccaagtgacagtgtcctccggtaccggcggaggcggatctggcggcggaggtagcggtggcggaggatctgaattcgacatccagatgacacagagccctagcagcctgtctgccagcgtgggagacagagtgaccatcacatgcaaggccagcgaccacatcaacaactggctggcctggtatcagcagaagcctggacaggcccctaagctgctgatctacggcgctaccacactggaaacaggcgtgcccagcagattttctggcagcggctctggcaccgactacaccctgacaatatccagcctccagcctgaggacttcgccacctactactgtcagcagagctggaacaccccttggacattcggccagggcaccaagctggaaatcaagagactcgaggggaaaccaattcccaaccctcttctgggactggattcaaccggcagcggcgacaagcagctggacgccgacgtgtcccccaagcctaccatcttcctgccctctatcgccgagacaaagctccagaaggccggcacctacctgtgcctgctggaaaagttcttcccagatgtgattaagatccactggcaggaaaagaagtccaacaccatcctgggcagccaggaaggcaacaccatgaagaccaacgacacctacatgaagttcagctggctgaccgtgcccgagaagtccctggacaaagaacacagatgcatcgtgcggcacgaaaacaacaagaacggcgtggaccaggaaatcatcttcccacccatcaagaccgatgtgattacaatggaccccaaggacaactgctccaaggacgccaacgataccctgctgctccagctgaccaacaccagcgcctactacatgtacttgttgctgctgctgaagtccgtggtgtacttcgccatcatcacatgctgcctgctgcggagaaccgccttctgctgcaacggcgagaagtctagggccaagcgatctggatctggagcaacaaacttctcactactcaaacaagcaggtgacgtggaggagaatcccgggcctactagtatggactggatttggcgcatccttttccttgtcggcgctgctaccggcgcccattccgggcccgtggacaacaagttcaacaaagagcggtacagcgcctactacgagatttggcaactgcccaacctgaacgtgcggcagaaggccgccttcatcggatctctgcaggacgaccctagccagagcgccaatctgctggccgaggccaagaagctgaacgacgcccaggcccctaaaggatccggcggcggaggatctggcggaggcggatctgggggcggaggctctttcgaacaagttcagcttcaacagcctggcgctgagctggtcaaacctggcgcttctgtgaagatgagctgcaaagccagcggctacgccttcagcagctactggatcaactggatgaagcagaaacccggccagggactcgaatggatcggccaaatctatcccggcgacggcgacaccaactacaacggcaagttcaagggcagagccacactgaccgccgatacctctagcagcacagcctacatgcagctgagcagcctgaccagcgaagatagcgccgtgtacttctgtgcccggtccatcacaacagtcgtgggctgcgctatggactattggggccagggaacaagcgtgaccgtgtctagtacgcgtgagcagaaactgatctcggaagaggatgggagcggcagccagcctcacaccaagcccagcgtgttcgtgatgaagaacggcaccaacgtggcctgcctcgtgaaagagttctaccccaaggacatcaggatcaacctggtgtccagcaagaagatcaccgagttcgaccccgccatcgtgatctcccccagcggcaagtacaacgccgtgaagctggggaagtacgaggacagcaacagcgtgacctgctccgtgcagcacgacaacaagaccgtgcacagcaccgactttgaagtgaaaaccgactccaccgaccacgtgaagcccaaagagacagagaacaccaagcagcccagcaagagctgccacaagcccaaggccatcgtgcacaccgagaaagtgaacatgatgagcctgaccgtgctgggcctgcggatgctgttcgccaaaaccgtggccgtgaacttcctgctgaccgccaagctgttcttcctccgcgccaagagaagcggatctggcgtgaagcagaccctgaatttcgacctgctgaagctggctggcgacgtggaatccaacccaggcccttctagaggccatatgaccgagtacaagcccacggtgcgcctcgccacccgcgacgacgtccccagggccgtacgcaccctcgccgccgcgttcgccgactaccccgccacgcgccacaccgtcgatccggaccgccacatcgagcgggtcaccgagctgcaagaactcttcctcacgcgcgtcgggctcgacatcggcaaggtgtgggtcgcggacgacggcgccgcggtggcggtctggaccacgccggagagcgtcgaagcgggggcggtgttcgccgagatcggcccgcgcatggccgagttgagcggttcccggctggccgcgcagcaacagatggaaggcctcctggcgccgcaccggcccaaggagcccgcgtggttcctggccaccgtcggcgtctcgcccgaccaccagggcaagggtctgggcagcgccgtcgtgctccccggagtggaggcggccgagcgcgccggggtgcccgccttcctggagacctccgcgccccgcaacctccccttctacgagcggctcggcttcaccgtcaccgccgacgtcgaggtgcccgaaggaccgcgcacctggtgcatgacccgcaagcccggtgcctga

SEQ ID NO: 5865 - DNA, 2946 bp, Artificial Sequence
  Synthetic Polynucloetide
atggccttaccagtgaccgccttgctcctgccgctggccttgctgctccacgccgccaggccggaggtgcaactggtggaaagcggcggaggctctgtgcagacaggcggctctctgagactgacctgtgccgccagcggcagaaccagcagatcctatggcatgggctggttcagacaggcccctggcaaagaacgcgagttcgtgtccggcatctcttggagaggcgacagcaccggctacgccgatagcgtgaagggccggttcaccatcagccgggacaacgccaagaacaccgtggacctgcagatgaacagcctgaagcccgaggacaccgccatctactactgtgccgctgccgccggatctgcttggtacggcacactgtacgagtacgactactggggccagggcacccttgtgaccgtgtcatctggcggaggaagcggcggaggatctgaagtgcaactggtggaatctggaggctctctggtgcagccagggggaagcctgagactgtcttgtgccgcttccggcttcaccttcgacgactacgccatgagctgggtgcgccaggtgccaggcaaaggcctggaatgggtgtccagcatcaactggagcggcacccacaccgattacgccgactccgtgaaaggcagattcacaatcagcagaaacaacgccaacaataccctgtacctgcagatgaactccctgaagtctgaggatacagcagtgtattattgcgccaagaactggcgggacgccggcaccacttggtttgagaaaagcggctctgccggacagggaacccaagtgacagtgtcctccggtaccggcggaggcggatctggcggcggaggtagcggtggcggaggatctgaattcgacatccagatgacacagagccctagcagcctgtctgccagcgtgggagacagagtgaccatcacatgcaaggccagcgaccacatcaacaactggctggcctggtatcagcagaagcctggacaggcccctaagctgctgatctacggcgctaccacactggaaacaggcgtgcccagcagattttctggcagcggctctggcaccgactacaccctgacaatatccagcctccagcctgaggacttcgccacctactactgtcagcagagctggaacaccccttggacattcggccagggcaccaagctggaaatcaagagactcgagagccagcctcacaccaagcccagcgtgttcgtgatgaagaacggcaccaacgtggcctgcctcgtgaaagagttctaccccaaggacatcaggatcaacctggtgtccagcaagaagatcaccgagttcgaccccgccatcgtgatctcccccagcggcaagtacaacgccgtgaagctggggaagtacgaggacagcaacagcgtgacctgctccgtgcagcacgacaacaagaccgtgcacagcaccgactttgaagtgaaaaccgactccaccgaccacgtgaagcccaaagagacagagaacaccaagcagcccagcaagagctgccacaagcccaaggccatcgtgcacaccgagaaagtgaacatgatgagcctgaccgtgctgggcctgcggatgctgttcgccaaaaccgtggccgtgaacttcctgctgaccgccaagctgttcttcctcagggccaagcgatctggatctggagcaacaaacttctcactactcaaacaagcaggtgacgtggaggagaatcccgggcctactagtatggactggatttggcgcatccttttccttgtcggcgctgctaccggcgcccattccgggcccgtggacaacaagttcaacaaagagcggtacagcgcctactacgagatttggcaactgcccaacctgaacgtgcggcagaaggccgccttcatcggatctctgcaggacgaccctagccagagcgccaatctgctggccgaggccaagaagctgaacgacgcccaggcccctaaaggatccggcggcggaggatctggcggaggcggatctgggggcggaggctctttcgaacaagttcagcttcaacagcctggcgctgagctggtcaaacctggcgcttctgtgaagatgagctgcaaagccagcggctacgccttcagcagctactggatcaactggatgaagcagaaacccggccagggactcgaatggatcggccaaatctatcccggcgacggcgacaccaactacaacggcaagttcaagggcagagccacactgaccgccgatacctctagcagcacagcctacatgcagctgagcagcctgaccagcgaagatagcgccgtgtacttctgtgcccggtccatcacaacagtcgtgggctgcgctatggactattggggccagggaacaagcgtgaccgtgtctagtacgcgtgacaagcagctggacgccgacgtgtcccccaagcctaccatcttcctgccctctatcgccgagacaaagctccagaaggccggcacctacctgtgcctgctggaaaagttcttcccagatgtgattaagatccactggcaggaaaagaagtccaacaccatcctgggcagccaggaaggcaacaccatgaagaccaacgacacctacatgaagttcagctggctgaccgtgcccgagaagtccctggacaaagaacacagatgcatcgtgcggcacgaaaacaacaagaacggcgtggaccaggaaatcatcttcccacccatcaagaccgatgtgattacaatggaccccaaggacaactgctccaaggacgccaacgataccctgctgctccagctgaccaacaccagcgcctactacatgtacttgttgctgctgctgaagtccgtggtgtacttcgccatcatcacatgctgcctgctgcggagaaccgccttctgctgcaacggcgagaagtct

SEQ ID NO: 5866 - DNA, 4155 bp, Artificial Sequence
  Synthetic Polynucloetide
atggccttaccagtgaccgccttgctcctgccgctggccttgctgctccacgccgccaggccggaggtgcaactggtggaaagcggcggaggctctgtgcagacaggcggctctctgagactgacctgtgccgccagcggcagaaccagcagatcctatggcatgggctggttcagacaggcccctggcaaagaacgcgagttcgtgtccggcatctcttggagaggcgacagcaccggctacgccgatagcgtgaagggccggttcaccatcagccgggacaacgccaagaacaccgtggacctgcagatgaacagcctgaagcccgaggacaccgccatctactactgtgccgctgccgccggatctgcttggtacggcacactgtacgagtacgactactggggccagggcacccttgtgaccgtgtcatctggcggaggaagcggcggaggatctgaagtgcaactggtggaatctggaggctctctggtgcagccagggggaagcctgagactgtcttgtgccgcttccggcttcaccttcgacgactacgccatgagctgggtgcgccaggtgccaggcaaaggcctggaatgggtgtccagcatcaactggagcggcacccacaccgattacgccgactccgtgaaaggcagattcacaatcagcagaaacaacgccaacaataccctgtacctgcagatgaactccctgaagtctgaggatacagcagtgtattattgcgccaagaactggcgggacgccggcaccacttggtttgagaaaagcggctctgccggacagggaacccaagtgacagtgtcctccggtaccggcggaggcggatctggcggcggaggtagcggtggcggaggatctgaattcgacatccagatgacacagagccctagcagcctgtctgccagcgtgggagacagagtgaccatcacatgcaaggccagcgaccacatcaacaactggctggcctggtatcagcagaagcctggacaggcccctaagctgctgatctacggcgctaccacactggaaacaggcgtgcccagcagattttctggcagcggctctggcaccgactacaccctgacaatatccagcctccagcctgaggacttcgccacctactactgtcagcagagctggaacaccccttggacattcggccagggcaccaagctggaaatcaagagaggacagcctaaggccaatcctaccgtgacactgttccctccaagcagcgaagaactccaggccaacaaggccacacttgtgtgcctgatctccgacttctaccctggggctgtgacagtggcttggaaggccgatggatctcctgtgaaagccggcgtggaaaccaccaagccatccaagcagagcaacaacaaatacgccgccagctcctacctgagcctgacacctgagcagtggaagtcccacagatcctacagctgccaagtgacccacgaaggcagcaccgtggaaaagacagtggcccctacagagtgcagcggatcccagagcttcggcctgctggaccccaagctgtgctacctgctggatggcatcctgttcatctacggcgtgatcctgaccgccctgttcctgagagtgaagttcagcagaagcgccgacgcccctgcctaccagcagggacagaaccaactgtacaacgagctgaacctgggcagacgggaagagtacgacgtgctggacaagcggagaggcagggaccctgagatgggcggaaagccccagcggagaaagaacccccaggaaggactgtataacgaactccagaaagacaagatggccgaagcctacagcgagatcggcatgaagggcgagcggagaagaggcaagggccacgatggcctgtaccagggcctgagcaccgccaccaaggacacctatgacgccctgcacatgcaggccctgcctccaagaagggccaagcgatctggatctggagcaacaaacttctcactactcaaacaagcaggtgacgtggaggagaatcccgggcctactagtatggactggatttggcgcatccttttccttgtcggcgctgctaccggcgcccattccgggcccgtggacaacaagttcaacaaagagcggtacagcgcctactacgagatttggcaactgcccaacctgaacgtgcggcagaaggccgccttcatcggatctctgcaggacgaccctagccagagcgccaatctgctggccgaggccaagaagctgaacgacgcccaggcccctaaaggatccggcggcggaggatctggcggaggcggatctgggggcggaggctctttcgaacaagttcagcttcaacagcctggcgctgagctggtcaaacctggcgcttctgtgaagatgagctgcaaagccagcggctacgccttcagcagctactggatcaactggatgaagcagaaacccggccagggactcgaatggatcggccaaatctatcccggcgacggcgacaccaactacaacggcaagttcaagggcagagccacactgaccgccgatacctctagcagcacagcctacatgcagctgagcagcctgaccagcgaagatagcgccgtgtacttctgtgcccggtccatcacaacagtcgtgggctgcgctatggactattggggccagggaacaagcgtgaccgtgtctagtgcctctacaaagggaccctccgtgtttcctctggctcccagcagcaagtctacaagcggaggaacagccgctctgggctgcctggtcaaggattactttcccgagcctgtgaccgtgtcctggaatagcggagcactgacaagcggcgtgcacacctttccagccgtgctgcaaagcagcggcctgtactctctgagcagcgtggtcacagtgcctagctctagcctgggcacccagacctacatctgcaatgtgaaccacaagcctagcaacaccaaggtggacaagagagtggaacccaagagctgtggtacccagagttttgggttgttggaccctaaattgtgctatctgttggacggaatcctgttcatttacggagtgatcctgaccgcattgttcctgcgggttaagttttccagatccgcagacgcacccgcttaccaacaagggcagaaccaactctacaatgaacttaatttggggcggagggaagagtacgacgttctggacaaaaggaggggacgagatcccgagatgggcggaaagcctcagcgaaggaagaatccgcaagaggggctttataacgaactccagaaagataaaatggcagaagcctatagtgagattgggatgaagggagaaaggaggaggggtaaaggtcacgatgggttgtaccaaggattgagcacagccactaaagatacctatgatgcgctccacatgcaggccctgccgccaagacgcgccaagagaagcggatctggcgtgaagcagaccctgaatttcgacctgctgaagctggctggcgacgtggaatccaacccaggcccttctagaggccatatgaccgagtacaagcccacggtgcgcctcgccacccgcgacgacgtccccagggccgtacgcaccctcgccgccgcgttcgccgactaccccgccacgcgccacaccgtcgatccggaccgccacatcgagcgggtcaccgagctgcaagaactcttcctcacgcgcgtcgggctcgacatcggcaaggtgtgggtcgcggacgacggcgccgcggtggcggtctggaccacgccggagagcgtcgaagcgggggcggtgttcgccgagatcggcccgcgcatggccgagttgagcggttcccggctggccgcgcagcaacagatggaaggcctcctggcgccgcaccggcccaaggagcccgcgtggttcctggccaccgtcggcgtctcgcccgaccaccagggcaagggtctgggcagcgccgtcgtgctccccggagtggaggcggccgagcgcgccggggtgcccgccttcctggagacctccgcgccccgcaacctccccttctacgagcggctcggcttcaccgtcaccgccgacgtcgaggtgcccgaaggaccgcgcacctggtgcatgacccgcaagcccggtgcctga

SEQ ID NO: 5867 - DNA, 3510 bp, Artificial Sequence
  Synthetic Polynucloetide
atggccttaccagtgaccgccttgctcctgccgctggccttgctgctccacgccgccaggccggaggtgcaactggtggaaagcggcggaggctctgtgcagacaggcggctctctgagactgacctgtgccgccagcggcagaaccagcagatcctatggcatgggctggttcagacaggcccctggcaaagaacgcgagttcgtgtccggcatctcttggagaggcgacagcaccggctacgccgatagcgtgaagggccggttcaccatcagccgggacaacgccaagaacaccgtggacctgcagatgaacagcctgaagcccgaggacaccgccatctactactgtgccgctgccgccggatctgcttggtacggcacactgtacgagtacgactactggggccagggcacccttgtgaccgtgtcatctggcggaggaagcggcggaggatctgaagtgcaactggtggaatctggaggctctctggtgcagccagggggaagcctgagactgtcttgtgccgcttccggcttcaccttcgacgactacgccatgagctgggtgcgccaggtgccaggcaaaggcctggaatgggtgtccagcatcaactggagcggcacccacaccgattacgccgactccgtgaaaggcagattcacaatcagcagaaacaacgccaacaataccctgtacctgcagatgaactccctgaagtctgaggatacagcagtgtattattgcgccaagaactggcgggacgccggcaccacttggtttgagaaaagcggctctgccggacagggaacccaagtgacagtgtcctccggtaccggcggaggcggatctggcggcggaggtagcggtggcggaggatctgaattcgacatccagatgacacagagccctagcagcctgtctgccagcgtgggagacagagtgaccatcacatgcaaggccagcgaccacatcaacaactggctggcctggtatcagcagaagcctggacaggcccctaagctgctgatctacggcgctaccacactggaaacaggcgtgcccagcagattttctggcagcggctctggcaccgactacaccctgacaatatccagcctccagcctgaggacttcgccacctactactgtcagcagagctggaacaccccttggacattcggccagggcaccaagctggaaatcaagagactcgaggacctgaagaacgtgttcccacctgaggtggccgtgttcgagcctagcgaggccgagatcagccacacccagaaagccaccctcgtgtgcctggctaccggcttctaccccgaccatgtggaactgtcttggtgggtcaacggcaaagaggtgcacagcggcgtgtctaccgacccccagccactgaaagaacagcccgccctgaacgacagccggtactgcctgagcagcagactgagagtgtccgccaccttctggcagaacccccggaaccacttcagatgccaggtgcagttctacggcctgagcgagaacgacgagtggacccaggacagagccaagcccgtgacccagatcgtgtctgccgaagcctggggcagagccgattgcggatcccagagcttcggcctgctggaccccaagctgtgctacctgctggatggcatcctgttcatctacggcgtgatcctgaccgccctgttcctgagagtgaagttcagcagaagcgccgacgcccctgcctaccagcagggacagaaccaactgtacaacgagctgaacctgggcagacgggaagagtacgacgtgctggacaagcggagaggcagggaccctgagatgggcggaaagccccagcggagaaagaacccccaggaaggactgtataacgaactccagaaagacaagatggccgaagcctacagcgagatcggcatgaagggcgagcggagaagaggcaagggccacgatggcctgtaccagggcctgagcaccgccaccaaggacacctatgacgccctgcacatgcaggccctgcctccaagaagggccaagcgatctggatctggagcaacaaacttctcactactcaaacaagcaggtgacgtggaggagaatcccgggcctactagtatggactggatttggcgcatccttttccttgtcggcgctgctaccggcgcccattccgggcccgtggacaacaagttcaacaaagagcggtacagcgcctactacgagatttggcaactgcccaacctgaacgtgcggcagaaggccgccttcatcggatctctgcaggacgaccctagccagagcgccaatctgctggccgaggccaagaagctgaacgacgcccaggcccctaaaggatccggcggcggaggatctggcggaggcggatctgggggcggaggctctttcgaacaagttcagcttcaacagcctggcgctgagctggtcaaacctggcgcttctgtgaagatgagctgcaaagccagcggctacgccttcagcagctactggatcaactggatgaagcagaaacccggccagggactcgaatggatcggccaaatctatcccggcgacggcgacaccaactacaacggcaagttcaagggcagagccacactgaccgccgatacctctagcagcacagcctacatgcagctgagcagcctgaccagcgaagatagcgccgtgtacttctgtgcccggtccatcacaacagtcgtgggctgcgctatggactattggggccagggaacaagcgtgaccgtgtctagtacgcgtatccagaaccctgatcctgccgtgtaccagctgcgggatagcaagagcagcgacaagagcgtgtgtctgttcaccgacttcgacagccagaccaacgtgtcccagagcaaggactccgacgtgtacatcaccgataagaccgtgctggacatgcggagcatggacttcaagagcaactccgccgtggcctggtccaacaagtccgatttcgcctgcgccaacgccttcaacaacagcattatccccgaggacacattcttcccaagccccgagagcagctgcggtacccagagttttgggttgttggaccctaaattgtgctatctgttggacggaatcctgttcatttacggagtgatcctgaccgcattgttcctgcgggttaagttttccagatccgcagacgcacccgcttaccaacaagggcagaaccaactctacaatgaacttaatttggggcggagggaagagtacgacgttctggacaaaaggaggggacgagatcccgagatgggcggaaagcctcagcgaaggaagaatccgcaagaggggctttataacgaactccagaaagataaaatggcagaagcctatagtgagattgggatgaagggagaaaggaggaggggtaaaggtcacgatgggttgtaccaaggattgagcacagccactaaagatacctatgatgcgctccacatgcaggccctgccgccaaga

SEQ ID NO: 5868 - DNA, 3510 bp, Artificial Sequence
  Synthetic Polynucloetide
atggccttaccagtgaccgccttgctcctgccgctggccttgctgctccacgccgccaggccggaggtgcaactggtggaaagcggcggaggctctgtgcagacaggcggctctctgagactgacctgtgccgccagcggcagaaccagcagatcctatggcatgggctggttcagacaggcccctggcaaagaacgcgagttcgtgtccggcatctcttggagaggcgacagcaccggctacgccgatagcgtgaagggccggttcaccatcagccgggacaacgccaagaacaccgtggacctgcagatgaacagcctgaagcccgaggacaccgccatctactactgtgccgctgccgccggatctgcttggtacggcacactgtacgagtacgactactggggccagggcacccttgtgaccgtgtcatctggcggaggaagcggcggaggatctgaagtgcaactggtggaatctggaggctctctggtgcagccagggggaagcctgagactgtcttgtgccgcttccggcttcaccttcgacgactacgccatgagctgggtgcgccaggtgccaggcaaaggcctggaatgggtgtccagcatcaactggagcggcacccacaccgattacgccgactccgtgaaaggcagattcacaatcagcagaaacaacgccaacaataccctgtacctgcagatgaactccctgaagtctgaggatacagcagtgtattattgcgccaagaactggcgggacgccggcaccacttggtttgagaaaagcggctctgccggacagggaacccaagtgacagtgtcctccggtaccggcggaggcggatctggcggcggaggtagcggtggcggaggatctgaattcgacatccagatgacacagagccctagcagcctgtctgccagcgtgggagacagagtgaccatcacatgcaaggccagcgaccacatcaacaactggctggcctggtatcagcagaagcctggacaggcccctaagctgctgatctacggcgctaccacactggaaacaggcgtgcccagcagattttctggcagcggctctggcaccgactacaccctgacaatatccagcctccagcctgaggacttcgccacctactactgtcagcagagctggaacaccccttggacattcggccagggcaccaagctggaaatcaagagactcgaggacctgaagaacgtgttcccacctgaggtggccgtgttcgagcctagcaaggccgagatcgcccacacccagaaagccaccctcgtgtgcctggctaccggcttctaccccgaccatgtggaactgtcttggtgggtcaacggcaaagaggtgcacagcggcgtgtgtaccgacccccagccactgaaagaacagcccgccctgaacgacagccggtactgcctgagcagcagactgagagtgtccgccaccttctggcagaacccccggaaccacttcagatgccaggtgcagttctacggcctgagcgagaacgacgagtggacccaggacagagccaagcccgtgacccagatcgtgtctgccgaagcctggggcagagccgattgcggatcccagagcttcggcctgctggaccccaagctgtgctacctgctggatggcatcctgttcatctacggcgtgatcctgaccgccctgttcctgagagtgaagttcagcagaagcgccgacgcccctgcctaccagcagggacagaaccaactgtacaacgagctgaacctgggcagacgggaagagtacgacgtgctggacaagcggagaggcagggaccctgagatgggcggaaagccccagcggagaaagaacccccaggaaggactgtataacgaactccagaaagacaagatggccgaagcctacagcgagatcggcatgaagggcgagcggagaagaggcaagggccacgatggcctgtaccagggcctgagcaccgccaccaaggacacctatgacgccctgcacatgcaggccctgcctccaagaagggccaagcgatctggatctggagcaacaaacttctcactactcaaacaagcaggtgacgtggaggagaatcccgggcctactagtatggactggatttggcgcatccttttccttgtcggcgctgctaccggcgcccattccgggcccgtggacaacaagttcaacaaagagcggtacagcgcctactacgagatttggcaactgcccaacctgaacgtgcggcagaaggccgccttcatcggatctctgcaggacgaccctagccagagcgccaatctgctggccgaggccaagaagctgaacgacgcccaggcccctaaaggatccggcggcggaggatctggcggaggcggatctgggggcggaggctctttcgaacaagttcagcttcaacagcctggcgctgagctggtcaaacctggcgcttctgtgaagatgagctgcaaagccagcggctacgccttcagcagctactggatcaactggatgaagcagaaacccggccagggactcgaatggatcggccaaatctatcccggcgacggcgacaccaactacaacggcaagttcaagggcagagccacactgaccgccgatacctctagcagcacagcctacatgcagctgagcagcctgaccagcgaagatagcgccgtgtacttctgtgcccggtccatcacaacagtcgtgggctgcgctatggactattggggccagggaacaagcgtgaccgtgtctagtacgcgtatccagaaccctgatcctgccgtgtaccagctgcgggatagcaagagcagcgacaagagcgtgtgtctgttcaccgacttcgacagccagaccaacgtgtcccagagcaaggactccgacgtgtacatcaccgataagtgcgtgctggacatgcggagcatggacttcaagagcaactccgccgtggcctggtccaacaagtccgatttcgcctgcgccaacgccttcaacaacagcattatccccgaggacacattcttcccaagcagcgacgtgccctgcggtacccagagttttgggttgttggaccctaaattgtgctatctgttggacggaatcctgttcatttacggagtgatcctgaccgcattgttcctgcgggttaagttttccagatccgcagacgcacccgcttaccaacaagggcagaaccaactctacaatgaacttaatttggggcggagggaagagtacgacgttctggacaaaaggaggggacgagatcccgagatgggcggaaagcctcagcgaaggaagaatccgcaagaggggctttataacgaactccagaaagataaaatggcagaagcctatagtgagattgggatgaagggagaaaggaggaggggtaaaggtcacgatgggttgtaccaaggattgagcacagccactaaagatacctatgatgcgctccacatgcaggccctgccgccaaga

SEQ ID NO: 5869 - DNA, 3723 bp, Artificial Sequence
  Synthetic Polynucloetide
atggccttaccagtgaccgccttgctcctgccgctggccttgctgctccacgccgccaggccggaggtgcaactggtggaaagcggcggaggctctgtgcagacaggcggctctctgagactgacctgtgccgccagcggcagaaccagcagatcctatggcatgggctggttcagacaggcccctggcaaagaacgcgagttcgtgtccggcatctcttggagaggcgacagcaccggctacgccgatagcgtgaagggccggttcaccatcagccgggacaacgccaagaacaccgtggacctgcagatgaacagcctgaagcccgaggacaccgccatctactactgtgccgctgccgccggatctgcttggtacggcacactgtacgagtacgactactggggccagggcacccttgtgaccgtgtcatctggcggaggaagcggcggaggatctgaagtgcaactggtggaatctggaggctctctggtgcagccagggggaagcctgagactgtcttgtgccgcttccggcttcaccttcgacgactacgccatgagctgggtgcgccaggtgccaggcaaaggcctggaatgggtgtccagcatcaactggagcggcacccacaccgattacgccgactccgtgaaaggcagattcacaatcagcagaaacaacgccaacaataccctgtacctgcagatgaactccctgaagtctgaggatacagcagtgtattattgcgccaagaactggcgggacgccggcaccacttggtttgagaaaagcggctctgccggacagggaacccaagtgacagtgtcctccggtaccggcggaggcggatctggcggcggaggtagcggtggcggaggatctgaattcgacatccagatgacacagagccctagcagcctgtctgccagcgtgggagacagagtgaccatcacatgcaaggccagcgaccacatcaacaactggctggcctggtatcagcagaagcctggacaggcccctaagctgctgatctacggcgctaccacactggaaacaggcgtgcccagcagattttctggcagcggctctggcaccgactacaccctgacaatatccagcctccagcctgaggacttcgccacctactactgtcagcagagctggaacaccccttggacattcggccagggcaccaagctggaaatcaagagactcgaggggaaaccaattcccaaccctcttctgggactggattcaaccggcagcggcgaggacctgaagaacgtgttcccacctgaggtggccgtgttcgagcctagcgaggccgagatcagccacacccagaaagccaccctcgtgtgcctggctaccggcttctaccccgaccatgtggaactgtcttggtgggtcaacggcaaagaggtgcacagcggcgtgtctaccgacccccagccactgaaagaacagcccgccctgaacgacagccggtactgcctgagcagcagactgagagtgtccgccaccttctggcagaacccccggaaccacttcagatgccaggtgcagttctacggcctgagcgagaacgacgagtggacccaggacagagccaagcccgtgacccagatcgtgtctgccgaagcctggggcagagccgattgcggatcccagagcttcggcctgctggaccccaagctgtgctacctgctggatggcatcctgttcatctacggcgtgatcctgaccgccctgttcctgagagtgaagttcagcagaagcgccgacgcccctgcctaccagcagggacagaaccaactgtacaacgagctgaacctgggcagacgggaagagtacgacgtgctggacaagcggagaggcagggaccctgagatgggcggaaagccccagcggagaaagaacccccaggaaggactgtataacgaactccagaaagacaagatggccgaagcctacagcgagatcggcatgaagggcgagcggagaagaggcaagggccacgatggcctgtaccagggcctgagcaccgccaccaaggacacctatgacgccctgcacatgcaggccctgcctccaagaagggccaagcgatctggatctggagcaacaaacttctcactactcaaacaagcaggtgacgtggaggagaatcccgggcctactagtatggactggatttggcgcatccttttccttgtcggcgctgctaccggcgcccattccgggcccgtggacaacaagttcaacaaagagcggtacagcgcctactacgagatttggcaactgcccaacctgaacgtgcggcagaaggccgccttcatcggatctctgcaggacgaccctagccagagcgccaatctgctggccgaggccaagaagctgaacgacgcccaggcccctaaaggatccggcggcggaggatctggcggaggcggatctgggggcggaggctctttcgaacaagttcagcttcaacagcctggcgctgagctggtcaaacctggcgcttctgtgaagatgagctgcaaagccagcggctacgccttcagcagctactggatcaactggatgaagcagaaacccggccagggactcgaatggatcggccaaatctatcccggcgacggcgacaccaactacaacggcaagttcaagggcagagccacactgaccgccgatacctctagcagcacagcctacatgcagctgagcagcctgaccagcgaagatagcgccgtgtacttctgtgcccggtccatcacaacagtcgtgggctgcgctatggactattggggccagggaacaagcgtgaccgtgtctagtacgcgtgagcagaaactgatctcggaagaggatgggagcggcatccagaaccctgatcctgccgtgtaccagctgcgggatagcaagagcagcgacaagagcgtgtgtctgttcaccgacttcgacagccagaccaacgtgtcccagagcaaggactccgacgtgtacatcaccgataagaccgtgctggacatgcggagcatggacttcaagagcaactccgccgtggcctggtccaacaagtccgatttcgcctgcgccaacgccttcaacaacagcattatccccgaggacacattcttcccaagccccgagagcagctgcggtacccagagttttgggttgttggaccctaaattgtgctatctgttggacggaatcctgttcatttacggagtgatcctgaccgcattgttcctgaggagcaagcggtcacggctgctccacagcgattacatgaatatgacaccacgaagaccgggtcctactcgcaaacactaccaaccctacgcacctccccgcgactttgcagcgtaccgatctcgggttaagttttccagatccgcagacgcacccgcttaccaacaagggcagaaccaactctacaatgaacttaatttggggcggagggaagagtacgacgttctggacaaaaggaggggacgagatcccgagatgggcggaaagcctcagcgaaggaagaatccgcaagaggggctttataacgaactccagaaagataaaatggcagaagcctatagtgagattgggatgaagggagaaaggaggaggggtaaaggtcacgatgggttgtaccaaggattgagcacagccactaaagatacctatgatgcgctccacatgcaggccctgccgccaaga

SEQ ID NO: 5870 - DNA, 3846 bp, Artificial Sequence
  Synthetic Polynucloetide
atggccttaccagtgaccgccttgctcctgccgctggccttgctgctccacgccgccaggccggaggtgcaactggtggaaagcggcggaggctctgtgcagacaggcggctctctgagactgacctgtgccgccagcggcagaaccagcagatcctatggcatgggctggttcagacaggcccctggcaaagaacgcgagttcgtgtccggcatctcttggagaggcgacagcaccggctacgccgatagcgtgaagggccggttcaccatcagccgggacaacgccaagaacaccgtggacctgcagatgaacagcctgaagcccgaggacaccgccatctactactgtgccgctgccgccggatctgcttggtacggcacactgtacgagtacgactactggggccagggcacccttgtgaccgtgtcatctggcggaggaagcggcggaggatctgaagtgcaactggtggaatctggaggctctctggtgcagccagggggaagcctgagactgtcttgtgccgcttccggcttcaccttcgacgactacgccatgagctgggtgcgccaggtgccaggcaaaggcctggaatgggtgtccagcatcaactggagcggcacccacaccgattacgccgactccgtgaaaggcagattcacaatcagcagaaacaacgccaacaataccctgtacctgcagatgaactccctgaagtctgaggatacagcagtgtattattgcgccaagaactggcgggacgccggcaccacttggtttgagaaaagcggctctgccggacagggaacccaagtgacagtgtcctccggtaccggcggaggcggatctggcggcggaggtagcggtggcggaggatctgaattcgacatccagatgacacagagccctagcagcctgtctgccagcgtgggagacagagtgaccatcacatgcaaggccagcgaccacatcaacaactggctggcctggtatcagcagaagcctggacaggcccctaagctgctgatctacggcgctaccacactggaaacaggcgtgcccagcagattttctggcagcggctctggcaccgactacaccctgacaatatccagcctccagcctgaggacttcgccacctactactgtcagcagagctggaacaccccttggacattcggccagggcaccaagctggaaatcaagagactcgaggggaaaccaattcccaaccctcttctgggactggattcaaccggcagcggcgaggacctgaagaacgtgttcccacctgaggtggccgtgttcgagcctagcgaggccgagatcagccacacccagaaagccaccctcgtgtgcctggctaccggcttctaccccgaccatgtggaactgtcttggtgggtcaacggcaaagaggtgcacagcggcgtgtctaccgacccccagccactgaaagaacagcccgccctgaacgacagccggtactgcctgagcagcagactgagagtgtccgccaccttctggcagaacccccggaaccacttcagatgccaggtgcagttctacggcctgagcgagaacgacgagtggacccaggacagagccaagcccgtgacccagatcgtgtctgccgaagcctggggcagagccgattgcggatcccagagcttcggcctgctggaccccaagctgtgctacctgctggatggcatcctgttcatctacggcgtgatcctgaccgccctgttcctgaggagtaagaggagcaggctcctgcacagtgactacatgaacatgactccacgccgccccggacccacccgcaagcattaccagccctatgccccaccacgcgacttcgcagcctatcgctccagagtgaagttcagcagaagcgccgacgcccctgcctaccagcagggacagaaccaactgtacaacgagctgaacctgggcagacgggaagagtacgacgtgctggacaagcggagaggcagggaccctgagatgggcggaaagccccagcggagaaagaacccccaggaaggactgtataacgaactccagaaagacaagatggccgaagcctacagcgagatcggcatgaagggcgagcggagaagaggcaagggccacgatggcctgtaccagggcctgagcaccgccaccaaggacacctatgacgccctgcacatgcaggccctgcctccaagaagggccaagcgatctggatctggagcaacaaacttctcactactcaaacaagcaggtgacgtggaggagaatcccgggcctactagtatggactggatttggcgcatccttttccttgtcggcgctgctaccggcgcccattccgggcccgtggacaacaagttcaacaaagagcggtacagcgcctactacgagatttggcaactgcccaacctgaacgtgcggcagaaggccgccttcatcggatctctgcaggacgaccctagccagagcgccaatctgctggccgaggccaagaagctgaacgacgcccaggcccctaaaggatccggcggcggaggatctggcggaggcggatctgggggcggaggctctttcgaacaagttcagcttcaacagcctggcgctgagctggtcaaacctggcgcttctgtgaagatgagctgcaaagccagcggctacgccttcagcagctactggatcaactggatgaagcagaaacccggccagggactcgaatggatcggccaaatctatcccggcgacggcgacaccaactacaacggcaagttcaagggcagagccacactgaccgccgatacctctagcagcacagcctacatgcagctgagcagcctgaccagcgaagatagcgccgtgtacttctgtgcccggtccatcacaacagtcgtgggctgcgctatggactattggggccagggaacaagcgtgaccgtgtctagtacgcgtgagcagaaactgatctcggaagaggatgggagcggcatccagaaccctgatcctgccgtgtaccagctgcgggatagcaagagcagcgacaagagcgtgtgtctgttcaccgacttcgacagccagaccaacgtgtcccagagcaaggactccgacgtgtacatcaccgataagaccgtgctggacatgcggagcatggacttcaagagcaactccgccgtggcctggtccaacaagtccgatttcgcctgcgccaacgccttcaacaacagcattatccccgaggacacattcttcccaagccccgagagcagctgcggtacccagagttttgggttgttggaccctaaattgtgctatctgttggacggaatcctgttcatttacggagtgatcctgaccgcattgttcctgaggagcaagcggtcacggctgctccacagcgattacatgaatatgacaccacgaagaccgggtcctactcgcaaacactaccaaccctacgcacctccccgcgactttgcagcgtaccgatctcgggttaagttttccagatccgcagacgcacccgcttaccaacaagggcagaaccaactctacaatgaacttaatttggggcggagggaagagtacgacgttctggacaaaaggaggggacgagatcccgagatgggcggaaagcctcagcgaaggaagaatccgcaagaggggctttataacgaactccagaaagataaaatggcagaagcctatagtgagattgggatgaagggagaaaggaggaggggtaaaggtcacgatgggttgtaccaaggattgagcacagccactaaagatacctatgatgcgctccacatgcaggccctgccgccaaga

SEQ ID NO: 5871 - DNA, 3729 bp, Artificial Sequence
  Synthetic Polynucloetide
atggccttaccagtgaccgccttgctcctgccgctggccttgctgctccacgccgccaggccggaggtgcaactggtggaaagcggcggaggctctgtgcagacaggcggctctctgagactgacctgtgccgccagcggcagaaccagcagatcctatggcatgggctggttcagacaggcccctggcaaagaacgcgagttcgtgtccggcatctcttggagaggcgacagcaccggctacgccgatagcgtgaagggccggttcaccatcagccgggacaacgccaagaacaccgtggacctgcagatgaacagcctgaagcccgaggacaccgccatctactactgtgccgctgccgccggatctgcttggtacggcacactgtacgagtacgactactggggccagggcacccttgtgaccgtgtcatctggcggaggaagcggcggaggatctgaagtgcaactggtggaatctggaggctctctggtgcagccagggggaagcctgagactgtcttgtgccgcttccggcttcaccttcgacgactacgccatgagctgggtgcgccaggtgccaggcaaaggcctggaatgggtgtccagcatcaactggagcggcacccacaccgattacgccgactccgtgaaaggcagattcacaatcagcagaaacaacgccaacaataccctgtacctgcagatgaactccctgaagtctgaggatacagcagtgtattattgcgccaagaactggcgggacgccggcaccacttggtttgagaaaagcggctctgccggacagggaacccaagtgacagtgtcctccggtaccggcggaggcggatctggcggcggaggtagcggtggcggaggatctgaattcgacatccagatgacacagagccctagcagcctgtctgccagcgtgggagacagagtgaccatcacatgcaaggccagcgaccacatcaacaactggctggcctggtatcagcagaagcctggacaggcccctaagctgctgatctacggcgctaccacactggaaacaggcgtgcccagcagattttctggcagcggctctggcaccgactacaccctgacaatatccagcctccagcctgaggacttcgccacctactactgtcagcagagctggaacaccccttggacattcggccagggcaccaagctggaaatcaagagactcgaggggaaaccaattcccaaccctcttctgggactggattcaaccggcagcggcgaggacctgaagaacgtgttcccacctgaggtggccgtgttcgagcctagcgaggccgagatcagccacacccagaaagccaccctcgtgtgcctggctaccggcttctaccccgaccatgtggaactgtcttggtgggtcaacggcaaagaggtgcacagcggcgtgtctaccgacccccagccactgaaagaacagcccgccctgaacgacagccggtactgcctgagcagcagactgagagtgtccgccaccttctggcagaacccccggaaccacttcagatgccaggtgcagttctacggcctgagcgagaacgacgagtggacccaggacagagccaagcccgtgacccagatcgtgtctgccgaagcctggggcagagccgattgcggatcccagagcttcggcctgctggaccccaagctgtgctacctgctggatggcatcctgttcatctacggcgtgatcctgaccgccctgttcctgagagtgaagttcagcagaagcgccgacgcccctgcctaccagcagggacagaaccaactgtacaacgagctgaacctgggcagacgggaagagtacgacgtgctggacaagcggagaggcagggaccctgagatgggcggaaagccccagcggagaaagaacccccaggaaggactgtataacgaactccagaaagacaagatggccgaagcctacagcgagatcggcatgaagggcgagcggagaagaggcaagggccacgatggcctgtaccagggcctgagcaccgccaccaaggacacctatgacgccctgcacatgcaggccctgcctccaagaagggccaagcgatctggatctggagcaacaaacttctcactactcaaacaagcaggtgacgtggaggagaatcccgggcctactagtatggactggatttggcgcatccttttccttgtcggcgctgctaccggcgcccattccgggcccgtggacaacaagttcaacaaagagcggtacagcgcctactacgagatttggcaactgcccaacctgaacgtgcggcagaaggccgccttcatcggatctctgcaggacgaccctagccagagcgccaatctgctggccgaggccaagaagctgaacgacgcccaggcccctaaaggatccggcggcggaggatctggcggaggcggatctgggggcggaggctctttcgaacaagttcagcttcaacagcctggcgctgagctggtcaaacctggcgcttctgtgaagatgagctgcaaagccagcggctacgccttcagcagctactggatcaactggatgaagcagaaacccggccagggactcgaatggatcggccaaatctatcccggcgacggcgacaccaactacaacggcaagttcaagggcagagccacactgaccgccgatacctctagcagcacagcctacatgcagctgagcagcctgaccagcgaagatagcgccgtgtacttctgtgcccggtccatcacaacagtcgtgggctgcgctatggactattggggccagggaacaagcgtgaccgtgtctagtacgcgtgagcagaaactgatctcggaagaggatctggggagcggcatccagaaccctgatcctgccgtgtaccagctgcgggatagcaagagcagcgacaagagcgtgtgtctgttcaccgacttcgacagccagaccaacgtgtcccagagcaaggactccgacgtgtacatcaccgataagaccgtgctggacatgcggagcatggacttcaagagcaactccgccgtggcctggtccaacaagtccgatttcgcctgcgccaacgccttcaacaacagcattatccccgaggacacattcttcccaagccccgagagcagctgcggtacccagagttttgggttgttggaccctaaattgtgctatctgttggacggaatcctgttcatttacggagtgatcctgaccgcattgttcctgaagagaggccggaagaagctgctgtacatcttcaagcagcctttcatgcggcccgtgcagaccacccaggaagaggacggctgctcctgccggttccccgaggaagaagaaggcggctgcgagctgcgggttaagttttccagatccgcagacgcacccgcttaccaacaagggcagaaccaactctacaatgaacttaatttggggcggagggaagagtacgacgttctggacaaaaggaggggacgagatcccgagatgggcggaaagcctcagcgaaggaagaatccgcaagaggggctttataacgaactccagaaagataaaatggcagaagcctatagtgagattgggatgaagggagaaaggaggaggggtaaaggtcacgatgggttgtaccaaggattgagcacagccactaaagatacctatgatgcgctccacatgcaggccctgccgccaaga

SEQ ID NO: 5872 - DNA, 3855 bp, Artificial Sequence
  Synthetic Polynucloetide
atggccttaccagtgaccgccttgctcctgccgctggccttgctgctccacgccgccaggccggaggtgcaactggtggaaagcggcggaggctctgtgcagacaggcggctctctgagactgacctgtgccgccagcggcagaaccagcagatcctatggcatgggctggttcagacaggcccctggcaaagaacgcgagttcgtgtccggcatctcttggagaggcgacagcaccggctacgccgatagcgtgaagggccggttcaccatcagccgggacaacgccaagaacaccgtggacctgcagatgaacagcctgaagcccgaggacaccgccatctactactgtgccgctgccgccggatctgcttggtacggcacactgtacgagtacgactactggggccagggcacccttgtgaccgtgtcatctggcggaggaagcggcggaggatctgaagtgcaactggtggaatctggaggctctctggtgcagccagggggaagcctgagactgtcttgtgccgcttccggcttcaccttcgacgactacgccatgagctgggtgcgccaggtgccaggcaaaggcctggaatgggtgtccagcatcaactggagcggcacccacaccgattacgccgactccgtgaaaggcagattcacaatcagcagaaacaacgccaacaataccctgtacctgcagatgaactccctgaagtctgaggatacagcagtgtattattgcgccaagaactggcgggacgccggcaccacttggtttgagaaaagcggctctgccggacagggaacccaagtgacagtgtcctccggtaccggcggaggcggatctggcggcggaggtagcggtggcggaggatctgaattcgacatccagatgacacagagccctagcagcctgtctgccagcgtgggagacagagtgaccatcacatgcaaggccagcgaccacatcaacaactggctggcctggtatcagcagaagcctggacaggcccctaagctgctgatctacggcgctaccacactggaaacaggcgtgcccagcagattttctggcagcggctctggcaccgactacaccctgacaatatccagcctccagcctgaggacttcgccacctactactgtcagcagagctggaacaccccttggacattcggccagggcaccaagctggaaatcaagagactcgaggggaaaccaattcccaaccctcttctgggactggattcaaccggcagcggcgaggacctgaagaacgtgttcccacctgaggtggccgtgttcgagcctagcgaggccgagatcagccacacccagaaagccaccctcgtgtgcctggctaccggcttctaccccgaccatgtggaactgtcttggtgggtcaacggcaaagaggtgcacagcggcgtgtctaccgacccccagccactgaaagaacagcccgccctgaacgacagccggtactgcctgagcagcagactgagagtgtccgccaccttctggcagaacccccggaaccacttcagatgccaggtgcagttctacggcctgagcgagaacgacgagtggacccaggacagagccaagcccgtgacccagatcgtgtctgccgaagcctggggcagagccgattgcggatcccagagcttcggcctgctggaccccaagctgtgctacctgctggatggcatcctgttcatctacggcgtgatcctgaccgccctgttcctgaaacggggcagaaagaaactcctgtatatattcaaacaaccatttatgagaccagtacaaactactcaagaggaagatggctgtagctgccgatttccagaagaagaagaaggaggatgtgaactgagagtgaagttcagcagaagcgccgacgcccctgcctaccagcagggacagaaccaactgtacaacgagctgaacctgggcagacgggaagagtacgacgtgctggacaagcggagaggcagggaccctgagatgggcggaaagccccagcggagaaagaacccccaggaaggactgtataacgaactccagaaagacaagatggccgaagcctacagcgagatcggcatgaagggcgagcggagaagaggcaagggccacgatggcctgtaccagggcctgagcaccgccaccaaggacacctatgacgccctgcacatgcaggccctgcctccaagaagggccaagcgatctggatctggagcaacaaacttctcactactcaaacaagcaggtgacgtggaggagaatcccgggcctactagtatggactggatttggcgcatccttttccttgtcggcgctgctaccggcgcccattccgggcccgtggacaacaagttcaacaaagagcggtacagcgcctactacgagatttggcaactgcccaacctgaacgtgcggcagaaggccgccttcatcggatctctgcaggacgaccctagccagagcgccaatctgctggccgaggccaagaagctgaacgacgcccaggcccctaaaggatccggcggcggaggatctggcggaggcggatctgggggcggaggctctttcgaacaagttcagcttcaacagcctggcgctgagctggtcaaacctggcgcttctgtgaagatgagctgcaaagccagcggctacgccttcagcagctactggatcaactggatgaagcagaaacccggccagggactcgaatggatcggccaaatctatcccggcgacggcgacaccaactacaacggcaagttcaagggcagagccacactgaccgccgatacctctagcagcacagcctacatgcagctgagcagcctgaccagcgaagatagcgccgtgtacttctgtgcccggtccatcacaacagtcgtgggctgcgctatggactattggggccagggaacaagcgtgaccgtgtctagtacgcgtgagcagaaactgatctcggaagaggatctggggagcggcatccagaaccctgatcctgccgtgtaccagctgcgggatagcaagagcagcgacaagagcgtgtgtctgttcaccgacttcgacagccagaccaacgtgtcccagagcaaggactccgacgtgtacatcaccgataagaccgtgctggacatgcggagcatggacttcaagagcaactccgccgtggcctggtccaacaagtccgatttcgcctgcgccaacgccttcaacaacagcattatccccgaggacacattcttcccaagccccgagagcagctgcggtacccagagttttgggttgttggaccctaaattgtgctatctgttggacggaatcctgttcatttacggagtgatcctgaccgcattgttcctgaagagaggccggaagaagctgctgtacatcttcaagcagcctttcatgcggcccgtgcagaccacccaggaagaggacggctgctcctgccggttccccgaggaagaagaaggcggctgcgagctgcgggttaagttttccagatccgcagacgcacccgcttaccaacaagggcagaaccaactctacaatgaacttaatttggggcggagggaagagtacgacgttctggacaaaaggaggggacgagatcccgagatgggcggaaagcctcagcgaaggaagaatccgcaagaggggctttataacgaactccagaaagataaaatggcagaagcctatagtgagattgggatgaagggagaaaggaggaggggtaaaggtcacgatgggttgtaccaaggattgagcacagccactaaagatacctatgatgcgctccacatgcaggccctgccgccaaga

SEQ ID NO: 5873 - DNA, 3528 bp, Artificial Sequence
  Synthetic Polynucloetide
atggccttaccagtgaccgccttgctcctgccgctggccttgctgctccacgccgccaggccggaggtgcaactggtggaaagcggcggaggctctgtgcagacaggcggctctctgagactgacctgtgccgccagcggcagaaccagcagatcctatggcatgggctggttcagacaggcccctggcaaagaacgcgagttcgtgtccggcatctcttggagaggcgacagcaccggctacgccgatagcgtgaagggccggttcaccatcagccgggacaacgccaagaacaccgtggacctgcagatgaacagcctgaagcccgaggacaccgccatctactactgtgccgctgccgccggatctgcttggtacggcacactgtacgagtacgactactggggccagggcacccttgtgaccgtgtcatctggcggaggaagcggcggaggatctgaagtgcaactggtggaatctggaggctctctggtgcagccagggggaagcctgagactgtcttgtgccgcttccggcttcaccttcgacgactacgccatgagctgggtgcgccaggtgccaggcaaaggcctggaatgggtgtccagcatcaactggagcggcacccacaccgattacgccgactccgtgaaaggcagattcacaatcagcagaaacaacgccaacaataccctgtacctgcagatgaactccctgaagtctgaggatacagcagtgtattattgcgccaagaactggcgggacgccggcaccacttggtttgagaaaagcggctctgccggacagggaacccaagtgacagtgtcctccggtaccggcggaggcggatctggcggcggaggtagcggtggcggaggatctgaattcgacatccagatgacacagagccctagcagcctgtctgccagcgtgggagacagagtgaccatcacatgcaaggccagcgaccacatcaacaactggctggcctggtatcagcagaagcctggacaggcccctaagctgctgatctacggcgctaccacactggaaacaggcgtgcccagcagattttctggcagcggctctggcaccgactacaccctgacaatatccagcctccagcctgaggacttcgccacctactactgtcagcagagctggaacaccccttggacattcggccagggcaccaagctggaaatcaagagactcgagcagagcttcggcctgctggaccccaagctgtgctacctgctggatggcatcctgttcatctacggcgtgatcctgaccgccctgttcctgagagtgaagttcagcagaagcgccgacgcccctgcctaccagcagggacagaaccaactgtacaacgagctgaacctgggcagacgggaagagtacgacgtgctggacaagcggagaggcagggaccctgagatgggcggaaagccccagcggagaaagaacccccaggaaggactgtataacgaactccagaaagacaagatggccgaagcctacagcgagatcggcatgaagggcgagcggagaagaggcaagggccacgatggcctgtaccagggcctgagcaccgccaccaaggacacctatgacgccctgcacatgcaggccctgcctccaagaagggccaagcgatctggatctggagcaacaaacttctcactactcaaacaagcaggtgacgtggaggagaatcccgggcctactagtatggactggatttggcgcatccttttccttgtcggcgctgctaccggcgcccattccgggcccgtggacaacaagttcaacaaagagcggtacagcgcctactacgagatttggcaactgcccaacctgaacgtgcggcagaaggccgccttcatcggatctctgcaggacgaccctagccagagcgccaatctgctggccgaggccaagaagctgaacgacgcccaggcccctaaaggatccggcggcggaggatctggcggaggcggatctgggggcggaggctctttcgaacaagttcagcttcaacagcctggcgctgagctggtcaaacctggcgcttctgtgaagatgagctgcaaagccagcggctacgccttcagcagctactggatcaactggatgaagcagaaacccggccagggactcgaatggatcggccaaatctatcccggcgacggcgacaccaactacaacggcaagttcaagggcagagccacactgaccgccgatacctctagcagcacagcctacatgcagctgagcagcctgaccagcgaagatagcgccgtgtacttctgtgcccggtccatcacaacagtcgtgggctgcgctatggactattggggccagggaacaagcgtgaccgtgtctagtacgcgtcagagttttgggttgttggaccctaaattgtgctatctgttggacggaatcctgttcatttacggagtgatcctgaccgcattgttcctgcgggttaagttttccagatccgcagacgcacccgcttaccaacaagggcagaaccaactctacaatgaacttaatttggggcggagggaagagtacgacgttctggacaaaaggaggggacgagatcccgagatgggcggaaagcctcagcgaaggaagaatccgcaagaggggctttataacgaactccagaaagataaaatggcagaagcctatagtgagattgggatgaagggagaaaggaggaggggtaaaggtcacgatgggttgtaccaaggattgagcacagccactaaagatacctatgatgcgctccacatgcaggccctgccgccaagacgcgccaagagaagcggatctggcgtgaagcagaccctgaatttcgacctgctgaagctggctggcgacgtggaatccaacccaggcccttctagaggccatatgaccgagtacaagcccacggtgcgcctcgccacccgcgacgacgtccccagggccgtacgcaccctcgccgccgcgttcgccgactaccccgccacgcgccacaccgtcgatccggaccgccacatcgagcgggtcaccgagctgcaagaactcttcctcacgcgcgtcgggctcgacatcggcaaggtgtgggtcgcggacgacggcgccgcggtggcggtctggaccacgccggagagcgtcgaagcgggggcggtgttcgccgagatcggcccgcgcatggccgagttgagcggttcccggctggccgcgcagcaacagatggaaggcctcctggcgccgcaccggcccaaggagcccgcgtggttcctggccaccgtcggcgtctcgcccgaccaccagggcaagggtctgggcagcgccgtcgtgctccccggagtggaggcggccgagcgcgccggggtgcccgccttcctggagacctccgcgccccgcaacctccccttctacgagcggctcggcttcaccgtcaccgccgacgtcgaggtgcccgaaggaccgcgcacctggtgcatgacccgcaagcccggtgcctga

SEQ ID NO: 5874 - DNA, 3000 bp, Artificial Sequence
  Synthetic Polynucloetide
atggccttaccagtgaccgccttgctcctgccgctggccttgctgctccacgccgccaggccggaggtgcaactggtggaaagcggcggaggctctgtgcagacaggcggctctctgagactgacctgtgccgccagcggcagaaccagcagatcctatggcatgggctggttcagacaggcccctggcaaagaacgcgagttcgtgtccggcatctcttggagaggcgacagcaccggctacgccgatagcgtgaagggccggttcaccatcagccgggacaacgccaagaacaccgtggacctgcagatgaacagcctgaagcccgaggacaccgccatctactactgtgccgctgccgccggatctgcttggtacggcacactgtacgagtacgactactggggccagggcacccttgtgaccgtgtcatctggcggaggaagcggcggaggatctgaagtgcaactggtggaatctggaggctctctggtgcagccagggggaagcctgagactgtcttgtgccgcttccggcttcaccttcgacgactacgccatgagctgggtgcgccaggtgccaggcaaaggcctggaatgggtgtccagcatcaactggagcggcacccacaccgattacgccgactccgtgaaaggcagattcacaatcagcagaaacaacgccaacaataccctgtacctgcagatgaactccctgaagtctgaggatacagcagtgtattattgcgccaagaactggcgggacgccggcaccacttggtttgagaaaagcggctctgccggacagggaacccaagtgacagtgtcctccggtaccggcggaggcggatctggcggcggaggtagcggtggcggaggatctgaattcgacatccagatgacacagagccctagcagcctgtctgccagcgtgggagacagagtgaccatcacatgcaaggccagcgaccacatcaacaactggctggcctggtatcagcagaagcctggacaggcccctaagctgctgatctacggcgctaccacactggaaacaggcgtgcccagcagattttctggcagcggctctggcaccgactacaccctgacaatatccagcctccagcctgaggacttcgccacctactactgtcagcagagctggaacaccccttggacattcggccagggcaccaagctggaaatcaagagactcgagggacagcctaaggccaatcctaccgtgacactgttccctccaagcagcgaagaactccaggccaacaaggccacacttgtgtgcctgatctccgacttctaccctggggctgtgacagtggcttggaaggccgatggatctcctgtgaaagccggcgtggaaaccaccaagccatccaagcagagcaacaacaaatacgccgccagctcctacctgagcctgacacctgagcagtggaagtcccacagatcctacagctgccaagtgacccacgaaggcagcaccgtggaaaagacagtggcccctacagagtgcagccccatcaagaccgatgtgattacaatggaccccaaggacaactgctccaaggacgccaacgataccctgctgctccagctgaccaacaccagcgcctactacatgtacttgttgctgctgctgaagtccgtggtgtacttcgccatcatcacatgctgcctgctgcggagaaccgccttctgctgcaacggcgagaagtctagggccaagcgatctggatctggagcaacaaacttctcactactcaaacaagcaggtgacgtggaggagaatcccgggcctactagtatggactggatttggcgcatccttttccttgtcggcgctgctaccggcgcccattccgggcccgtggacaacaagttcaacaaagagcggtacagcgcctactacgagatttggcaactgcccaacctgaacgtgcggcagaaggccgccttcatcggatctctgcaggacgaccctagccagagcgccaatctgctggccgaggccaagaagctgaacgacgcccaggcccctaaaggatccggcggcggaggatctggcggaggcggatctgggggcggaggctctttcgaacaagttcagcttcaacagcctggcgctgagctggtcaaacctggcgcttctgtgaagatgagctgcaaagccagcggctacgccttcagcagctactggatcaactggatgaagcagaaacccggccagggactcgaatggatcggccaaatctatcccggcgacggcgacaccaactacaacggcaagttcaagggcagagccacactgaccgccgatacctctagcagcacagcctacatgcagctgagcagcctgaccagcgaagatagcgccgtgtacttctgtgcccggtccatcacaacagtcgtgggctgcgctatggactattggggccagggaacaagcgtgaccgtgtctagtacgcgtgcctctacaaagggaccctccgtgtttcctctggctcccagcagcaagtctacaagcggaggaacagccgctctgggctgcctggtcaaggattactttcccgagcctgtgaccgtgtcctggaatagcggagcactgacaagcggcgtgcacacctttccagccgtgctgcaaagcagcggcctgtactctctgagcagcgtggtcacagtgcctagctctagcctgggcacccagacctacatctgcaatgtgaaccacaagcctagcaacaccaaggtggacaagagagtggaacccaagagctgtgaagtgaaaaccgactccaccgaccacgtgaagcccaaagagacagagaacaccaagcagcccagcaagagctgccacaagcccaaggccatcgtgcacaccgagaaagtgaacatgatgagcctgaccgtgctgggcctgcggatgctgttcgccaaaaccgtggccgtgaacttcctgctgaccgccaagctgttcttcctc

SEQ ID NO: 5875 - DNA, 2934 bp, Artificial Sequence
  Synthetic Polynucloetide
atggccttaccagtgaccgccttgctcctgccgctggccttgctgctccacgccgccaggccggaggtgcaactggtggaaagcggcggaggctctgtgcagacaggcggctctctgagactgacctgtgccgccagcggcagaaccagcagatcctatggcatgggctggttcagacaggcccctggcaaagaacgcgagttcgtgtccggcatctcttggagaggcgacagcaccggctacgccgatagcgtgaagggccggttcaccatcagccgggacaacgccaagaacaccgtggacctgcagatgaacagcctgaagcccgaggacaccgccatctactactgtgccgctgccgccggatctgcttggtacggcacactgtacgagtacgactactggggccagggcacccttgtgaccgtgtcatctggcggaggaagcggcggaggatctgaagtgcaactggtggaatctggaggctctctggtgcagccagggggaagcctgagactgtcttgtgccgcttccggcttcaccttcgacgactacgccatgagctgggtgcgccaggtgccaggcaaaggcctggaatgggtgtccagcatcaactggagcggcacccacaccgattacgccgactccgtgaaaggcagattcacaatcagcagaaacaacgccaacaataccctgtacctgcagatgaactccctgaagtctgaggatacagcagtgtattattgcgccaagaactggcgggacgccggcaccacttggtttgagaaaagcggctctgccggacagggaacccaagtgacagtgtcctccggtaccggcggaggcggatctggcggcggaggtagcggtggcggaggatctgaattcgacatccagatgacacagagccctagcagcctgtctgccagcgtgggagacagagtgaccatcacatgcaaggccagcgaccacatcaacaactggctggcctggtatcagcagaagcctggacaggcccctaagctgctgatctacggcgctaccacactggaaacaggcgtgcccagcagattttctggcagcggctctggcaccgactacaccctgacaatatccagcctccagcctgaggacttcgccacctactactgtcagcagagctggaacaccccttggacattcggccagggcaccaagctggaaatcaagagactcgagggacagcctaaggccaatcctaccgtgacactgttccctccaagcagcgaagaactccaggccaacaaggccacacttgtgtgcctgatctccgacttctaccctggggctgtgacagtggcttggaaggccgatggatctcctgtgaaagccggcgtggaaaccaccaagccatccaagcagagcaacaacaaatacgccgccagctcctacctgagcctgacacctgagcagtggaagtcccacagatcctacagctgccaagtgacccacgaaggcagcaccgtggaaaagacagtggcccctacagagtgcagcggcagagccgattgcggcatcaccagcgccagctaccaccagggcgtgctgagcgccaccatcctgtacgagatcctgctgggcaaggccaccctgtacgccgtgctggtgtctgccctggtgctgatggctatggtcaagcggaaggacagccggggaagggccaagcgatctggatctggagcaacaaacttctcactactcaaacaagcaggtgacgtggaggagaatcccgggcctactagtatggactggatttggcgcatccttttccttgtcggcgctgctaccggcgcccattccgggcccgtggacaacaagttcaacaaagagcggtacagcgcctactacgagatttggcaactgcccaacctgaacgtgcggcagaaggccgccttcatcggatctctgcaggacgaccctagccagagcgccaatctgctggccgaggccaagaagctgaacgacgcccaggcccctaaaggatccggcggcggaggatctggcggaggcggatctgggggcggaggctctttcgaacaagttcagcttcaacagcctggcgctgagctggtcaaacctggcgcttctgtgaagatgagctgcaaagccagcggctacgccttcagcagctactggatcaactggatgaagcagaaacccggccagggactcgaatggatcggccaaatctatcccggcgacggcgacaccaactacaacggcaagttcaagggcagagccacactgaccgccgatacctctagcagcacagcctacatgcagctgagcagcctgaccagcgaagatagcgccgtgtacttctgtgcccggtccatcacaacagtcgtgggctgcgctatggactattggggccagggaacaagcgtgaccgtgtctagtacgcgtgcctctacaaagggaccctccgtgtttcctctggctcccagcagcaagtctacaagcggaggaacagccgctctgggctgcctggtcaaggattactttcccgagcctgtgaccgtgtcctggaatagcggagcactgacaagcggcgtgcacacctttccagccgtgctgcaaagcagcggcctgtactctctgagcagcgtggtcacagtgcctagctctagcctgggcacccagacctacatctgcaatgtgaaccacaagcctagcaacaccaaggtggacaagagagtggaacccaagagctgtatccccgaggacacattcttcccaagcagcgacgtgccctgcgacgtgaagctggtggaaaagagcttcgagacagacaccaacctgaacttccagaacctgagcgtgatcggcttcagaatcctgctgctgaaagtggccggctttaacctgctgatgaccctgcggctgtggtccagc

SEQ ID NO: 5876 - DNA, 2934 bp, Artificial Sequence
  Synthetic Polynucloetide
atggccttaccagtgaccgccttgctcctgccgctggccttgctgctccacgccgccaggccggaggtgcaactggtggaaagcggcggaggctctgtgcagacaggcggctctctgagactgacctgtgccgccagcggcagaaccagcagatcctatggcatgggctggttcagacaggcccctggcaaagaacgcgagttcgtgtccggcatctcttggagaggcgacagcaccggctacgccgatagcgtgaagggccggttcaccatcagccgggacaacgccaagaacaccgtggacctgcagatgaacagcctgaagcccgaggacaccgccatctactactgtgccgctgccgccggatctgcttggtacggcacactgtacgagtacgactactggggccagggcacccttgtgaccgtgtcatctggcggaggaagcggcggaggatctgaagtgcaactggtggaatctggaggctctctggtgcagccagggggaagcctgagactgtcttgtgccgcttccggcttcaccttcgacgactacgccatgagctgggtgcgccaggtgccaggcaaaggcctggaatgggtgtccagcatcaactggagcggcacccacaccgattacgccgactccgtgaaaggcagattcacaatcagcagaaacaacgccaacaataccctgtacctgcagatgaactccctgaagtctgaggatacagcagtgtattattgcgccaagaactggcgggacgccggcaccacttggtttgagaaaagcggctctgccggacagggaacccaagtgacagtgtcctccggtaccggcggaggcggatctggcggcggaggtagcggtggcggaggatctgaattcgacatccagatgacacagagccctagcagcctgtctgccagcgtgggagacagagtgaccatcacatgcaaggccagcgaccacatcaacaactggctggcctggtatcagcagaagcctggacaggcccctaagctgctgatctacggcgctaccacactggaaacaggcgtgcccagcagattttctggcagcggctctggcaccgactacaccctgacaatatccagcctccagcctgaggacttcgccacctactactgtcagcagagctggaacaccccttggacattcggccagggcaccaagctggaaatcaagagactcgagggacagcctaaggccaatcctaccgtgacactgttccctccaagcagcgaagaactccaggccaacaaggccacacttgtgtgcctgatctccgacttctaccctggggctgtgacagtggcttggaaggccgatggatctcctgtgaaagccggcgtggaaaccaccaagccatccaagcagagcaacaacaaatacgccgccagctcctacctgagcctgacacctgagcagtggaagtcccacagatcctacagctgccaagtgacccacgaaggcagcaccgtggaaaagacagtggcccctacagagtgcagcggcagagccgattgcggctttaccagcgagagctaccagcagggcgtgctgagcgccaccatcctgtacgagatcctgctgggcaaggccaccctgtacgccgtgctggtgtctgccctggtgctgatggctatggtcaagcggaaggacagccggggaagggccaagcgatctggatctggagcaacaaacttctcactactcaaacaagcaggtgacgtggaggagaatcccgggcctactagtatggactggatttggcgcatccttttccttgtcggcgctgctaccggcgcccattccgggcccgtggacaacaagttcaacaaagagcggtacagcgcctactacgagatttggcaactgcccaacctgaacgtgcggcagaaggccgccttcatcggatctctgcaggacgaccctagccagagcgccaatctgctggccgaggccaagaagctgaacgacgcccaggcccctaaaggatccggcggcggaggatctggcggaggcggatctgggggcggaggctctttcgaacaagttcagcttcaacagcctggcgctgagctggtcaaacctggcgcttctgtgaagatgagctgcaaagccagcggctacgccttcagcagctactggatcaactggatgaagcagaaacccggccagggactcgaatggatcggccaaatctatcccggcgacggcgacaccaactacaacggcaagttcaagggcagagccacactgaccgccgatacctctagcagcacagcctacatgcagctgagcagcctgaccagcgaagatagcgccgtgtacttctgtgcccggtccatcacaacagtcgtgggctgcgctatggactattggggccagggaacaagcgtgaccgtgtctagtacgcgtgcctctacaaagggaccctccgtgtttcctctggctcccagcagcaagtctacaagcggaggaacagccgctctgggctgcctggtcaaggattactttcccgagcctgtgaccgtgtcctggaatagcggagcactgacaagcggcgtgcacacctttccagccgtgctgcaaagcagcggcctgtactctctgagcagcgtggtcacagtgcctagctctagcctgggcacccagacctacatctgcaatgtgaaccacaagcctagcaacaccaaggtggacaagagagtggaacccaagagctgtatccccgaggacacattcttcccaagccccgagagcagctgcgacgtgaagctggtggaaaagagcttcgagacagacaccaacctgaacttccagaacctgagcgtgatcggcttcagaatcctgctgctgaaagtggccggctttaacctgctgatgaccctgcggctgtggtccagc

SEQ ID NO: 5877 - DNA, 2835 bp, Artificial Sequence
  Synthetic Polynucloetide
atggccttaccagtgaccgccttgctcctgccgctggccttgctgctccacgccgccaggccggaggtgcaactggtggaaagcggcggaggctctgtgcagacaggcggctctctgagactgacctgtgccgccagcggcagaaccagcagatcctatggcatgggctggttcagacaggcccctggcaaagaacgcgagttcgtgtccggcatctcttggagaggcgacagcaccggctacgccgatagcgtgaagggccggttcaccatcagccgggacaacgccaagaacaccgtggacctgcagatgaacagcctgaagcccgaggacaccgccatctactactgtgccgctgccgccggatctgcttggtacggcacactgtacgagtacgactactggggccagggcacccttgtgaccgtgtcatctggcggaggaagcggcggaggatctgaagtgcaactggtggaatctggaggctctctggtgcagccagggggaagcctgagactgtcttgtgccgcttccggcttcaccttcgacgactacgccatgagctgggtgcgccaggtgccaggcaaaggcctggaatgggtgtccagcatcaactggagcggcacccacaccgattacgccgactccgtgaaaggcagattcacaatcagcagaaacaacgccaacaataccctgtacctgcagatgaactccctgaagtctgaggatacagcagtgtattattgcgccaagaactggcgggacgccggcaccacttggtttgagaaaagcggctctgccggacagggaacccaagtgacagtgtcctccctcgagggacagcctaaggccaatcctaccgtgacactgttccctccaagcagcgaagaactccaggccaacaaggccacacttgtgtgcctgatctccgacttctaccctggggctgtgacagtggcttggaaggccgatggatctcctgtgaaagccggcgtggaaaccaccaagccatccaagcagagcaacaacaaatacgccgccagctcctacctgagcctgacacctgagcagtggaagtcccacagatcctacagctgccaagtgacccacgaaggcagcaccgtggaaaagacagtggcccctacagagtgcagcggcagagccgattgcggctttaccagcgagagctaccagcagggcgtgctgagcgccaccatcctgtacgagatcctgctgggcaaggccaccctgtacgccgtgctggtgtctgccctggtgctgatggctatggtcaagcggaaggacagccggggaagggccaagcgatctggatctggagcaacaaacttctcactactcaaacaagcaggtgacgtggaggagaatcccgggcctactagtatggactggatttggcgcatccttttccttgtcggcgctgctaccggcgcgcattccgggcccgtggacaacaagttcaacaaagagcggtacagcgcctactacgagatttggcaactgcccaacctgaacgtgcggcagaaggccgccttcatcggatctctgcaggacgaccctagccagagcgccaatctgctggccgaggccaagaagctgaacgacgcccaggcccctaaaacgcgtgcctctacaaagggaccctccgtgtttcctctggctcccagcagcaagtctacaagcggaggaacagccgctctgggctgcctggtcaaggattactttcccgagcctgtgaccgtgtcctggaatagcggagcactgacaagcggcgtgcacacctttccagccgtgctgcaaagcagcggcctgtactctctgagcagcgtggtcacagtgcctagctctagcctgggcacccagacctacatctgcaatgtgaaccacaagcctagcaacaccaaggtggacaagagagtggaacccaagagctgtatccccgaggacacattcttcccaagccccgagagcagctgcgacgtgaagctggtggaaaagagcttcgagacagacaccaacctgaacttccagaacctgagcgtgatcggcttcagaatcctgctgctgaaagtggccggctttaacctgctgatgaccctgcggctgtggtccagccgcgccaagagaagcggatctggcgtgaagcagaccctgaatttcgacctgctgaagctggctggcgacgtggaatccaacccaggcccttctagaggccatatgaccgagtacaagcccacggtgcgcctcgccacccgcgacgacgtccccagggccgtacgcaccctcgccgccgcgttcgccgactaccccgccacgcgccacaccgtcgatccggaccgccacatcgagcgggtcaccgagctgcaagaactcttcctcacgcgcgtcgggctcgacatcggcaaggtgtgggtcgcggacgacggcgccgcggtggcggtctggaccacgccggagagcgtcgaagcgggggcggtgttcgccgagatcggcccgcgcatggccgagttgagcggttcccggctggccgcgcagcaacagatggaaggcctcctggcgccgcaccggcccaaggagcccgcgtggttcctggccaccgtcggcgtctcgcccgaccaccagggcaagggtctgggcagcgccgtcgtgctccccggagtggaggcggccgagcgcgccggggtgcccgccttcctggagacctccgcgccccgcaacctccccttctacgagcggctcggcttcaccgtcaccgccgacgtcgaggtgcccgaaggaccgcgcacctggtgcatgacccgcaagcccggtgcctga

SEQ ID NO: 5878 - DNA, 2133 bp, Artificial Sequence
  Synthetic Polynucloetide
atggccttaccagtgaccgccttgctcctgccgctggccttgctgctccacgccgccaggccggaggtgcaactggtggaaagcggcggaggctctgtgcagacaggcggctctctgagactgacctgtgccgccagcggcagaaccagcagatcctatggcatgggctggttcagacaggcccctggcaaagaacgcgagttcgtgtccggcatctcttggagaggcgacagcaccggctacgccgatagcgtgaagggccggttcaccatcagccgggacaacgccaagaacaccgtggacctgcagatgaacagcctgaagcccgaggacaccgccatctactactgtgccgctgccgccggatctgcttggtacggcacactgtacgagtacgactactggggccagggcacccttgtgaccgtgtcatctggcggaggaagcggcggaggatctgaagtgcaactggtggaatctggaggctctctggtgcagccagggggaagcctgagactgtcttgtgccgcttccggcttcaccttcgacgactacgccatgagctgggtgcgccaggtgccaggcaaaggcctggaatgggtgtccagcatcaactggagcggcacccacaccgattacgccgactccgtgaaaggcagattcacaatcagcagaaacaacgccaacaataccctgtacctgcagatgaactccctgaagtctgaggatacagcagtgtattattgcgccaagaactggcgggacgccggcaccacttggtttgagaaaagcggctctgccggacagggaacccaagtgacagtgtcctccctcgagggacagcctaaggccaatcctaccgtgacactgttccctccaagcagcgaagaactccaggccaacaaggccacacttgtgtgcctgatctccgacttctaccctggggctgtgacagtggcttggaaggccgatggatctcctgtgaaagccggcgtggaaaccaccaagccatccaagcagagcaacaacaaatacgccgccagctcctacctgagcctgacacctgagcagtggaagtcccacagatcctacagctgccaagtgacccacgaaggcagcaccgtggaaaagacagtggcccctacagagtgcagcggcagagccgattgcggctttaccagcgagagctaccagcagggcgtgctgagcgccaccatcctgtacgagatcctgctgggcaaggccaccctgtacgccgtgctggtgtctgccctggtgctgatggctatggtcaagcggaaggacagccggggaagggccaagcgatctggatctggagcaacaaacttctcactactcaaacaagcaggtgacgtggaggagaatcccgggcctactagtatggactggatttggcgcatccttttccttgtcggcgctgctaccggcgcgcattccgggcccgtggacaacaagttcaacaaagagcggtacagcgcctactacgagatttggcaactgcccaacctgaacgtgcggcagaaggccgccttcatcggatctctgcaggacgaccctagccagagcgccaatctgctggccgaggccaagaagctgaacgacgcccaggcccctaaaacgcgtgcctctacaaagggaccctccgtgtttcctctggctcccagcagcaagtctacaagcggaggaacagccgctctgggctgcctggtcaaggattactttcccgagcctgtgaccgtgtcctggaatagcggagcactgacaagcggcgtgcacacctttccagccgtgctgcaaagcagcggcctgtactctctgagcagcgtggtcacagtgcctagctctagcctgggcacccagacctacatctgcaatgtgaaccacaagcctagcaacaccaaggtggacaagagagtggaacccaagagctgtatccccgaggacacattcttcccaagccccgagagcagctgcgacgtgaagctggtggaaaagagcttcgagacagacaccaacctgaacttccagaacctgagcgtgatcggcttcagaatcctgctgctgaaagtggccggctttaacctgctgatgaccctgcggctgtggtccagc

SEQ ID NO: 5879 - DNA, 2220 bp, Artificial Sequence
  Synthetic Polynucloetide
atggccttaccagtgaccgccttgctcctgccgctggccttgctgctccacgccgccaggccggaggtgcaactggtggaaagcggcggaggctctgtgcagacaggcggctctctgagactgacctgtgccgccagcggcagaaccagcagatcctatggcatgggctggttcagacaggcccctggcaaagaacgcgagttcgtgtccggcatctcttggagaggcgacagcaccggctacgccgatagcgtgaagggccggttcaccatcagccgggacaacgccaagaacaccgtggacctgcagatgaacagcctgaagcccgaggacaccgccatctactactgtgccgctgccgccggatctgcttggtacggcacactgtacgagtacgactactggggccagggcacccttgtgaccgtgtcatctggcggaggaagcggcggaggatctgaagtgcaactggtggaatctggaggctctctggtgcagccagggggaagcctgagactgtcttgtgccgcttccggcttcaccttcgacgactacgccatgagctgggtgcgccaggtgccaggcaaaggcctggaatgggtgtccagcatcaactggagcggcacccacaccgattacgccgactccgtgaaaggcagattcacaatcagcagaaacaacgccaacaataccctgtacctgcagatgaactccctgaagtctgaggatacagcagtgtattattgcgccaagaactggcgggacgccggcaccacttggtttgagaaaagcggctctgccggacagggaacccaagtgacagtgtcctccctcgagggatctggcagagccgattgcggctttaccagcgagagctaccagcagggcgtgctgagcgccaccatcctgtacgagatcctgctgggcaaggccaccctgtacgccgtgctggtgtctgccctggtgctgatggctatggtcaagcggaaggacagccggggaagggccaagcgatctggatctggagcaacaaacttctcactactcaaacaagcaggtgacgtggaggagaatcccgggcctactagtatggactggatttggcgcatccttttccttgtcggcgctgctaccggcgcgcattccgggcccgtggacaacaagttcaacaaagagcggtacagcgcctactacgagatttggcaactgcccaacctgaacgtgcggcagaaggccgccttcatcggatctctgcaggacgaccctagccagagcgccaatctgctggccgaggccaagaagctgaacgacgcccaggcccctaaaacgcgtggcagcatccccgaggacacattcttcccaagccccgagagcagctgcgacgtgaagctggtggaaaagagcttcgagacagacaccaacctgaacttccagaacctgagcgtgatcggcttcagaatcctgctgctgaaagtggccggctttaacctgctgatgaccctgcggctgtggtccagccgcgccaagagaagcggatctggcgtgaagcagaccctgaatttcgacctgctgaagctggctggcgacgtggaatccaacccaggcccttctagaggccatatgaccgagtacaagcccacggtgcgcctcgccacccgcgacgacgtccccagggccgtacgcaccctcgccgccgcgttcgccgactaccccgccacgcgccacaccgtcgatccggaccgccacatcgagcgggtcaccgagctgcaagaactcttcctcacgcgcgtcgggctcgacatcggcaaggtgtgggtcgcggacgacggcgccgcggtggcggtctggaccacgccggagagcgtcgaagcgggggcggtgttcgccgagatcggcccgcgcatggccgagttgagcggttcccggctggccgcgcagcaacagatggaaggcctcctggcgccgcaccggcccaaggagcccgcgtggttcctggccaccgtcggcgtctcgcccgaccaccagggcaagggtctgggcagcgccgtcgtgctccccggagtggaggcggccgagcgcgccggggtgcccgccttcctggagacctccgcgccccgcaacctccccttctacgagcggctcggcttcaccgtcaccgccgacgtcgaggtgcccgaaggaccgcgcacctggtgcatgacccgcaagcccggtgcctga

SEQ ID NO: 5880 - DNA, 1518 bp, Artificial Sequence
  Synthetic Polynucloetide
atggccttaccagtgaccgccttgctcctgccgctggccttgctgctccacgccgccaggccggaggtgcaactggtggaaagcggcggaggctctgtgcagacaggcggctctctgagactgacctgtgccgccagcggcagaaccagcagatcctatggcatgggctggttcagacaggcccctggcaaagaacgcgagttcgtgtccggcatctcttggagaggcgacagcaccggctacgccgatagcgtgaagggccggttcaccatcagccgggacaacgccaagaacaccgtggacctgcagatgaacagcctgaagcccgaggacaccgccatctactactgtgccgctgccgccggatctgcttggtacggcacactgtacgagtacgactactggggccagggcacccttgtgaccgtgtcatctggcggaggaagcggcggaggatctgaagtgcaactggtggaatctggaggctctctggtgcagccagggggaagcctgagactgtcttgtgccgcttccggcttcaccttcgacgactacgccatgagctgggtgcgccaggtgccaggcaaaggcctggaatgggtgtccagcatcaactggagcggcacccacaccgattacgccgactccgtgaaaggcagattcacaatcagcagaaacaacgccaacaataccctgtacctgcagatgaactccctgaagtctgaggatacagcagtgtattattgcgccaagaactggcgggacgccggcaccacttggtttgagaaaagcggctctgccggacagggaacccaagtgacagtgtcctccctcgagggatctggcagagccgattgcggctttaccagcgagagctaccagcagggcgtgctgagcgccaccatcctgtacgagatcctgctgggcaaggccaccctgtacgccgtgctggtgtctgccctggtgctgatggctatggtcaagcggaaggacagccggggaagggccaagcgatctggatctggagcaacaaacttctcactactcaaacaagcaggtgacgtggaggagaatcccgggcctactagtatggactggatttggcgcatccttttccttgtcggcgctgctaccggcgcgcattccgggcccgtggacaacaagttcaacaaagagcggtacagcgcctactacgagatttggcaactgcccaacctgaacgtgcggcagaaggccgccttcatcggatctctgcaggacgaccctagccagagcgccaatctgctggccgaggccaagaagctgaacgacgcccaggcccctaaaacgcgtggcagcatccccgaggacacattcttcccaagccccgagagcagctgcgacgtgaagctggtggaaaagagcttcgagacagacaccaacctgaacttccagaacctgagcgtgatcggcttcagaatcctgctgctgaaagtggccggctttaacctgctgatgaccctgcggctgtggtccagc

SEQ ID NO: 5881 - DNA, 2247 bp, Artificial Sequence
  Synthetic Polynucloetide
atggccttaccagtgaccgccttgctcctgccgctggccttgctgctccacgccgccaggccggaggtgcaactggtggaaagcggcggaggctctgtgcagacaggcggctctctgagactgacctgtgccgccagcggcagaaccagcagatcctatggcatgggctggttcagacaggcccctggcaaagaacgcgagttcgtgtccggcatctcttggagaggcgacagcaccggctacgccgatagcgtgaagggccggttcaccatcagccgggacaacgccaagaacaccgtggacctgcagatgaacagcctgaagcccgaggacaccgccatctactactgtgccgctgccgccggatctgcttggtacggcacactgtacgagtacgactactggggccagggcacccttgtgaccgtgtcatctggcggaggaagcggcggaggatctgaagtgcaactggtggaatctggaggctctctggtgcagccagggggaagcctgagactgtcttgtgccgcttccggcttcaccttcgacgactacgccatgagctgggtgcgccaggtgccaggcaaaggcctggaatgggtgtccagcatcaactggagcggcacccacaccgattacgccgactccgtgaaaggcagattcacaatcagcagaaacaacgccaacaataccctgtacctgcagatgaactccctgaagtctgaggatacagcagtgtattattgcgccaagaactggcgggacgccggcaccacttggtttgagaaaagcggctctgccggacagggaacccaagtgacagtgtcctccctcgaggacaaaactcacacatgcccaccgtgcccagcaggcagagccgattgcggctttaccagcgagagctaccagcagggcgtgctgagcgccaccatcctgtacgagatcctgctgggcaaggccaccctgtacgccgtgctggtgtctgccctggtgctgatggctatggtcaagcggaaggacagccggggaagggccaagcgatctggatctggagcaacaaacttctcactactcaaacaagcaggtgacgtggaggagaatcccgggcctactagtatggactggatttggcgcatccttttccttgtcggcgctgctaccggcgcgcattccgggcccgtggacaacaagttcaacaaagagcggtacagcgcctactacgagatttggcaactgcccaacctgaacgtgcggcagaaggccgccttcatcggatctctgcaggacgaccctagccagagcgccaatctgctggccgaggccaagaagctgaacgacgcccaggcccctaaaacgcgtggcagcatccccgaggacacattcttcccaagccccgagagcagctgcgacgtgaagctggtggaaaagagcttcgagacagacaccaacctgaacttccagaacctgagcgtgatcggcttcagaatcctgctgctgaaagtggccggctttaacctgctgatgaccctgcggctgtggtccagccgcgccaagagaagcggatctggcgtgaagcagaccctgaatttcgacctgctgaagctggctggcgacgtggaatccaacccaggcccttctagaggccatatgaccgagtacaagcccacggtgcgcctcgccacccgcgacgacgtccccagggccgtacgcaccctcgccgccgcgttcgccgactaccccgccacgcgccacaccgtcgatccggaccgccacatcgagcgggtcaccgagctgcaagaactcttcctcacgcgcgtcgggctcgacatcggcaaggtgtgggtcgcggacgacggcgccgcggtggcggtctggaccacgccggagagcgtcgaagcgggggcggtgttcgccgagatcggcccgcgcatggccgagttgagcggttcccggctggccgcgcagcaacagatggaaggcctcctggcgccgcaccggcccaaggagcccgcgtggttcctggccaccgtcggcgtctcgcccgaccaccagggcaagggtctgggcagcgccgtcgtgctccccggagtggaggcggccgagcgcgccggggtgcccgccttcctggagacctccgcgccccgcaacctccccttctacgagcggctcggcttcaccgtcaccgccgacgtcgaggtgcccgaaggaccgcgcacctggtgcatgacccgcaagcccggtgcctga

SEQ ID NO: 5882 - DNA, 2247 bp, Artificial Sequence
  Synthetic Polynucloetide
atggccttaccagtgaccgccttgctcctgccgctggccttgctgctccacgccgccaggccggaggtgcaactggtggaaagcggcggaggctctgtgcagacaggcggctctctgagactgacctgtgccgccagcggcagaaccagcagatcctatggcatgggctggttcagacaggcccctggcaaagaacgcgagttcgtgtccggcatctcttggagaggcgacagcaccggctacgccgatagcgtgaagggccggttcaccatcagccgggacaacgccaagaacaccgtggacctgcagatgaacagcctgaagcccgaggacaccgccatctactactgtgccgctgccgccggatctgcttggtacggcacactgtacgagtacgactactggggccagggcacccttgtgaccgtgtcatctggcggaggaagcggcggaggatctgaagtgcaactggtggaatctggaggctctctggtgcagccagggggaagcctgagactgtcttgtgccgcttccggcttcaccttcgacgactacgccatgagctgggtgcgccaggtgccaggcaaaggcctggaatgggtgtccagcatcaactggagcggcacccacaccgattacgccgactccgtgaaaggcagattcacaatcagcagaaacaacgccaacaataccctgtacctgcagatgaactccctgaagtctgaggatacagcagtgtattattgcgccaagaactggcgggacgccggcaccacttggtttgagaaaagcggctctgccggacagggaacccaagtgacagtgtcctccctcgagggatctggcagagccgattgcggctttaccagcgagagctaccagcagggcgtgctgagcgccaccatcctgtacgagatcctgctgggcaaggccaccctgtacgccgtgctggtgtctgccctggtgctgatggctatggtcaagcggaaggacagccggggaagggccaagcgatctggatctggagcaacaaacttctcactactcaaacaagcaggtgacgtggaggagaatcccgggcctactagtatggactggatttggcgcatccttttccttgtcggcgctgctaccggcgcgcattccgggcccgtggacaacaagttcaacaaagagcggtacagcgcctactacgagatttggcaactgcccaacctgaacgtgcggcagaaggccgccttcatcggatctctgcaggacgaccctagccagagcgccaatctgctggccgaggccaagaagctgaacgacgcccaggcccctaaaacgcgtgataaaactcatacctgtccgccatgcccggcaatccccgaggacacattcttcccaagccccgagagcagctgcgacgtgaagctggtggaaaagagcttcgagacagacaccaacctgaacttccagaacctgagcgtgatcggcttcagaatcctgctgctgaaagtggccggctttaacctgctgatgaccctgcggctgtggtccagccgcgccaagagaagcggatctggcgtgaagcagaccctgaatttcgacctgctgaagctggctggcgacgtggaatccaacccaggcccttctagaggccatatgaccgagtacaagcccacggtgcgcctcgccacccgcgacgacgtccccagggccgtacgcaccctcgccgccgcgttcgccgactaccccgccacgcgccacaccgtcgatccggaccgccacatcgagcgggtcaccgagctgcaagaactcttcctcacgcgcgtcgggctcgacatcggcaaggtgtgggtcgcggacgacggcgccgcggtggcggtctggaccacgccggagagcgtcgaagcgggggcggtgttcgccgagatcggcccgcgcatggccgagttgagcggttcccggctggccgcgcagcaacagatggaaggcctcctggcgccgcaccggcccaaggagcccgcgtggttcctggccaccgtcggcgtctcgcccgaccaccagggcaagggtctgggcagcgccgtcgtgctccccggagtggaggcggccgagcgcgccggggtgcccgccttcctggagacctccgcgccccgcaacctccccttctacgagcggctcggcttcaccgtcaccgccgacgtcgaggtgcccgaaggaccgcgcacctggtgcatgacccgcaagcccggtgcctga

SEQ ID NO: 5883 - DNA, 2274 bp, Artificial Sequence
  Synthetic Polynucloetide
atggccttaccagtgaccgccttgctcctgccgctggccttgctgctccacgccgccaggccggaggtgcaactggtggaaagcggcggaggctctgtgcagacaggcggctctctgagactgacctgtgccgccagcggcagaaccagcagatcctatggcatgggctggttcagacaggcccctggcaaagaacgcgagttcgtgtccggcatctcttggagaggcgacagcaccggctacgccgatagcgtgaagggccggttcaccatcagccgggacaacgccaagaacaccgtggacctgcagatgaacagcctgaagcccgaggacaccgccatctactactgtgccgctgccgccggatctgcttggtacggcacactgtacgagtacgactactggggccagggcacccttgtgaccgtgtcatctggcggaggaagcggcggaggatctgaagtgcaactggtggaatctggaggctctctggtgcagccagggggaagcctgagactgtcttgtgccgcttccggcttcaccttcgacgactacgccatgagctgggtgcgccaggtgccaggcaaaggcctggaatgggtgtccagcatcaactggagcggcacccacaccgattacgccgactccgtgaaaggcagattcacaatcagcagaaacaacgccaacaataccctgtacctgcagatgaactccctgaagtctgaggatacagcagtgtattattgcgccaagaactggcgggacgccggcaccacttggtttgagaaaagcggctctgccggacagggaacccaagtgacagtgtcctccctcgaggacaaaactcacacatgcccaccgtgcccagcaggcagagccgattgcggctttaccagcgagagctaccagcagggcgtgctgagcgccaccatcctgtacgagatcctgctgggcaaggccaccctgtacgccgtgctggtgtctgccctggtgctgatggctatggtcaagcggaaggacagccggggaagggccaagcgatctggatctggagcaacaaacttctcactactcaaacaagcaggtgacgtggaggagaatcccgggcctactagtatggactggatttggcgcatccttttccttgtcggcgctgctaccggcgcgcattccgggcccgtggacaacaagttcaacaaagagcggtacagcgcctactacgagatttggcaactgcccaacctgaacgtgcggcagaaggccgccttcatcggatctctgcaggacgaccctagccagagcgccaatctgctggccgaggccaagaagctgaacgacgcccaggcccctaaaacgcgtgataaaactcatacctgtccgccatgcccggcaatccccgaggacacattcttcccaagccccgagagcagctgcgacgtgaagctggtggaaaagagcttcgagacagacaccaacctgaacttccagaacctgagcgtgatcggcttcagaatcctgctgctgaaagtggccggctttaacctgctgatgaccctgcggctgtggtccagccgcgccaagagaagcggatctggcgtgaagcagaccctgaatttcgacctgctgaagctggctggcgacgtggaatccaacccaggcccttctagaggccatatgaccgagtacaagcccacggtgcgcctcgccacccgcgacgacgtccccagggccgtacgcaccctcgccgccgcgttcgccgactaccccgccacgcgccacaccgtcgatccggaccgccacatcgagcgggtcaccgagctgcaagaactcttcctcacgcgcgtcgggctcgacatcggcaaggtgtgggtcgcggacgacggcgccgcggtggcggtctggaccacgccggagagcgtcgaagcgggggcggtgttcgccgagatcggcccgcgcatggccgagttgagcggttcccggctggccgcgcagcaacagatggaaggcctcctggcgccgcaccggcccaaggagcccgcgtggttcctggccaccgtcggcgtctcgcccgaccaccagggcaagggtctgggcagcgccgtcgtgctccccggagtggaggcggccgagcgcgccggggtgcccgccttcctggagacctccgcgccccgcaacctccccttctacgagcggctcggcttcaccgtcaccgccgacgtcgaggtgcccgaaggaccgcgcacctggtgcatgacccgcaagcccggtgcctga

SEQ ID NO: 5884 - DNA, 1572 bp, Artificial Sequence
  Synthetic Polynucloetide
atggccttaccagtgaccgccttgctcctgccgctggccttgctgctccacgccgccaggccggaggtgcaactggtggaaagcggcggaggctctgtgcagacaggcggctctctgagactgacctgtgccgccagcggcagaaccagcagatcctatggcatgggctggttcagacaggcccctggcaaagaacgcgagttcgtgtccggcatctcttggagaggcgacagcaccggctacgccgatagcgtgaagggccggttcaccatcagccgggacaacgccaagaacaccgtggacctgcagatgaacagcctgaagcccgaggacaccgccatctactactgtgccgctgccgccggatctgcttggtacggcacactgtacgagtacgactactggggccagggcacccttgtgaccgtgtcatctggcggaggaagcggcggaggatctgaagtgcaactggtggaatctggaggctctctggtgcagccagggggaagcctgagactgtcttgtgccgcttccggcttcaccttcgacgactacgccatgagctgggtgcgccaggtgccaggcaaaggcctggaatgggtgtccagcatcaactggagcggcacccacaccgattacgccgactccgtgaaaggcagattcacaatcagcagaaacaacgccaacaataccctgtacctgcagatgaactccctgaagtctgaggatacagcagtgtattattgcgccaagaactggcgggacgccggcaccacttggtttgagaaaagcggctctgccggacagggaacccaagtgacagtgtcctccctcgaggacaaaactcacacatgcccaccgtgcccagcaggcagagccgattgcggctttaccagcgagagctaccagcagggcgtgctgagcgccaccatcctgtacgagatcctgctgggcaaggccaccctgtacgccgtgctggtgtctgccctggtgctgatggctatggtcaagcggaaggacagccggggaagggccaagcgatctggatctggagcaacaaacttctcactactcaaacaagcaggtgacgtggaggagaatcccgggcctactagtatggactggatttggcgcatccttttccttgtcggcgctgctaccggcgcgcattccgggcccgtggacaacaagttcaacaaagagcggtacagcgcctactacgagatttggcaactgcccaacctgaacgtgcggcagaaggccgccttcatcggatctctgcaggacgaccctagccagagcgccaatctgctggccgaggccaagaagctgaacgacgcccaggcccctaaaacgcgtgataaaactcatacctgtccgccatgcccggcaatccccgaggacacattcttcccaagccccgagagcagctgcgacgtgaagctggtggaaaagagcttcgagacagacaccaacctgaacttccagaacctgagcgtgatcggcttcagaatcctgctgctgaaagtggccggctttaacctgctgatgaccctgcggctgtggtccagc

SEQ ID NO: 5885 - DNA, 1545 bp, Artificial Sequence
  Synthetic Polynucloetide
atggccttaccagtgaccgccttgctcctgccgctggccttgctgctccacgccgccaggccggaggtgcaactggtggaaagcggcggaggctctgtgcagacaggcggctctctgagactgacctgtgccgccagcggcagaaccagcagatcctatggcatgggctggttcagacaggcccctggcaaagaacgcgagttcgtgtccggcatctcttggagaggcgacagcaccggctacgccgatagcgtgaagggccggttcaccatcagccgggacaacgccaagaacaccgtggacctgcagatgaacagcctgaagcccgaggacaccgccatctactactgtgccgctgccgccggatctgcttggtacggcacactgtacgagtacgactactggggccagggcacccttgtgaccgtgtcatctggcggaggaagcggcggaggatctgaagtgcaactggtggaatctggaggctctctggtgcagccagggggaagcctgagactgtcttgtgccgcttccggcttcaccttcgacgactacgccatgagctgggtgcgccaggtgccaggcaaaggcctggaatgggtgtccagcatcaactggagcggcacccacaccgattacgccgactccgtgaaaggcagattcacaatcagcagaaacaacgccaacaataccctgtacctgcagatgaactccctgaagtctgaggatacagcagtgtattattgcgccaagaactggcgggacgccggcaccacttggtttgagaaaagcggctctgccggacagggaacccaagtgacagtgtcctccctcgagggatctggcagagccgattgcggctttaccagcgagagctaccagcagggcgtgctgagcgccaccatcctgtacgagatcctgctgggcaaggccaccctgtacgccgtgctggtgtctgccctggtgctgatggctatggtcaagcggaaggacagccggggaagggccaagcgatctggatctggagcaacaaacttctcactactcaaacaagcaggtgacgtggaggagaatcccgggcctactagtatggactggatttggcgcatccttttccttgtcggcgctgctaccggcgcgcattccgggcccgtggacaacaagttcaacaaagagcggtacagcgcctactacgagatttggcaactgcccaacctgaacgtgcggcagaaggccgccttcatcggatctctgcaggacgaccctagccagagcgccaatctgctggccgaggccaagaagctgaacgacgcccaggcccctaaaacgcgtgataaaactcatacctgtccgccatgcccggcaatccccgaggacacattcttcccaagccccgagagcagctgcgacgtgaagctggtggaaaagagcttcgagacagacaccaacctgaacttccagaacctgagcgtgatcggcttcagaatcctgctgctgaaagtggccggctttaacctgctgatgaccctgcggctgtggtccagc

SEQ ID NO: 5886 - DNA, 2901 bp, Artificial Sequence
  Synthetic Polynucloetide
atggccttaccagtgaccgccttgctcctgccgctggccttgctgctccacgccgccaggccggaggtgcaactggtggaaagcggcggaggctctgtgcagacaggcggctctctgagactgacctgtgccgccagcggcagaaccagcagatcctatggcatgggctggttcagacaggcccctggcaaagaacgcgagttcgtgtccggcatctcttggagaggcgacagcaccggctacgccgatagcgtgaagggccggttcaccatcagccgggacaacgccaagaacaccgtggacctgcagatgaacagcctgaagcccgaggacaccgccatctactactgtgccgctgccgccggatctgcttggtacggcacactgtacgagtacgactactggggccagggcacccttgtgaccgtgtcatctggcggaggaagcggcggaggatctgaagtgcaactggtggaatctggaggctctctggtgcagccagggggaagcctgagactgtcttgtgccgcttccggcttcaccttcgacgactacgccatgagctgggtgcgccaggtgccaggcaaaggcctggaatgggtgtccagcatcaactggagcggcacccacaccgattacgccgactccgtgaaaggcagattcacaatcagcagaaacaacgccaacaataccctgtacctgcagatgaactccctgaagtctgaggatacagcagtgtattattgcgccaagaactggcgggacgccggcaccacttggtttgagaaaagcggctctgccggacagggaacccaagtgacagtgtcctccctcgagggacagcctaaggccaatcctaccgtgacactgttccctccaagcagcgaagaactccaggccaacaaggccacacttgtgtgcctgatctccgacttctaccctggggctgtgacagtggcttggaaggccgatggatctcctgtgaaagccggcgtggaaaccaccaagccatccaagcagagcaacaacaaatacgccgccagctcctacctgagcctgacacctgagcagtggaagtcccacagatcctacagctgccaagtgacccacgaaggcagcaccgtggaaaagacagtggcccctacagagtgcagccccatcaagaccgatgtgattacaatggaccccaaggacaactgctccaaggacgccaacgataccctgctgctccagctgaccaacaccagcgcctactacatgtacttgttgctgctgctgaagtccgtggtgtacttcgccatcatcacatgctgcctgctgcggagaaccgccttctgctgcaacggcgagaagtctagggccaagcgatctggatctggagcaacaaacttctcactactcaaacaagcaggtgacgtggaggagaatcccgggcctactagtatggactggatttggcgcatccttttccttgtcggcgctgctaccggcgcgcattccgggcccgtggacaacaagttcaacaaagagcggtacagcgcctactacgagatttggcaactgcccaacctgaacgtgcggcagaaggccgccttcatcggatctctgcaggacgaccctagccagagcgccaatctgctggccgaggccaagaagctgaacgacgcccaggcccctaaaacgcgtgcctctacaaagggaccctccgtgtttcctctggctcccagcagcaagtctacaagcggaggaacagccgctctgggctgcctggtcaaggattactttcccgagcctgtgaccgtgtcctggaatagcggagcactgacaagcggcgtgcacacctttccagccgtgctgcaaagcagcggcctgtactctctgagcagcgtggtcacagtgcctagctctagcctgggcacccagacctacatctgcaatgtgaaccacaagcctagcaacaccaaggtggacaagagagtggaacccaagagctgtgaagtgaaaaccgactccaccgaccacgtgaagcccaaagagacagagaacaccaagcagcccagcaagagctgccacaagcccaaggccatcgtgcacaccgagaaagtgaacatgatgagcctgaccgtgctgggcctgcggatgctgttcgccaaaaccgtggccgtgaacttcctgctgaccgccaagctgttcttcctccgcgccaagagaagcggatctggcgtgaagcagaccctgaatttcgacctgctgaagctggctggcgacgtggaatccaacccaggcccttctagaggccatatgaccgagtacaagcccacggtgcgcctcgccacccgcgacgacgtccccagggccgtacgcaccctcgccgccgcgttcgccgactaccccgccacgcgccacaccgtcgatccggaccgccacatcgagcgggtcaccgagctgcaagaactcttcctcacgcgcgtcgggctcgacatcggcaaggtgtgggtcgcggacgacggcgccgcggtggcggtctggaccacgccggagagcgtcgaagcgggggcggtgttcgccgagatcggcccgcgcatggccgagttgagcggttcccggctggccgcgcagcaacagatggaaggcctcctggcgccgcaccggcccaaggagcccgcgtggttcctggccaccgtcggcgtctcgcccgaccaccagggcaagggtctgggcagcgccgtcgtgctccccggagtggaggcggccgagcgcgccggggtgcccgccttcctggagacctccgcgccccgcaacctccccttctacgagcggctcggcttcaccgtcaccgccgacgtcgaggtgcccgaaggaccgcgcacctggtgcatgacccgcaagcccggtgcctga

SEQ ID NO: 5887 - DNA, 2199 bp, Artificial Sequence
  Synthetic Polynucloetide
atggccttaccagtgaccgccttgctcctgccgctggccttgctgctccacgccgccaggccggaggtgcaactggtggaaagcggcggaggctctgtgcagacaggcggctctctgagactgacctgtgccgccagcggcagaaccagcagatcctatggcatgggctggttcagacaggcccctggcaaagaacgcgagttcgtgtccggcatctcttggagaggcgacagcaccggctacgccgatagcgtgaagggccggttcaccatcagccgggacaacgccaagaacaccgtggacctgcagatgaacagcctgaagcccgaggacaccgccatctactactgtgccgctgccgccggatctgcttggtacggcacactgtacgagtacgactactggggccagggcacccttgtgaccgtgtcatctggcggaggaagcggcggaggatctgaagtgcaactggtggaatctggaggctctctggtgcagccagggggaagcctgagactgtcttgtgccgcttccggcttcaccttcgacgactacgccatgagctgggtgcgccaggtgccaggcaaaggcctggaatgggtgtccagcatcaactggagcggcacccacaccgattacgccgactccgtgaaaggcagattcacaatcagcagaaacaacgccaacaataccctgtacctgcagatgaactccctgaagtctgaggatacagcagtgtattattgcgccaagaactggcgggacgccggcaccacttggtttgagaaaagcggctctgccggacagggaacccaagtgacagtgtcctccctcgagggacagcctaaggccaatcctaccgtgacactgttccctccaagcagcgaagaactccaggccaacaaggccacacttgtgtgcctgatctccgacttctaccctggggctgtgacagtggcttggaaggccgatggatctcctgtgaaagccggcgtggaaaccaccaagccatccaagcagagcaacaacaaatacgccgccagctcctacctgagcctgacacctgagcagtggaagtcccacagatcctacagctgccaagtgacccacgaaggcagcaccgtggaaaagacagtggcccctacagagtgcagccccatcaagaccgatgtgattacaatggaccccaaggacaactgctccaaggacgccaacgataccctgctgctccagctgaccaacaccagcgcctactacatgtacttgttgctgctgctgaagtccgtggtgtacttcgccatcatcacatgctgcctgctgcggagaaccgccttctgctgcaacggcgagaagtctagggccaagcgatctggatctggagcaacaaacttctcactactcaaacaagcaggtgacgtggaggagaatcccgggcctactagtatggactggatttggcgcatccttttccttgtcggcgctgctaccggcgcgcattccgggcccgtggacaacaagttcaacaaagagcggtacagcgcctactacgagatttggcaactgcccaacctgaacgtgcggcagaaggccgccttcatcggatctctgcaggacgaccctagccagagcgccaatctgctggccgaggccaagaagctgaacgacgcccaggcccctaaaacgcgtgcctctacaaagggaccctccgtgtttcctctggctcccagcagcaagtctacaagcggaggaacagccgctctgggctgcctggtcaaggattactttcccgagcctgtgaccgtgtcctggaatagcggagcactgacaagcggcgtgcacacctttccagccgtgctgcaaagcagcggcctgtactctctgagcagcgtggtcacagtgcctagctctagcctgggcacccagacctacatctgcaatgtgaaccacaagcctagcaacaccaaggtggacaagagagtggaacccaagagctgtgaagtgaaaaccgactccaccgaccacgtgaagcccaaagagacagagaacaccaagcagcccagcaagagctgccacaagcccaaggccatcgtgcacaccgagaaagtgaacatgatgagcctgaccgtgctgggcctgcggatgctgttcgccaaaaccgtggccgtgaacttcctgctgaccgccaagctgttcttcctc

SEQ ID NO: 5888 - DNA, 2286 bp, Artificial Sequence
  Synthetic Polynucloetide
atggccttaccagtgaccgccttgctcctgccgctggccttgctgctccacgccgccaggccggaggtgcaactggtggaaagcggcggaggctctgtgcagacaggcggctctctgagactgacctgtgccgccagcggcagaaccagcagatcctatggcatgggctggttcagacaggcccctggcaaagaacgcgagttcgtgtccggcatctcttggagaggcgacagcaccggctacgccgatagcgtgaagggccggttcaccatcagccgggacaacgccaagaacaccgtggacctgcagatgaacagcctgaagcccgaggacaccgccatctactactgtgccgctgccgccggatctgcttggtacggcacactgtacgagtacgactactggggccagggcacccttgtgaccgtgtcatctggcggaggaagcggcggaggatctgaagtgcaactggtggaatctggaggctctctggtgcagccagggggaagcctgagactgtcttgtgccgcttccggcttcaccttcgacgactacgccatgagctgggtgcgccaggtgccaggcaaaggcctggaatgggtgtccagcatcaactggagcggcacccacaccgattacgccgactccgtgaaaggcagattcacaatcagcagaaacaacgccaacaataccctgtacctgcagatgaactccctgaagtctgaggatacagcagtgtattattgcgccaagaactggcgggacgccggcaccacttggtttgagaaaagcggctctgccggacagggaacccaagtgacagtgtcctccctcgagggatctcccatcaagaccgatgtgattacaatggaccccaaggacaactgctccaaggacgccaacgataccctgctgctccagctgaccaacaccagcgcctactacatgtacttgttgctgctgctgaagtccgtggtgtacttcgccatcatcacatgctgcctgctgcggagaaccgccttctgctgcaacggcgagaagtctagggccaagcgatctggatctggagcaacaaacttctcactactcaaacaagcaggtgacgtggaggagaatcccgggcctactagtatggactggatttggcgcatccttttccttgtcggcgctgctaccggcgcgcattccgggcccgtggacaacaagttcaacaaagagcggtacagcgcctactacgagatttggcaactgcccaacctgaacgtgcggcagaaggccgccttcatcggatctctgcaggacgaccctagccagagcgccaatctgctggccgaggccaagaagctgaacgacgcccaggcccctaaaacgcgtggcagcgaagtgaaaaccgactccaccgaccacgtgaagcccaaagagacagagaacaccaagcagcccagcaagagctgccacaagcccaaggccatcgtgcacaccgagaaagtgaacatgatgagcctgaccgtgctgggcctgcggatgctgttcgccaaaaccgtggccgtgaacttcctgctgaccgccaagctgttcttcctccgcgccaagagaagcggatctggcgtgaagcagaccctgaatttcgacctgctgaagctggctggcgacgtggaatccaacccaggcccttctagaggccatatgaccgagtacaagcccacggtgcgcctcgccacccgcgacgacgtccccagggccgtacgcaccctcgccgccgcgttcgccgactaccccgccacgcgccacaccgtcgatccggaccgccacatcgagcgggtcaccgagctgcaagaactcttcctcacgcgcgtcgggctcgacatcggcaaggtgtgggtcgcggacgacggcgccgcggtggcggtctggaccacgccggagagcgtcgaagcgggggcggtgttcgccgagatcggcccgcgcatggccgagttgagcggttcccggctggccgcgcagcaacagatggaaggcctcctggcgccgcaccggcccaaggagcccgcgtggttcctggccaccgtcggcgtctcgcccgaccaccagggcaagggtctgggcagcgccgtcgtgctccccggagtggaggcggccgagcgcgccggggtgcccgccttcctggagacctccgcgccccgcaacctccccttctacgagcggctcggcttcaccgtcaccgccgacgtcgaggtgcccgaaggaccgcgcacctggtgcatgacccgcaagcccggtgcctga

SEQ ID NO: 5889 - DNA, 1584 bp, Artificial Sequence
  Synthetic Polynucloetide
atggccttaccagtgaccgccttgctcctgccgctggccttgctgctccacgccgccaggccggaggtgcaactggtggaaagcggcggaggctctgtgcagacaggcggctctctgagactgacctgtgccgccagcggcagaaccagcagatcctatggcatgggctggttcagacaggcccctggcaaagaacgcgagttcgtgtccggcatctcttggagaggcgacagcaccggctacgccgatagcgtgaagggccggttcaccatcagccgggacaacgccaagaacaccgtggacctgcagatgaacagcctgaagcccgaggacaccgccatctactactgtgccgctgccgccggatctgcttggtacggcacactgtacgagtacgactactggggccagggcacccttgtgaccgtgtcatctggcggaggaagcggcggaggatctgaagtgcaactggtggaatctggaggctctctggtgcagccagggggaagcctgagactgtcttgtgccgcttccggcttcaccttcgacgactacgccatgagctgggtgcgccaggtgccaggcaaaggcctggaatgggtgtccagcatcaactggagcggcacccacaccgattacgccgactccgtgaaaggcagattcacaatcagcagaaacaacgccaacaataccctgtacctgcagatgaactccctgaagtctgaggatacagcagtgtattattgcgccaagaactggcgggacgccggcaccacttggtttgagaaaagcggctctgccggacagggaacccaagtgacagtgtcctccctcgagggatctcccatcaagaccgatgtgattacaatggaccccaaggacaactgctccaaggacgccaacgataccctgctgctccagctgaccaacaccagcgcctactacatgtacttgttgctgctgctgaagtccgtggtgtacttcgccatcatcacatgctgcctgctgcggagaaccgccttctgctgcaacggcgagaagtctagggccaagcgatctggatctggagcaacaaacttctcactactcaaacaagcaggtgacgtggaggagaatcccgggcctactagtatggactggatttggcgcatccttttccttgtcggcgctgctaccggcgcgcattccgggcccgtggacaacaagttcaacaaagagcggtacagcgcctactacgagatttggcaactgcccaacctgaacgtgcggcagaaggccgccttcatcggatctctgcaggacgaccctagccagagcgccaatctgctggccgaggccaagaagctgaacgacgcccaggcccctaaaacgcgtggcagcgaagtgaaaaccgactccaccgaccacgtgaagcccaaagagacagagaacaccaagcagcccagcaagagctgccacaagcccaaggccatcgtgcacaccgagaaagtgaacatgatgagcctgaccgtgctgggcctgcggatgctgttcgccaaaaccgtggccgtgaacttcctgctgaccgccaagctgttcttcctc

SEQ ID NO: 5890 - DNA, 2313 bp, Artificial Sequence
  Synthetic Polynucloetide
atggccttaccagtgaccgccttgctcctgccgctggccttgctgctccacgccgccaggccggaggtgcaactggtggaaagcggcggaggctctgtgcagacaggcggctctctgagactgacctgtgccgccagcggcagaaccagcagatcctatggcatgggctggttcagacaggcccctggcaaagaacgcgagttcgtgtccggcatctcttggagaggcgacagcaccggctacgccgatagcgtgaagggccggttcaccatcagccgggacaacgccaagaacaccgtggacctgcagatgaacagcctgaagcccgaggacaccgccatctactactgtgccgctgccgccggatctgcttggtacggcacactgtacgagtacgactactggggccagggcacccttgtgaccgtgtcatctggcggaggaagcggcggaggatctgaagtgcaactggtggaatctggaggctctctggtgcagccagggggaagcctgagactgtcttgtgccgcttccggcttcaccttcgacgactacgccatgagctgggtgcgccaggtgccaggcaaaggcctggaatgggtgtccagcatcaactggagcggcacccacaccgattacgccgactccgtgaaaggcagattcacaatcagcagaaacaacgccaacaataccctgtacctgcagatgaactccctgaagtctgaggatacagcagtgtattattgcgccaagaactggcgggacgccggcaccacttggtttgagaaaagcggctctgccggacagggaacccaagtgacagtgtcctccctcgaggacaaaactcacacatgcccaccgtgcccagcacccatcaagaccgatgtgattacaatggaccccaaggacaactgctccaaggacgccaacgataccctgctgctccagctgaccaacaccagcgcctactacatgtacttgttgctgctgctgaagtccgtggtgtacttcgccatcatcacatgctgcctgctgcggagaaccgccttctgctgcaacggcgagaagtctagggccaagcgatctggatctggagcaacaaacttctcactactcaaacaagcaggtgacgtggaggagaatcccgggcctactagtatggactggatttggcgcatccttttccttgtcggcgctgctaccggcgcgcattccgggcccgtggacaacaagttcaacaaagagcggtacagcgcctactacgagatttggcaactgcccaacctgaacgtgcggcagaaggccgccttcatcggatctctgcaggacgaccctagccagagcgccaatctgctggccgaggccaagaagctgaacgacgcccaggcccctaaaacgcgtggcagcgaagtgaaaaccgactccaccgaccacgtgaagcccaaagagacagagaacaccaagcagcccagcaagagctgccacaagcccaaggccatcgtgcacaccgagaaagtgaacatgatgagcctgaccgtgctgggcctgcggatgctgttcgccaaaaccgtggccgtgaacttcctgctgaccgccaagctgttcttcctccgcgccaagagaagcggatctggcgtgaagcagaccctgaatttcgacctgctgaagctggctggcgacgtggaatccaacccaggcccttctagaggccatatgaccgagtacaagcccacggtgcgcctcgccacccgcgacgacgtccccagggccgtacgcaccctcgccgccgcgttcgccgactaccccgccacgcgccacaccgtcgatccggaccgccacatcgagcgggtcaccgagctgcaagaactcttcctcacgcgcgtcgggctcgacatcggcaaggtgtgggtcgcggacgacggcgccgcggtggcggtctggaccacgccggagagcgtcgaagcgggggcggtgttcgccgagatcggcccgcgcatggccgagttgagcggttcccggctggccgcgcagcaacagatggaaggcctcctggcgccgcaccggcccaaggagcccgcgtggttcctggccaccgtcggcgtctcgcccgaccaccagggcaagggtctgggcagcgccgtcgtgctccccggagtggaggcggccgagcgcgccggggtgcccgccttcctggagacctccgcgccccgcaacctccccttctacgagcggctcggcttcaccgtcaccgccgacgtcgaggtgcccgaaggaccgcgcacctggtgcatgacccgcaagcccggtgcctga

SEQ ID NO: 5891 - DNA, 2313 bp, Artificial Sequence
  Synthetic Polynucloetide
atggccttaccagtgaccgccttgctcctgccgctggccttgctgctccacgccgccaggccggaggtgcaactggtggaaagcggcggaggctctgtgcagacaggcggctctctgagactgacctgtgccgccagcggcagaaccagcagatcctatggcatgggctggttcagacaggcccctggcaaagaacgcgagttcgtgtccggcatctcttggagaggcgacagcaccggctacgccgatagcgtgaagggccggttcaccatcagccgggacaacgccaagaacaccgtggacctgcagatgaacagcctgaagcccgaggacaccgccatctactactgtgccgctgccgccggatctgcttggtacggcacactgtacgagtacgactactggggccagggcacccttgtgaccgtgtcatctggcggaggaagcggcggaggatctgaagtgcaactggtggaatctggaggctctctggtgcagccagggggaagcctgagactgtcttgtgccgcttccggcttcaccttcgacgactacgccatgagctgggtgcgccaggtgccaggcaaaggcctggaatgggtgtccagcatcaactggagcggcacccacaccgattacgccgactccgtgaaaggcagattcacaatcagcagaaacaacgccaacaataccctgtacctgcagatgaactccctgaagtctgaggatacagcagtgtattattgcgccaagaactggcgggacgccggcaccacttggtttgagaaaagcggctctgccggacagggaacccaagtgacagtgtcctccctcgagggatctcccatcaagaccgatgtgattacaatggaccccaaggacaactgctccaaggacgccaacgataccctgctgctccagctgaccaacaccagcgcctactacatgtacttgttgctgctgctgaagtccgtggtgtacttcgccatcatcacatgctgcctgctgcggagaaccgccttctgctgcaacggcgagaagtctagggccaagcgatctggatctggagcaacaaacttctcactactcaaacaagcaggtgacgtggaggagaatcccgggcctactagtatggactggatttggcgcatccttttccttgtcggcgctgctaccggcgcgcattccgggcccgtggacaacaagttcaacaaagagcggtacagcgcctactacgagatttggcaactgcccaacctgaacgtgcggcagaaggccgccttcatcggatctctgcaggacgaccctagccagagcgccaatctgctggccgaggccaagaagctgaacgacgcccaggcccctaaaacgcgtgataaaactcatacctgtccgccatgcccggcagaagtgaaaaccgactccaccgaccacgtgaagcccaaagagacagagaacaccaagcagcccagcaagagctgccacaagcccaaggccatcgtgcacaccgagaaagtgaacatgatgagcctgaccgtgctgggcctgcggatgctgttcgccaaaaccgtggccgtgaacttcctgctgaccgccaagctgttcttcctccgcgccaagagaagcggatctggcgtgaagcagaccctgaatttcgacctgctgaagctggctggcgacgtggaatccaacccaggcccttctagaggccatatgaccgagtacaagcccacggtgcgcctcgccacccgcgacgacgtccccagggccgtacgcaccctcgccgccgcgttcgccgactaccccgccacgcgccacaccgtcgatccggaccgccacatcgagcgggtcaccgagctgcaagaactcttcctcacgcgcgtcgggctcgacatcggcaaggtgtgggtcgcggacgacggcgccgcggtggcggtctggaccacgccggagagcgtcgaagcgggggcggtgttcgccgagatcggcccgcgcatggccgagttgagcggttcccggctggccgcgcagcaacagatggaaggcctcctggcgccgcaccggcccaaggagcccgcgtggttcctggccaccgtcggcgtctcgcccgaccaccagggcaagggtctgggcagcgccgtcgtgctccccggagtggaggcggccgagcgcgccggggtgcccgccttcctggagacctccgcgccccgcaacctccccttctacgagcggctcggcttcaccgtcaccgccgacgtcgaggtgcccgaaggaccgcgcacctggtgcatgacccgcaagcccggtgcctga

SEQ ID NO: 5892 - DNA, 2340 bp, Artificial Sequence
  Synthetic Polynucloetide
atggccttaccagtgaccgccttgctcctgccgctggccttgctgctccacgccgccaggccggaggtgcaactggtggaaagcggcggaggctctgtgcagacaggcggctctctgagactgacctgtgccgccagcggcagaaccagcagatcctatggcatgggctggttcagacaggcccctggcaaagaacgcgagttcgtgtccggcatctcttggagaggcgacagcaccggctacgccgatagcgtgaagggccggttcaccatcagccgggacaacgccaagaacaccgtggacctgcagatgaacagcctgaagcccgaggacaccgccatctactactgtgccgctgccgccggatctgcttggtacggcacactgtacgagtacgactactggggccagggcacccttgtgaccgtgtcatctggcggaggaagcggcggaggatctgaagtgcaactggtggaatctggaggctctctggtgcagccagggggaagcctgagactgtcttgtgccgcttccggcttcaccttcgacgactacgccatgagctgggtgcgccaggtgccaggcaaaggcctggaatgggtgtccagcatcaactggagcggcacccacaccgattacgccgactccgtgaaaggcagattcacaatcagcagaaacaacgccaacaataccctgtacctgcagatgaactccctgaagtctgaggatacagcagtgtattattgcgccaagaactggcgggacgccggcaccacttggtttgagaaaagcggctctgccggacagggaacccaagtgacagtgtcctccctcgaggacaaaactcacacatgcccaccgtgcccagcacccatcaagaccgatgtgattacaatggaccccaaggacaactgctccaaggacgccaacgataccctgctgctccagctgaccaacaccagcgcctactacatgtacttgttgctgctgctgaagtccgtggtgtacttcgccatcatcacatgctgcctgctgcggagaaccgccttctgctgcaacggcgagaagtctagggccaagcgatctggatctggagcaacaaacttctcactactcaaacaagcaggtgacgtggaggagaatcccgggcctactagtatggactggatttggcgcatccttttccttgtcggcgctgctaccggcgcgcattccgggcccgtggacaacaagttcaacaaagagcggtacagcgcctactacgagatttggcaactgcccaacctgaacgtgcggcagaaggccgccttcatcggatctctgcaggacgaccctagccagagcgccaatctgctggccgaggccaagaagctgaacgacgcccaggcccctaaaacgcgtgataaaactcatacctgtccgccatgcccggcagaagtgaaaaccgactccaccgaccacgtgaagcccaaagagacagagaacaccaagcagcccagcaagagctgccacaagcccaaggccatcgtgcacaccgagaaagtgaacatgatgagcctgaccgtgctgggcctgcggatgctgttcgccaaaaccgtggccgtgaacttcctgctgaccgccaagctgttcttcctccgcgccaagagaagcggatctggcgtgaagcagaccctgaatttcgacctgctgaagctggctggcgacgtggaatccaacccaggcccttctagaggccatatgaccgagtacaagcccacggtgcgcctcgccacccgcgacgacgtccccagggccgtacgcaccctcgccgccgcgttcgccgactaccccgccacgcgccacaccgtcgatccggaccgccacatcgagcgggtcaccgagctgcaagaactcttcctcacgcgcgtcgggctcgacatcggcaaggtgtgggtcgcggacgacggcgccgcggtggcggtctggaccacgccggagagcgtcgaagcgggggcggtgttcgccgagatcggcccgcgcatggccgagttgagcggttcccggctggccgcgcagcaacagatggaaggcctcctggcgccgcaccggcccaaggagcccgcgtggttcctggccaccgtcggcgtctcgcccgaccaccagggcaagggtctgggcagcgccgtcgtgctccccggagtggaggcggccgagcgcgccggggtgcccgccttcctggagacctccgcgccccgcaacctccccttctacgagcggctcggcttcaccgtcaccgccgacgtcgaggtgcccgaaggaccgcgcacctggtgcatgacccgcaagcccggtgcctga

SEQ ID NO: 5893 - DNA, 1638 bp, Artificial Sequence
  Synthetic Polynucloetide
atggccttaccagtgaccgccttgctcctgccgctggccttgctgctccacgccgccaggccggaggtgcaactggtggaaagcggcggaggctctgtgcagacaggcggctctctgagactgacctgtgccgccagcggcagaaccagcagatcctatggcatgggctggttcagacaggcccctggcaaagaacgcgagttcgtgtccggcatctcttggagaggcgacagcaccggctacgccgatagcgtgaagggccggttcaccatcagccgggacaacgccaagaacaccgtggacctgcagatgaacagcctgaagcccgaggacaccgccatctactactgtgccgctgccgccggatctgcttggtacggcacactgtacgagtacgactactggggccagggcacccttgtgaccgtgtcatctggcggaggaagcggcggaggatctgaagtgcaactggtggaatctggaggctctctggtgcagccagggggaagcctgagactgtcttgtgccgcttccggcttcaccttcgacgactacgccatgagctgggtgcgccaggtgccaggcaaaggcctggaatgggtgtccagcatcaactggagcggcacccacaccgattacgccgactccgtgaaaggcagattcacaatcagcagaaacaacgccaacaataccctgtacctgcagatgaactccctgaagtctgaggatacagcagtgtattattgcgccaagaactggcgggacgccggcaccacttggtttgagaaaagcggctctgccggacagggaacccaagtgacagtgtcctccctcgaggacaaaactcacacatgcccaccgtgcccagcacccatcaagaccgatgtgattacaatggaccccaaggacaactgctccaaggacgccaacgataccctgctgctccagctgaccaacaccagcgcctactacatgtacttgttgctgctgctgaagtccgtggtgtacttcgccatcatcacatgctgcctgctgcggagaaccgccttctgctgcaacggcgagaagtctagggccaagcgatctggatctggagcaacaaacttctcactactcaaacaagcaggtgacgtggaggagaatcccgggcctactagtatggactggatttggcgcatccttttccttgtcggcgctgctaccggcgcgcattccgggcccgtggacaacaagttcaacaaagagcggtacagcgcctactacgagatttggcaactgcccaacctgaacgtgcggcagaaggccgccttcatcggatctctgcaggacgaccctagccagagcgccaatctgctggccgaggccaagaagctgaacgacgcccaggcccctaaaacgcgtgataaaactcatacctgtccgccatgcccggcagaagtgaaaaccgactccaccgaccacgtgaagcccaaagagacagagaacaccaagcagcccagcaagagctgccacaagcccaaggccatcgtgcacaccgagaaagtgaacatgatgagcctgaccgtgctgggcctgcggatgctgttcgccaaaaccgtggccgtgaacttcctgctgaccgccaagctgttcttcctc

SEQ ID NO: 5894 - DNA, 1611 bp, Artificial Sequence
  Synthetic Polynucloetide
atggccttaccagtgaccgccttgctcctgccgctggccttgctgctccacgccgccaggccggaggtgcaactggtggaaagcggcggaggctctgtgcagacaggcggctctctgagactgacctgtgccgccagcggcagaaccagcagatcctatggcatgggctggttcagacaggcccctggcaaagaacgcgagttcgtgtccggcatctcttggagaggcgacagcaccggctacgccgatagcgtgaagggccggttcaccatcagccgggacaacgccaagaacaccgtggacctgcagatgaacagcctgaagcccgaggacaccgccatctactactgtgccgctgccgccggatctgcttggtacggcacactgtacgagtacgactactggggccagggcacccttgtgaccgtgtcatctggcggaggaagcggcggaggatctgaagtgcaactggtggaatctggaggctctctggtgcagccagggggaagcctgagactgtcttgtgccgcttccggcttcaccttcgacgactacgccatgagctgggtgcgccaggtgccaggcaaaggcctggaatgggtgtccagcatcaactggagcggcacccacaccgattacgccgactccgtgaaaggcagattcacaatcagcagaaacaacgccaacaataccctgtacctgcagatgaactccctgaagtctgaggatacagcagtgtattattgcgccaagaactggcgggacgccggcaccacttggtttgagaaaagcggctctgccggacagggaacccaagtgacagtgtcctccctcgagggatctcccatcaagaccgatgtgattacaatggaccccaaggacaactgctccaaggacgccaacgataccctgctgctccagctgaccaacaccagcgcctactacatgtacttgttgctgctgctgaagtccgtggtgtacttcgccatcatcacatgctgcctgctgcggagaaccgccttctgctgcaacggcgagaagtctagggccaagcgatctggatctggagcaacaaacttctcactactcaaacaagcaggtgacgtggaggagaatcccgggcctactagtatggactggatttggcgcatccttttccttgtcggcgctgctaccggcgcgcattccgggcccgtggacaacaagttcaacaaagagcggtacagcgcctactacgagatttggcaactgcccaacctgaacgtgcggcagaaggccgccttcatcggatctctgcaggacgaccctagccagagcgccaatctgctggccgaggccaagaagctgaacgacgcccaggcccctaaaacgcgtgataaaactcatacctgtccgccatgcccggcagaagtgaaaaccgactccaccgaccacgtgaagcccaaagagacagagaacaccaagcagcccagcaagagctgccacaagcccaaggccatcgtgcacaccgagaaagtgaacatgatgagcctgaccgtgctgggcctgcggatgctgttcgccaaaaccgtggccgtgaacttcctgctgaccgccaagctgttcttcctc

SEQ ID NO: 5895 - DNA, 2262 bp, Artificial Sequence
  Synthetic Polynucloetide
atggccttaccagtgaccgccttgctcctgccgctggccttgctgctccacgccgccaggccggaggtgcaactggtggaaagcggcggaggctctgtgcagacaggcggctctctgagactgacctgtgccgccagcggcagaaccagcagatcctatggcatgggctggttcagacaggcccctggcaaagaacgcgagttcgtgtccggcatctcttggagaggcgacagcaccggctacgccgatagcgtgaagggccggttcaccatcagccgggacaacgccaagaacaccgtggacctgcagatgaacagcctgaagcccgaggacaccgccatctactactgtgccgctgccgccggatctgcttggtacggcacactgtacgagtacgactactggggccagggcacccttgtgaccgtgtcatctggcggaggaagcggcggaggatctgaagtgcaactggtggaatctggaggctctctggtgcagccagggggaagcctgagactgtcttgtgccgcttccggcttcaccttcgacgactacgccatgagctgggtgcgccaggtgccaggcaaaggcctggaatgggtgtccagcatcaactggagcggcacccacaccgattacgccgactccgtgaaaggcagattcacaatcagcagaaacaacgccaacaataccctgtacctgcagatgaactccctgaagtctgaggatacagcagtgtattattgcgccaagaactggcgggacgccggcaccacttggtttgagaaaagcggctctgccggacagggaacccaagtgacagtgtcctccctcgagggatctatggaccccaaggacaactgctccaaggacgccaacgataccctgctgctccagctgaccaacaccagcgcctactacatgtacttgttgctgctgctgaagtccgtggtgtacttcgccatcatcacatgctgcctgctgcggagaaccgccttctgctgcaacggcgagaagtctagggccaagcgatctggatctggagcaacaaacttctcactactcaaacaagcaggtgacgtggaggagaatcccgggcctactagtatggactggatttggcgcatccttttccttgtcggcgctgctaccggcgcgcattccgggcccgtggacaacaagttcaacaaagagcggtacagcgcctactacgagatttggcaactgcccaacctgaacgtgcggcagaaggccgccttcatcggatctctgcaggacgaccctagccagagcgccaatctgctggccgaggccaagaagctgaacgacgcccaggcccctaaaacgcgtggcagcgaagtgaaaaccgactccaccgaccacgtgaagcccaaagagacagagaacaccaagcagcccagcaagagctgccacaagcccaaggccatcgtgcacaccgagaaagtgaacatgatgagcctgaccgtgctgggcctgcggatgctgttcgccaaaaccgtggccgtgaacttcctgctgaccgccaagctgttcttcctccgcgccaagagaagcggatctggcgtgaagcagaccctgaatttcgacctgctgaagctggctggcgacgtggaatccaacccaggcccttctagaggccatatgaccgagtacaagcccacggtgcgcctcgccacccgcgacgacgtccccagggccgtacgcaccctcgccgccgcgttcgccgactaccccgccacgcgccacaccgtcgatccggaccgccacatcgagcgggtcaccgagctgcaagaactcttcctcacgcgcgtcgggctcgacatcggcaaggtgtgggtcgcggacgacggcgccgcggtggcggtctggaccacgccggagagcgtcgaagcgggggcggtgttcgccgagatcggcccgcgcatggccgagttgagcggttcccggctggccgcgcagcaacagatggaaggcctcctggcgccgcaccggcccaaggagcccgcgtggttcctggccaccgtcggcgtctcgcccgaccaccagggcaagggtctgggcagcgccgtcgtgctccccggagtggaggcggccgagcgcgccggggtgcccgccttcctggagacctccgcgccccgcaacctccccttctacgagcggctcggcttcaccgtcaccgccgacgtcgaggtgcccgaaggaccgcgcacctggtgcatgacccgcaagcccggtgcctga

SEQ ID NO: 5896 - DNA, 2265 bp, Artificial Sequence
  Synthetic Polynucloetide
atggccttaccagtgaccgccttgctcctgccgctggccttgctgctccacgccgccaggccggaggtgcaactggtggaaagcggcggaggctctgtgcagacaggcggctctctgagactgacctgtgccgccagcggcagaaccagcagatcctatggcatgggctggttcagacaggcccctggcaaagaacgcgagttcgtgtccggcatctcttggagaggcgacagcaccggctacgccgatagcgtgaagggccggttcaccatcagccgggacaacgccaagaacaccgtggacctgcagatgaacagcctgaagcccgaggacaccgccatctactactgtgccgctgccgccggatctgcttggtacggcacactgtacgagtacgactactggggccagggcacccttgtgaccgtgtcatctggcggaggaagcggcggaggatctgaagtgcaactggtggaatctggaggctctctggtgcagccagggggaagcctgagactgtcttgtgccgcttccggcttcaccttcgacgactacgccatgagctgggtgcgccaggtgccaggcaaaggcctggaatgggtgtccagcatcaactggagcggcacccacaccgattacgccgactccgtgaaaggcagattcacaatcagcagaaacaacgccaacaataccctgtacctgcagatgaactccctgaagtctgaggatacagcagtgtattattgcgccaagaactggcgggacgccggcaccacttggtttgagaaaagcggctctgccggacagggaacccaagtgacagtgtcctccctcgagggatctcccatcaagaccgatgtgattacaatggaccccaaggacaactgctccaaggacgccaacgataccctgctgctccagctgaccaacaccagcgcctactacatgtacttgttgctgctgctgaagtccgtggtgtacttcgccatcatcacatgctgcctgctgcggagaaccgccttctgctgcaacggcgagaagtctagggccaagcgatctggatctggagcaacaaacttctcactactcaaacaagcaggtgacgtggaggagaatcccgggcctactagtatggactggatttggcgcatccttttccttgtcggcgctgctaccggcgcgcattccgggcccgtggacaacaagttcaacaaagagcggtacagcgcctactacgagatttggcaactgcccaacctgaacgtgcggcagaaggccgccttcatcggatctctgcaggacgaccctagccagagcgccaatctgctggccgaggccaagaagctgaacgacgcccaggcccctaaaacgcgtggcagcgaccacgtgaagcccaaagagacagagaacaccaagcagcccagcaagagctgccacaagcccaaggccatcgtgcacaccgagaaagtgaacatgatgagcctgaccgtgctgggcctgcggatgctgttcgccaaaaccgtggccgtgaacttcctgctgaccgccaagctgttcttcctccgcgccaagagaagcggatctggcgtgaagcagaccctgaatttcgacctgctgaagctggctggcgacgtggaatccaacccaggcccttctagaggccatatgaccgagtacaagcccacggtgcgcctcgccacccgcgacgacgtccccagggccgtacgcaccctcgccgccgcgttcgccgactaccccgccacgcgccacaccgtcgatccggaccgccacatcgagcgggtcaccgagctgcaagaactcttcctcacgcgcgtcgggctcgacatcggcaaggtgtgggtcgcggacgacggcgccgcggtggcggtctggaccacgccggagagcgtcgaagcgggggcggtgttcgccgagatcggcccgcgcatggccgagttgagcggttcccggctggccgcgcagcaacagatggaaggcctcctggcgccgcaccggcccaaggagcccgcgtggttcctggccaccgtcggcgtctcgcccgaccaccagggcaagggtctgggcagcgccgtcgtgctccccggagtggaggcggccgagcgcgccggggtgcccgccttcctggagacctccgcgccccgcaacctccccttctacgagcggctcggcttcaccgtcaccgccgacgtcgaggtgcccgaaggaccgcgcacctggtgcatgacccgcaagcccggtgcctga

SEQ ID NO: 5897 - DNA, 1314 bp, Artificial Sequence
  Synthetic Polynucloetide
atggccttaccagtgaccgccttgctcctgccgctggccttgctgctccacgccgccaggccggaggtgcaactggtggaaagcggcggaggctctgtgcagacaggcggctctctgagactgacctgtgccgccagcggcagaaccagcagatcctatggcatgggctggttcagacaggcccctggcaaagaacgcgagttcgtgtccggcatctcttggagaggcgacagcaccggctacgccgatagcgtgaagggccggttcaccatcagccgggacaacgccaagaacaccgtggacctgcagatgaacagcctgaagcccgaggacaccgccatctactactgtgccgctgccgccggatctgcttggtacggcacactgtacgagtacgactactggggccagggcacccttgtgaccgtgtcatctggcggaggaagcggcggaggatctgaagtgcaactggtggaatctggaggctctctggtgcagccagggggaagcctgagactgtcttgtgccgcttccggcttcaccttcgacgactacgccatgagctgggtgcgccaggtgccaggcaaaggcctggaatgggtgtccagcatcaactggagcggcacccacaccgattacgccgactccgtgaaaggcagattcacaatcagcagaaacaacgccaacaataccctgtacctgcagatgaactccctgaagtctgaggatacagcagtgtattattgcgccaagaactggcgggacgccggcaccacttggtttgagaaaagcggctctgccggacagggaacccaagtgacagtgtcctccctcgagggacagcctaaggccaatcctaccgtgacactgttccctccaagcagcgaagaactccaggccaacaaggccacacttgtgtgcctgatctccgacttctaccctggggctgtgacagtggcttggaaggccgatggatctcctgtgaaagccggcgtggaaaccaccaagccatccaagcagagcaacaacaaatacgccgccagctcctacctgagcctgacacctgagcagtggaagtcccacagatcctacagctgccaagtgacccacgaaggcagcaccgtggaaaagacagtggcccctacagagtgcagcggcagagccgattgcggctttaccagcgagagctaccagcagggcgtgctgagcgccaccatcctgtacgagatcctgctgggcaaggccaccctgtacgccgtgctggtgtctgccctggtgctgatggctatggtcaagcggaaggacagccgggga

SEQ ID NO: 5898 - DNA, 1356 bp, Artificial Sequence
  Synthetic Polynucloetide
atggccttaccagtgaccgccttgctcctgccgctggccttgctgctccacgccgccaggccggaggtgcaactggtggaaagcggcggaggctctgtgcagacaggcggctctctgagactgacctgtgccgccagcggcagaaccagcagatcctatggcatgggctggttcagacaggcccctggcaaagaacgcgagttcgtgtccggcatctcttggagaggcgacagcaccggctacgccgatagcgtgaagggccggttcaccatcagccgggacaacgccaagaacaccgtggacctgcagatgaacagcctgaagcccgaggacaccgccatctactactgtgccgctgccgccggatctgcttggtacggcacactgtacgagtacgactactggggccagggcacccttgtgaccgtgtcatctggcggaggaagcggcggaggatctgaagtgcaactggtggaatctggaggctctctggtgcagccagggggaagcctgagactgtcttgtgccgcttccggcttcaccttcgacgactacgccatgagctgggtgcgccaggtgccaggcaaaggcctggaatgggtgtccagcatcaactggagcggcacccacaccgattacgccgactccgtgaaaggcagattcacaatcagcagaaacaacgccaacaataccctgtacctgcagatgaactccctgaagtctgaggatacagcagtgtattattgcgccaagaactggcgggacgccggcaccacttggtttgagaaaagcggctctgccggacagggaacccaagtgacagtgtcctccctcgagggacagcctaaggccaatcctaccgtgacactgttccctccaagcagcgaagaactccaggccaacaaggccacacttgtgtgcctgatctccgacttctaccctggggctgtgacagtggcttggaaggccgatggatctcctgtgaaagccggcgtggaaaccaccaagccatccaagcagagcaacaacaaatacgccgccagctcctacctgagcctgacacctgagcagtggaagtcccacagatcctacagctgccaagtgacccacgaaggcagcaccgtggaaaagacagtggcccctacagagtgcagccccatcaagaccgatgtgattacaatggaccccaaggacaactgctccaaggacgccaacgataccctgctgctccagctgaccaacaccagcgcctactacatgtacttgttgctgctgctgaagtccgtggtgtacttcgccatcatcacatgctgcctgctgcggagaaccgccttctgctgcaacggcgagaagtct

SEQ ID NO: 5899 - DNA, 2124 bp, Artificial Sequence
  Synthetic Polynucloetide
atggactggatttggcgcatccttttccttgtcggcgctgctaccggcgcccattcccagctccagttgcaagagagcggccctggcttggtaaaaccttccgagacccttagcctcacatgcacggttagtgggggcagcatttcctcaggtgattactattggggatggattcggcaacccccgggtaaaggattggagtggattggtcatatttattatagtggagcgacgtactacaacccaagtctcaaatccagggttacaatatccgtcgatacgagcaggaaccaattcagcttgaaactttctagtgtcaccgcagcagacacagccgtctattactgtacgcgggatgactccagtaattggcggtcccgagggcaagggacactggtcacggtctcctcatctggaggcggtggaagcggtggaggaggatctgtggacaacaagttcaacaaagagcggtacagcgcctactacgagatttggcaactgcccaacctgaacgtgcggcagaaggccgccttcatcggatctctgcaggacgaccctagccagagcgccaatctgctggccgaggccaagaagctgaacgacgcccaggcccctaaaggatccggcggcggaggatctggcggaggcggatctgggggcggaggctctttcgaacaagttcagcttcaacagcctggcgctgagctggtcaaacctggcgcttctgtgaagatgagctgcaaagccagcggctacgccttcagcagctactggatcaactggatgaagcagaaacccggccagggactcgaatggatcggccaaatctatcccggcgacggcgacaccaactacaacggcaagttcaagggcagagccacactgaccgccgatacctctagcagcacagcctacatgcagctgagcagcctgaccagcgaagatagcgccgtgtacttctgtgcccggtccatcacaacagtcgtgggctgcgctatggactattggggccagggaacaagcgtgaccgtgtctagtggcggaggcggaagtggaggcggaggatctggcggcggaggctctgacatccagatgacacagagccctagcagcctgtctgccagcgtgggagacagagtgaccatcacatgcaaggccagcgaccacatcaacaactggctggcctggtatcagcagaagcctggacaggcccctaagctgctgatctacggcgctaccacactggaaacaggcgtgcccagcagattttctggcagcggctctggcaccgactacaccctgacaatatccagcctccagcctgaggacttcgccacctactactgtcagcagagctggaacaccccttggacattcggccagggcaccaagctggaaatcaagagaacgcgtgagcagaaactgatctcggaagaggatctggcgaagcccaccacgacgccagcgccgcgaccaccaacaccggcgcccaccatcgcgtcgcagcccctgtccctgcgcccagaggcgtgccggccagcggcggggggcgcagtgcacacgagggggctggacttcgcctgtgacatctacatctgggcgcccttggccgggacttgtggggtccttctcctgtcactggttatcaccctttactgcaaacggggcagaaagaaactcctgtatatattcaaacaaccatttatgagaccagtacaaactactcaagaggaagatggctgtagctgccgatttccagaagaagaagaaggaggatgtgaactgagagtgaagttcagcaggagcgcagacgcccccgcgtaccagcagggccagaaccagctctataacgagctgaatctaggacgaagagaggagtacgatgttttggacaagagacgtggccgggaccctgagatggggggaaagccgagaaggaagaaccctcaggaaggcctgtacaatgaactgcagaaagataagatggcggaggcctacagtgagattgggatgaaaggcgagcgccggaggggcaaggggcacgatggcctttaccagggtctcagtacagccaccaaggacacctacgacgcccttcacatgcaggccctgccccctcgctga

SEQ ID NO: 5900 - DNA, 3183 bp, Artificial Sequence
  Synthetic Polynucloetide
atggccttaccagtgaccgccttgctcctgccgctggccttgctgctccacgccgccaggccggacatccagatgacacagagccctagcagcctgtctgccagcgtgggagacagagtgaccatcacatgcaaggccagcgaccacatcaacaactggctggcctggtatcagcagaagcctggacaggcccctaagctgctgatctacggcgctaccacactggaaacaggcgtgcccagcagattttctggcagcggctctggcaccgactacaccctgacaatatccagcctccagcctgaggacttcgccacctactactgtcagcagagctggaacaccccttggacattcggccagggcaccaagctggaaatcaagagactcgagatccagaaccctgatcctgccgtgtaccagctgcgggatagcaagagcagcgacaagagcgtgtgtctgttcaccgacttcgacagccagaccaacgtgtcccagagcaaggactccgacgtgtacatcaccgataagtgcgtgctggacatgcggagcatggacttcaagagcaactccgccgtggcctggtccaacaagtccgatttcgcctgcgccaacgccttcaacaacagcattatccccgaggacacattcttcccaagcagcgacgtgccctgcgacgtgaagctggtggaaaagagcttcgagacagacaccaacctgaacttccagaacctgagcgtgatcggcttcagaatcctgctgctgaaagtggccggctttaacctgctgatgaccctgcggctgtggtccagccgcgccaagagaagcggatctggcgtgaagcagaccctgaatttcgacctgctgaagctggctggcgacgtggaatccaacccaggccctactagtatggactggatttggcgcatccttttccttgtcggcgctgctaccggcgcccattcccagctccagttgcaagagagcggccctggcttggtaaaaccttccgagacccttagcctcacatgcacggttagtgggggcagcatttcctcaggtgattactattggggatggattcggcaacccccgggtaaaggattggagtggattggtcatatttattatagtggagcgacgtactacaacccaagtctcaaatccagggttacaatatccgtcgatacgagcaggaaccaattcagcttgaaactttctagtgtcaccgcagcagacacagccgtctattactgtacgcgggatgactccagtaattggcggtcccgagggcaagggacactggtcacggtctcctcatctggaggcggtggaagcggtggaggaggatctgtggacaacaagttcaacaaagagcggtacagcgcctactacgagatttggcaactgcccaacctgaacgtgcggcagaaggccgccttcatcggatctctgcaggacgaccctagccagagcgccaatctgctggccgaggccaagaagctgaacgacgcccaggcccctaaaggatccggcggcggaggatctggcggaggcggatctgggggcggaggctctttcgaacaagttcagcttcaacagcctggcgctgagctggtcaaacctggcgcttctgtgaagatgagctgcaaagccagcggctacgccttcagcagctactggatcaactggatgaagcagaaacccggccagggactcgaatggatcggccaaatctatcccggcgacggcgacaccaactacaacggcaagttcaagggcagagccacactgaccgccgatacctctagcagcacagcctacatgcagctgagcagcctgaccagcgaagatagcgccgtgtacttctgtgcccggtccatcacaacagtcgtgggctgcgctatggactattggggccagggaacaagcgtgaccgtgtctagtacgcgtgaggacctgaagaacgtgttcccacctgaggtggccgtgttcgagcctagcaaggccgagatcgcccacacccagaaagccaccctcgtgtgcctggctaccggcttctaccccgaccatgtggaactgtcttggtgggtcaacggcaaagaggtgcacagcggcgtgtgtaccgacccccagccactgaaagaacagcccgccctgaacgacagccggtactgcctgagcagcagactgagagtgtccgccaccttctggcagaacccccggaaccacttcagatgccaggtgcagttctacggcctgagcgagaacgacgagtggacccaggacagagccaagcccgtgacccagatcgtgtctgccgaagcctggggcagagccgattgcggcatcaccagcgccagctaccaccagggcgtgctgagcgccaccatcctgtacgagatcctgctgggcaaggccaccctgtacgccgtgctggtgtctgccctggtgctgatggctatggtcaagcggaaggacagccggggaagggccaagcgatctggatctggagcaacaaacttctcactactcaaacaagcaggtgacgtggaggagaatcccgggccttctagaggccatatgaccgagtacaagcccacggtgcgcctcgccacccgcgacgacgtccccagggccgtacgcaccctcgccgccgcgttcgccgactaccccgccacgcgccacaccgtcgatccggaccgccacatcgagcgggtcaccgagctgcaagaactcttcctcacgcgcgtcgggctcgacatcggcaaggtgtgggtcgcggacgacggcgccgcggtggcggtctggaccacgccggagagcgtcgaagcgggggcggtgttcgccgagatcggcccgcgcatggccgagttgagcggttcccggctggccgcgcagcaacagatggaaggcctcctggcgccgcaccggcccaaggagcccgcgtggttcctggccaccgtcggcgtctcgcccgaccaccagggcaagggtctgggcagcgccgtcgtgctccccggagtggaggcggccgagcgcgccggggtgcccgccttcctggagacctccgcgccccgcaacctccccttctacgagcggctcggcttcaccgtcaccgccgacgtcgaggtgcccgaaggaccgcgcacctggtgcatgacccgcaagcccggtgcctga

SEQ ID NO: 5901 - DNA, 3180 bp, Artificial Sequence
  Synthetic Polynucloetide
atggccttaccagtgaccgccttgctcctgccgctggccttgctgctccacgccgccaggccggacatccagatgacacagagccctagcagcctgtctgccagcgtgggagacagagtgaccatcacatgcaaggccagcgaccacatcaacaactggctggcctggtatcagcagaagcctggacaggcccctaagctgctgatctacggcgctaccacactggaaacaggcgtgcccagcagattttctggcagcggctctggcaccgactacaccctgacaatatccagcctccagcctgaggacttcgccacctactactgtcagcagagctggaacaccccttggacattcggccagggcaccaagctggaaatcaagagactcgaggacctgaagaacgtgttcccacctgaggtggccgtgttcgagcctagcaaggccgagatcgcccacacccagaaagccaccctcgtgtgcctggctaccggcttctaccccgaccatgtggaactgtcttggtgggtcaacggcaaagaggtgcacagcggcgtgtgtaccgacccccagccactgaaagaacagcccgccctgaacgacagccggtactgcctgagcagcagactgagagtgtccgccaccttctggcagaacccccggaaccacttcagatgccaggtgcagttctacggcctgagcgagaacgacgagtggacccaggacagagccaagcccgtgacccagatcgtgtctgccgaagcctggggcagagccgattgcggcatcaccagcgccagctaccaccagggcgtgctgagcgccaccatcctgtacgagatcctgctgggcaaggccaccctgtacgccgtgctggtgtctgccctggtgctgatggctatggtcaagcggaaggacagccggggaagggccaagcgatctggatctggagcaacaaacttctcactactcaaacaagcaggtgacgtggaggagaatcccgggcctactagtatggactggatttggcgcatccttttccttgtcggcgctgctaccggcgcccattcccagctccagttgcaagagagcggccctggcttggtaaaaccttccgagacccttagcctcacatgcacggttagtgggggcagcatttcctcaggtgattactattggggatggattcggcaacccccgggtaaaggattggagtggattggtcatatttattatagtggagcgacgtactacaacccaagtctcaaatccagggttacaatatccgtcgatacgagcaggaaccaattcagcttgaaactttctagtgtcaccgcagcagacacagccgtctattactgtacgcgggatgactccagtaattggcggtcccgagggcaagggacactggtcacggtctcctcatctggaggcggtggaagcggtggaggaggatctgtggacaacaagttcaacaaagagcggtacagcgcctactacgagatttggcaactgcccaacctgaacgtgcggcagaaggccgccttcatcggatctctgcaggacgaccctagccagagcgccaatctgctggccgaggccaagaagctgaacgacgcccaggcccctaaaggatccggcggcggaggatctggcggaggcggatctgggggcggaggctctttcgaacaagttcagcttcaacagcctggcgctgagctggtcaaacctggcgcttctgtgaagatgagctgcaaagccagcggctacgccttcagcagctactggatcaactggatgaagcagaaacccggccagggactcgaatggatcggccaaatctatcccggcgacggcgacaccaactacaacggcaagttcaagggcagagccacactgaccgccgatacctctagcagcacagcctacatgcagctgagcagcctgaccagcgaagatagcgccgtgtacttctgtgcccggtccatcacaacagtcgtgggctgcgctatggactattggggccagggaacaagcgtgaccgtgtctagtacgcgtatccagaaccctgatcctgccgtgtaccagctgcgggatagcaagagcagcgacaagagcgtgtgtctgttcaccgacttcgacagccagaccaacgtgtcccagagcaaggactccgacgtgtacatcaccgataagtgcgtgctggacatgcggagcatggacttcaagagcaactccgccgtggcctggtccaacaagtccgatttcgcctgcgccaacgccttcaacaacagcattatccccgaggacacattcttcccaagcagcgacgtgccctgcgacgtgaagctggtggaaaagagcttcgagacagacaccaacctgaacttccagaacctgagcgtgatcggcttcagaatcctgctgctgaaagtggccggctttaacctgctgatgaccctgcggctgtggtccagccgcgccaagagaagcggatctggcgtgaagcagaccctgaatttcgacctgctgaagctggctggcgacgtggaatccaacccaggcccttctagaggccatatgaccgagtacaagcccacggtgcgcctcgccacccgcgacgacgtccccagggccgtacgcaccctcgccgccgcgttcgccgactaccccgccacgcgccacaccgtcgatccggaccgccacatcgagcgggtcaccgagctgcaagaactcttcctcacgcgcgtcgggctcgacatcggcaaggtgtgggtcgcggacgacggcgccgcggtggcggtctggaccacgccggagagcgtcgaagcgggggcggtgttcgccgagatcggcccgcgcatggccgagttgagcggttcccggctggccgcgcagcaacagatggaaggcctcctggcgccgcaccggcccaaggagcccgcgtggttcctggccaccgtcggcgtctcgcccgaccaccagggcaagggtctgggcagcgccgtcgtgctccccggagtggaggcggccgagcgcgccggggtgcccgccttcctggagacctccgcgccccgcaacctccccttctacgagcggctcggcttcaccgtcaccgccgacgtcgaggtgcccgaaggaccgcgcacctggtgcatgacccgcaagcccggtgcctga

SEQ ID NO: 5902 - DNA, 3180 bp, Artificial Sequence
  Synthetic Polynucloetide
atggccttaccagtgaccgccttgctcctgccgctggccttgctgctccacgccgccaggccggacatccagatgacacagagccctagcagcctgtctgccagcgtgggagacagagtgaccatcacatgcaaggccagcgaccacatcaacaactggctggcctggtatcagcagaagcctggacaggcccctaagctgctgatctacggcgctaccacactggaaacaggcgtgcccagcagattttctggcagcggctctggcaccgactacaccctgacaatatccagcctccagcctgaggacttcgccacctactactgtcagcagagctggaacaccccttggacattcggccagggcaccaagctggaaatcaagagactcgaggacctgaagaacgtgttcccacctgaggtggccgtgttcgagcctagcgaggccgagatcagccacacccagaaagccaccctcgtgtgcctggctaccggcttctaccccgaccatgtggaactgtcttggtgggtcaacggcaaagaggtgcacagcggcgtgtgtaccgacccccagccactgaaagaacagcccgccctgaacgacagccggtactgcctgagcagcagactgagagtgtccgccaccttctggcagaacccccggaaccacttcagatgccaggtgcagttctacggcctgagcgagaacgacgagtggacccaggacagagccaagcccgtgacccagatcgtgtctgccgaagcctggggcagagccgattgcggctttaccagcgagagctaccagcagggcgtgctgagcgccaccatcctgtacgagatcctgctgggcaaggccaccctgtacgccgtgctggtgtctgccctggtgctgatggctatggtcaagcggaaggacagccggggaagggccaagcgatctggatctggagcaacaaacttctcactactcaaacaagcaggtgacgtggaggagaatcccgggcctactagtatggactggatttggcgcatccttttccttgtcggcgctgctaccggcgcccattcccagctccagttgcaagagagcggccctggcttggtaaaaccttccgagacccttagcctcacatgcacggttagtgggggcagcatttcctcaggtgattactattggggatggattcggcaacccccgggtaaaggattggagtggattggtcatatttattatagtggagcgacgtactacaacccaagtctcaaatccagggttacaatatccgtcgatacgagcaggaaccaattcagcttgaaactttctagtgtcaccgcagcagacacagccgtctattactgtacgcgggatgactccagtaattggcggtcccgagggcaagggacactggtcacggtctcctcatctggaggcggtggaagcggtggaggaggatctgtggacaacaagttcaacaaagagcggtacagcgcctactacgagatttggcaactgcccaacctgaacgtgcggcagaaggccgccttcatcggatctctgcaggacgaccctagccagagcgccaatctgctggccgaggccaagaagctgaacgacgcccaggcccctaaaggatccggcggcggaggatctggcggaggcggatctgggggcggaggctctttcgaacaagttcagcttcaacagcctggcgctgagctggtcaaacctggcgcttctgtgaagatgagctgcaaagccagcggctacgccttcagcagctactggatcaactggatgaagcagaaacccggccagggactcgaatggatcggccaaatctatcccggcgacggcgacaccaactacaacggcaagttcaagggcagagccacactgaccgccgatacctctagcagcacagcctacatgcagctgagcagcctgaccagcgaagatagcgccgtgtacttctgtgcccggtccatcacaacagtcgtgggctgcgctatggactattggggccagggaacaagcgtgaccgtgtctagtacgcgtatccagaaccctgatcctgccgtgtaccagctgcgggatagcaagagcagcgacaagagcgtgtgtctgttcaccgacttcgacagccagaccaacgtgtcccagagcaaggactccgacgtgtacatcaccgataagtgcgtgctggacatgcggagcatggacttcaagagcaactccgccgtggcctggtccaacaagtccgatttcgcctgcgccaacgccttcaacaacagcattatccccgaggacacattcttcccaagccccgagagcagctgcgacgtgaagctggtggaaaagagcttcgagacagacaccaacctgaacttccagaacctgagcgtgatcggcttcagaatcctgctgctgaaagtggccggctttaacctgctgatgaccctgcggctgtggtccagccgcgccaagagaagcggatctggcgtgaagcagaccctgaatttcgacctgctgaagctggctggcgacgtggaatccaacccaggcccttctagaggccatatgaccgagtacaagcccacggtgcgcctcgccacccgcgacgacgtccccagggccgtacgcaccctcgccgccgcgttcgccgactaccccgccacgcgccacaccgtcgatccggaccgccacatcgagcgggtcaccgagctgcaagaactcttcctcacgcgcgtcgggctcgacatcggcaaggtgtgggtcgcggacgacggcgccgcggtggcggtctggaccacgccggagagcgtcgaagcgggggcggtgttcgccgagatcggcccgcgcatggccgagttgagcggttcccggctggccgcgcagcaacagatggaaggcctcctggcgccgcaccggcccaaggagcccgcgtggttcctggccaccgtcggcgtctcgcccgaccaccagggcaagggtctgggcagcgccgtcgtgctccccggagtggaggcggccgagcgcgccggggtgcccgccttcctggagacctccgcgccccgcaacctccccttctacgagcggctcggcttcaccgtcaccgccgacgtcgaggtgcccgaaggaccgcgcacctggtgcatgacccgcaagcccggtgcctga

SEQ ID NO: 5903 - DNA, 2478 bp, Artificial Sequence
  Synthetic Polynucloetide
atggccttaccagtgaccgccttgctcctgccgctggccttgctgctccacgccgccaggccggacatccagatgacacagagccctagcagcctgtctgccagcgtgggagacagagtgaccatcacatgcaaggccagcgaccacatcaacaactggctggcctggtatcagcagaagcctggacaggcccctaagctgctgatctacggcgctaccacactggaaacaggcgtgcccagcagattttctggcagcggctctggcaccgactacaccctgacaatatccagcctccagcctgaggacttcgccacctactactgtcagcagagctggaacaccccttggacattcggccagggcaccaagctggaaatcaagagactcgaggacctgaagaacgtgttcccacctgaggtggccgtgttcgagcctagcgaggccgagatcagccacacccagaaagccaccctcgtgtgcctggctaccggcttctaccccgaccatgtggaactgtcttggtgggtcaacggcaaagaggtgcacagcggcgtgtgtaccgacccccagccactgaaagaacagcccgccctgaacgacagccggtactgcctgagcagcagactgagagtgtccgccaccttctggcagaacccccggaaccacttcagatgccaggtgcagttctacggcctgagcgagaacgacgagtggacccaggacagagccaagcccgtgacccagatcgtgtctgccgaagcctggggcagagccgattgcggctttaccagcgagagctaccagcagggcgtgctgagcgccaccatcctgtacgagatcctgctgggcaaggccaccctgtacgccgtgctggtgtctgccctggtgctgatggctatggtcaagcggaaggacagccggggaagggccaagcgatctggatctggagcaacaaacttctcactactcaaacaagcaggtgacgtggaggagaatcccgggcctactagtatggactggatttggcgcatccttttccttgtcggcgctgctaccggcgcccattcccagctccagttgcaagagagcggccctggcttggtaaaaccttccgagacccttagcctcacatgcacggttagtgggggcagcatttcctcaggtgattactattggggatggattcggcaacccccgggtaaaggattggagtggattggtcatatttattatagtggagcgacgtactacaacccaagtctcaaatccagggttacaatatccgtcgatacgagcaggaaccaattcagcttgaaactttctagtgtcaccgcagcagacacagccgtctattactgtacgcgggatgactccagtaattggcggtcccgagggcaagggacactggtcacggtctcctcatctggaggcggtggaagcggtggaggaggatctgtggacaacaagttcaacaaagagcggtacagcgcctactacgagatttggcaactgcccaacctgaacgtgcggcagaaggccgccttcatcggatctctgcaggacgaccctagccagagcgccaatctgctggccgaggccaagaagctgaacgacgcccaggcccctaaaggatccggcggcggaggatctggcggaggcggatctgggggcggaggctctttcgaacaagttcagcttcaacagcctggcgctgagctggtcaaacctggcgcttctgtgaagatgagctgcaaagccagcggctacgccttcagcagctactggatcaactggatgaagcagaaacccggccagggactcgaatggatcggccaaatctatcccggcgacggcgacaccaactacaacggcaagttcaagggcagagccacactgaccgccgatacctctagcagcacagcctacatgcagctgagcagcctgaccagcgaagatagcgccgtgtacttctgtgcccggtccatcacaacagtcgtgggctgcgctatggactattggggccagggaacaagcgtgaccgtgtctagtacgcgtatccagaaccctgatcctgccgtgtaccagctgcgggatagcaagagcagcgacaagagcgtgtgtctgttcaccgacttcgacagccagaccaacgtgtcccagagcaaggactccgacgtgtacatcaccgataagtgcgtgctggacatgcggagcatggacttcaagagcaactccgccgtggcctggtccaacaagtccgatttcgcctgcgccaacgccttcaacaacagcattatccccgaggacacattcttcccaagccccgagagcagctgcgacgtgaagctggtggaaaagagcttcgagacagacaccaacctgaacttccagaacctgagcgtgatcggcttcagaatcctgctgctgaaagtggccggctttaacctgctgatgaccctgcggctgtggtccagc

SEQ ID NO: 5904 - DNA, 3153 bp, Artificial Sequence
  Synthetic Polynucloetide
atggccttaccagtgaccgccttgctcctgccgctggccttgctgctccacgccgccaggccggacatccagatgacacagagccctagcagcctgtctgccagcgtgggagacagagtgaccatcacatgcaaggccagcgaccacatcaacaactggctggcctggtatcagcagaagcctggacaggcccctaagctgctgatctacggcgctaccacactggaaacaggcgtgcccagcagattttctggcagcggctctggcaccgactacaccctgacaatatccagcctccagcctgaggacttcgccacctactactgtcagcagagctggaacaccccttggacattcggccagggcaccaagctggaaatcaagagactcgaggacctgaagaacgtgttcccacctgaggtggccgtgttcgagcctagcgaggccgagatcagccacacccagaaagccaccctcgtgtgcctggctaccggcttctaccccgaccatgtggaactgtcttggtgggtcaacggcaaagaggtgcacagcggcgtgtgtaccgacccccagccactgaaagaacagcccgccctgaacgacagccggtactgcctgagcagcagactgagagtgtccgccaccttctggcagaacccccggaaccacttcagatgccaggtgcagttctacggcctgagcgagaacgacgagtggacccaggacagagccaagcccgtgacccagatcgtgtctgccgaagcctggggcagagccgattgcggctttaccagcgagagctaccagcagggcgtgctgagcgccaccatcctgtacgagatcctgctgggcaaggccaccctgtacgccgtgctggtgtctgccctggtgctgatggctatggtcaagcggaaggacagccggggaagggccaagcgatctggatctggagcaacaaacttctcactactcaaacaagcaggtgacgtggaggagaatcccgggcctactagtatggactggatttggcgcatccttttccttgtcggcgctgctaccggcgcccattcccagctccagttgcaagagagcggccctggcttggtaaaaccttccgagacccttagcctcacatgcacggttagtgggggcagcatttcctcaggtgattactattggggatggattcggcaacccccgggtaaaggattggagtggattggtcatatttattatagtggagcgacgtactacaacccaagtctcaaatccagggttacaatatccgtcgatacgagcaggaaccaattcagcttgaaactttctagtgtcaccgcagcagacacagccgtctattactgtacgcgggatgactccagtaattggcggtcccgagggcaagggacactggtcacggtctcctcatctggaggcggtggaagcggtggaggaggatctgtggacaacaagttcaacaaagagcggtacagcgcctactacgagatttggcaactgcccaacctgaacgtgcggcagaaggccgccttcatcggatctctgcaggacgaccctagccagagcgccaatctgctggccgaggccaagaagctgaacgacgcccaggcccctaaaggatccggcggcggaggatctggcggaggcggatctgggggcggaggctctttcgaacaagttcagcttcaacagcctggcgctgagctggtcaaacctggcgcttctgtgaagatgagctgcaaagccagcggctacgccttcagcagctactggatcaactggatgaagcagaaacccggccagggactcgaatggatcggccaaatctatcccggcgacggcgacaccaactacaacggcaagttcaagggcagagccacactgaccgccgatacctctagcagcacagcctacatgcagctgagcagcctgaccagcgaagatagcgccgtgtacttctgtgcccggtccatcacaacagtcgtgggctgcgctatggactattggggccagggaacaagcgtgaccgtgtctagtacgcgtatccagaaccctgatcctgccgtgtaccagctgcgggatagcaagagcagcgacaagagcgtgtgtctgttcaccgacttcgacagccagaccaacgtgtcccagagcaaggactccgacgtgtacatcaccgataagtgcgtgctggacatgcggagcatggacttcaagagcaactccgccgtggcctggtccaacaagtccgatttcgcctgcgccaacgccttcaacaacagcattatccccgaggacacattcttcccaagccccgagagcagctgcgacgtgaagctggtggaaaagagcttcgagacagacaccaacctgaacttccagaacctgagcgtgatcggcttcagaatcctgctgctgaaagtggccggctttaacctgctgatgaccctgcggctgtggtccagccgcgccaagagaagcggatctggcgtgaagcagaccctgaatttcgacctgctgaagctggctggcgacgtggaatccaacccaggcccttctagaggcgggatccacaccatggctacctacgaggtgctgtgcgaggtggcaagaaagctgggcaccgacgacagagaagtggtgctgttcctgctgaacgtgttcatccctcagcctacactggcccagctgatcggtgcactgagagccctgaaagaggaaggccggctgacctttcctctgctggccgaatgcctgttcagagccggaagaagggatctgctgcgggacctgctgcatctggaccccagatttctggaaagacacctggccggcaccatgagctacttcagcccttaccagctgaccgtgctgcacgttgacggcgaactgtgcgccagagatattcggagcctgatcttcctgagcaaggacaccatcggcagccggtctacccctcagacatttctgcactgggtgtactgcatggaaaacctggacctgctcggccccacagatgtggatgccctgatgtccatgctgagaagcctgagcagagtggacctccagagacaggtgcagacactgatgggactgcacctgagcggacctagccacagccagcactacagacacacccct

SEQ ID NO: 5905 - DNA, 2490 bp, Artificial Sequence
  Synthetic Polynucloetide
atggccttaccagtgaccgccttgctcctgccgctggccttgctgctccacgccgccaggccggacatccagatgacacagagccctagcagcctgtctgccagcgtgggagacagagtgaccatcacatgcaaggccagcgaccacatcaacaactggctggcctggtatcagcagaagcctggacaggcccctaagctgctgatctacggcgctaccacactggaaacaggcgtgcccagcagattttctggcagcggctctggcaccgactacaccctgacaatatccagcctccagcctgaggacttcgccacctactactgtcagcagagctggaacaccccttggacattcggccagggcaccaagctggaaatcaagagactcgagatccagaaccctgatcctgccgtgtaccagctgcgggatagcaagagcagcgacaagagcgtgtgtctgttcaccgacttcgacagccagaccaacgtgtcccagagcaaggactccgacgtgtacatcaccgataagtgcgtgctggacatgcggagcatggacttcaagagcaactccgccgtggcctggtccaacaagtccgatttcgcctgcgccaacgccttcaacaacagcattatccccgaggacacattcttcccaagccccgagagcagctgcgacgtgaagctggtggaaaagagcttcgagacagacaccaacctgaacttccagaacctgagcgtgatcggcttcagaatcctgctgctgaaagtggccggctttaacctgctgatgaccctgcggctgtggtccagccgcgccaagagaagcggatctggcgtgaagcagaccctgaatttcgacctgctgaagctggctggcgacgtggaatccaacccaggccctactagtatggactggatttggcgcatccttttccttgtcggcgctgctaccggcgcccattcccagctccagttgcaagagagcggccctggcttggtaaaaccttccgagacccttagcctcacatgcacggttagtgggggcagcatttcctcaggtgattactattggggatggattcggcaacccccgggtaaaggattggagtggattggtcatatttattatagtggagcgacgtactacaacccaagtctcaaatccagggttacaatatccgtcgatacgagcaggaaccaattcagcttgaaactttctagtgtcaccgcagcagacacagccgtctattactgtacgcgggatgactccagtaattggcggtcccgagggcaagggacactggtcacggtctcctcatctggaggcggtggaagcggtggaggaggatctgtggacaacaagttcaacaaagagcggtacagcgcctactacgagatttggcaactgcccaacctgaacgtgcggcagaaggccgccttcatcggatctctgcaggacgaccctagccagagcgccaatctgctggccgaggccaagaagctgaacgacgcccaggcccctaaaggatccggcggcggaggatctggcggaggcggatctgggggcggaggctctttcgaacaagttcagcttcaacagcctggcgctgagctggtcaaacctggcgcttctgtgaagatgagctgcaaagccagcggctacgccttcagcagctactggatcaactggatgaagcagaaacccggccagggactcgaatggatcggccaaatctatcccggcgacggcgacaccaactacaacggcaagttcaagggcagagccacactgaccgccgatacctctagcagcacagcctacatgcagctgagcagcctgaccagcgaagatagcgccgtgtacttctgtgcccggtccatcacaacagtcgtgggctgcgctatggactattggggccagggaacaagcgtgaccgtgtctagtacgcgtgaggacctgaagaacgtgttcccacctgaggtggccgtgttcgagcctagcgaggccgagatcagccacacccagaaagccaccctcgtgtgcctggctaccggcttctaccccgaccatgtggaactgtcttggtgggtcaacggcaaagaggtgcacagcggcgtgtgtaccgacccccagccactgaaagaacagcccgccctgaacgacagccggtactgcctgagcagcagactgagagtgtccgccaccttctggcagaacccccggaaccacttcagatgccaggtgcagttctacggcctgagcgagaacgacgagtggacccaggacagagccaagcccgtgacccagatcgtgtctgccgaagcctggggcagagccgattgcggctttaccagcgagagctaccagcagggcgtgctgagcgccaccatcctgtacgagatcctgctgggcaaggccaccctgtacgccgtgctggtgtctgccctggtgctgatggctatggtcaagcggaaggacagccgggga

SEQ ID NO: 5906 - DNA, 3156 bp, Artificial Sequence
  Synthetic Polynucloetide
atggccttaccagtgaccgccttgctcctgccgctggccttgctgctccacgccgccaggccggacatccagatgacacagagccctagcagcctgtctgccagcgtgggagacagagtgaccatcacatgcaaggccagcgaccacatcaacaactggctggcctggtatcagcagaagcctggacaggcccctaagctgctgatctacggcgctaccacactggaaacaggcgtgcccagcagattttctggcagcggctctggcaccgactacaccctgacaatatccagcctccagcctgaggacttcgccacctactactgtcagcagagctggaacaccccttggacattcggccagggcaccaagctggaaatcaagagactcgagatccagaaccctgatcctgccgtgtaccagctgcgggatagcaagagcagcgacaagagcgtgtgtctgttcaccgacttcgacagccagaccaacgtgtcccagagcaaggactccgacgtgtacatcaccgataagtgcgtgctggacatgcggagcatggacttcaagagcaactccgccgtggcctggtccaacaagtccgatttcgcctgcgccaacgccttcaacaacagcattatccccgaggacacattcttcccaagccccgagagcagctgcgacgtgaagctggtggaaaagagcttcgagacagacaccaacctgaacttccagaacctgagcgtgatcggcttcagaatcctgctgctgaaagtggccggctttaacctgctgatgaccctgcggctgtggtccagccgcgccaagagaagcggatctggcgtgaagcagaccctgaatttcgacctgctgaagctggctggcgacgtggaatccaacccaggccctactagtatggactggatttggcgcatccttttccttgtcggcgctgctaccggcgcccattcccagctccagttgcaagagagcggccctggcttggtaaaaccttccgagacccttagcctcacatgcacggttagtgggggcagcatttcctcaggtgattactattggggatggattcggcaacccccgggtaaaggattggagtggattggtcatatttattatagtggagcgacgtactacaacccaagtctcaaatccagggttacaatatccgtcgatacgagcaggaaccaattcagcttgaaactttctagtgtcaccgcagcagacacagccgtctattactgtacgcgggatgactccagtaattggcggtcccgagggcaagggacactggtcacggtctcctcatctggaggcggtggaagcggtggaggaggatctgtggacaacaagttcaacaaagagcggtacagcgcctactacgagatttggcaactgcccaacctgaacgtgcggcagaaggccgccttcatcggatctctgcaggacgaccctagccagagcgccaatctgctggccgaggccaagaagctgaacgacgcccaggcccctaaaggatccggcggcggaggatctggcggaggcggatctgggggcggaggctctttcgaacaagttcagcttcaacagcctggcgctgagctggtcaaacctggcgcttctgtgaagatgagctgcaaagccagcggctacgccttcagcagctactggatcaactggatgaagcagaaacccggccagggactcgaatggatcggccaaatctatcccggcgacggcgacaccaactacaacggcaagttcaagggcagagccacactgaccgccgatacctctagcagcacagcctacatgcagctgagcagcctgaccagcgaagatagcgccgtgtacttctgtgcccggtccatcacaacagtcgtgggctgcgctatggactattggggccagggaacaagcgtgaccgtgtctagtacgcgtgaggacctgaagaacgtgttcccacctgaggtggccgtgttcgagcctagcgaggccgagatcagccacacccagaaagccaccctcgtgtgcctggctaccggcttctaccccgaccatgtggaactgtcttggtgggtcaacggcaaagaggtgcacagcggcgtgtgtaccgacccccagccactgaaagaacagcccgccctgaacgacagccggtactgcctgagcagcagactgagagtgtccgccaccttctggcagaacccccggaaccacttcagatgccaggtgcagttctacggcctgagcgagaacgacgagtggacccaggacagagccaagcccgtgacccagatcgtgtctgccgaagcctggggcagagccgattgcggctttaccagcgagagctaccagcagggcgtgctgagcgccaccatcctgtacgagatcctgctgggcaaggccaccctgtacgccgtgctggtgtctgccctggtgctgatggctatggtcaagcggaaggacagccggggaagggccaagcgatctggatctggagcaacaaacttctcactactcaaacaagcaggtgacgtggaggagaatcccgggccttctagaggcgggatccacaccatggctacctacgaggtgctgtgcgaggtggcaagaaagctgggcaccgacgacagagaagtggtgctgttcctgctgaacgtgttcatccctcagcctacactggcccagctgatcggtgcactgagagccctgaaagaggaaggccggctgacctttcctctgctggccgaatgcctgttcagagccggaagaagggatctgctgcgggacctgctgcatctggaccccagatttctggaaagacacctggccggcaccatgagctacttcagcccttaccagctgaccgtgctgcacgttgacggcgaactgtgcgccagagatattcggagcctgatcttcctgagcaaggacaccatcggcagccggtctacccctcagacatttctgcactgggtgtactgcatggaaaacctggacctgctcggccccacagatgtggatgccctgatgtccatgctgagaagcctgagcagagtggacctccagagacaggtgcagacactgatgggactgcacctgagcggacctagccacagccagcactacagacacacccct

SEQ ID NO: 5907 - DNA, 3180 bp, Artificial Sequence
  Synthetic Polynucloetide
atggccttaccagtgaccgccttgctcctgccgctggccttgctgctccacgccgccaggccggacatccagatgacacagagccctagcagcctgtctgccagcgtgggagacagagtgaccatcacatgcaaggccagcgaccacatcaacaactggctggcctggtatcagcagaagcctggacaggcccctaagctgctgatctacggcgctaccacactggaaacaggcgtgcccagcagattttctggcagcggctctggcaccgactacaccctgacaatatccagcctccagcctgaggacttcgccacctactactgtcagcagagctggaacaccccttggacattcggccagggcaccaagctggaaatcaagagactcgaggacctgaagaacgtgttcccacctgaggtggccgtgttcgagcctagcgaggccgagatcagccacacccagaaagccaccctcgtgtgcctggctaccggcttctaccccgaccatgtggaactgtcttggtgggtcaacggcaaagaggtgcacagcggcgtgtctaccgacccccagccactgaaagaacagcccgccctgaacgacagccggtactgcctgagcagcagactgagagtgtccgccaccttctggcagaacccccggaaccacttcagatgccaggtgcagttctacggcctgagcgagaacgacgagtggacccaggacagagccaagcccgtgacccagatcgtgtctgccgaagcctggggcagagccgattgcggctttaccagcgagagctaccagcagggcgtgctgagcgccaccatcctgtacgagatcctgctgggcaaggccaccctgtacgccgtgctggtgtctgccctggtgctgatggctatggtcaagcggaaggacagccggggaagggccaagcgatctggatctggagcaacaaacttctcactactcaaacaagcaggtgacgtggaggagaatcccgggcctactagtatggactggatttggcgcatccttttccttgtcggcgctgctaccggcgcccattcccagctccagttgcaagagagcggccctggcttggtaaaaccttccgagacccttagcctcacatgcacggttagtgggggcagcatttcctcaggtgattactattggggatggattcggcaacccccgggtaaaggattggagtggattggtcatatttattatagtggagcgacgtactacaacccaagtctcaaatccagggttacaatatccgtcgatacgagcaggaaccaattcagcttgaaactttctagtgtcaccgcagcagacacagccgtctattactgtacgcgggatgactccagtaattggcggtcccgagggcaagggacactggtcacggtctcctcatctggaggcggtggaagcggtggaggaggatctgtggacaacaagttcaacaaagagcggtacagcgcctactacgagatttggcaactgcccaacctgaacgtgcggcagaaggccgccttcatcggatctctgcaggacgaccctagccagagcgccaatctgctggccgaggccaagaagctgaacgacgcccaggcccctaaaggatccggcggcggaggatctggcggaggcggatctgggggcggaggctctttcgaacaagttcagcttcaacagcctggcgctgagctggtcaaacctggcgcttctgtgaagatgagctgcaaagccagcggctacgccttcagcagctactggatcaactggatgaagcagaaacccggccagggactcgaatggatcggccaaatctatcccggcgacggcgacaccaactacaacggcaagttcaagggcagagccacactgaccgccgatacctctagcagcacagcctacatgcagctgagcagcctgaccagcgaagatagcgccgtgtacttctgtgcccggtccatcacaacagtcgtgggctgcgctatggactattggggccagggaacaagcgtgaccgtgtctagtacgcgtatccagaaccctgatcctgccgtgtaccagctgcgggatagcaagagcagcgacaagagcgtgtgtctgttcaccgacttcgacagccagaccaacgtgtcccagagcaaggactccgacgtgtacatcaccgataagaccgtgctggacatgcggagcatggacttcaagagcaactccgccgtggcctggtccaacaagtccgatttcgcctgcgccaacgccttcaacaacagcattatccccgaggacacattcttcccaagccccgagagcagctgcgacgtgaagctggtggaaaagagcttcgagacagacaccaacctgaacttccagaacctgagcgtgatcggcttcagaatcctgctgctgaaagtggccggctttaacctgctgatgaccctgcggctgtggtccagccgcgccaagagaagcggatctggcgtgaagcagaccctgaatttcgacctgctgaagctggctggcgacgtggaatccaacccaggcccttctagaggccatatgaccgagtacaagcccacggtgcgcctcgccacccgcgacgacgtccccagggccgtacgcaccctcgccgccgcgttcgccgactaccccgccacgcgccacaccgtcgatccggaccgccacatcgagcgggtcaccgagctgcaagaactcttcctcacgcgcgtcgggctcgacatcggcaaggtgtgggtcgcggacgacggcgccgcggtggcggtctggaccacgccggagagcgtcgaagcgggggcggtgttcgccgagatcggcccgcgcatggccgagttgagcggttcccggctggccgcgcagcaacagatggaaggcctcctggcgccgcaccggcccaaggagcccgcgtggttcctggccaccgtcggcgtctcgcccgaccaccagggcaagggtctgggcagcgccgtcgtgctccccggagtggaggcggccgagcgcgccggggtgcccgccttcctggagacctccgcgccccgcaacctccccttctacgagcggctcggcttcaccgtcaccgccgacgtcgaggtgcccgaaggaccgcgcacctggtgcatgacccgcaagcccggtgcctga

SEQ ID NO: 5908 - DNA, 3426 bp, Artificial Sequence
  Synthetic Polynucloetide
atggccttaccagtgaccgccttgctcctgccgctggccttgctgctccacgccgccaggccggacatccagatgacacagagccctagcagcctgtctgccagcgtgggagacagagtgaccatcacatgcaaggccagcgaccacatcaacaactggctggcctggtatcagcagaagcctggacaggcccctaagctgctgatctacggcgctaccacactggaaacaggcgtgcccagcagattttctggcagcggctctggcaccgactacaccctgacaatatccagcctccagcctgaggacttcgccacctactactgtcagcagagctggaacaccccttggacattcggccagggcaccaagctggaaatcaagagactcgaggacctgaagaacgtgttcccacctgaggtggccgtgttcgagcctagcgaggccgagatcagccacacccagaaagccaccctcgtgtgcctggctaccggcttctaccccgaccatgtggaactgtcttggtgggtcaacggcaaagaggtgcacagcggcgtgtctaccgacccccagccactgaaagaacagcccgccctgaacgacagccggtactgcctgagcagcagactgagagtgtccgccaccttctggcagaacccccggaaccacttcagatgccaggtgcagttctacggcctgagcgagaacgacgagtggacccaggacagagccaagcccgtgacccagatcgtgtctgccgaagcctggggcagagccgattgcggctttaccagcgagagctaccagcagggcgtgctgagcgccaccatcctgtacgagatcctgctgggcaaggccaccctgtacgccgtgctggtgtctgccctggtgctgatggctatggtcaagcggaaggacagccggggaagggccaagcgatctggatctggagcaacaaacttctcactactcaaacaagcaggtgacgtggaggagaatcccgggcctactagtatggactggatttggcgcatccttttccttgtcggcgctgctaccggcgcccattcccagctccagttgcaagagagcggccctggcttggtaaaaccttccgagacccttagcctcacatgcacggttagtgggggcagcatttcctcaggtgattactattggggatggattcggcaacccccgggtaaaggattggagtggattggtcatatttattatagtggagcgacgtactacaacccaagtctcaaatccagggttacaatatccgtcgatacgagcaggaaccaattcagcttgaaactttctagtgtcaccgcagcagacacagccgtctattactgtacgcgggatgactccagtaattggcggtcccgagggcaagggacactggtcacggtctcctcatctggaggcggtggaagcggtggaggaggatctgtggacaacaagttcaacaaagagcggtacagcgcctactacgagatttggcaactgcccaacctgaacgtgcggcagaaggccgccttcatcggatctctgcaggacgaccctagccagagcgccaatctgctggccgaggccaagaagctgaacgacgcccaggcccctaaaggatccggcggcggaggatctggcggaggcggatctgggggcggaggctctttcgaacaagttcagcttcaacagcctggcgctgagctggtcaaacctggcgcttctgtgaagatgagctgcaaagccagcggctacgccttcagcagctactggatcaactggatgaagcagaaacccggccagggactcgaatggatcggccaaatctatcccggcgacggcgacaccaactacaacggcaagttcaagggcagagccacactgaccgccgatacctctagcagcacagcctacatgcagctgagcagcctgaccagcgaagatagcgccgtgtacttctgtgcccggtccatcacaacagtcgtgggctgcgctatggactattggggccagggaacaagcgtgaccgtgtctagtacgcgtgagcagaaactgatctcggaagaggatgggagcggcaccccattcccttctctggcccctcccatcatgctgctggtggacggcaagcagcagatggtggtcgtgtgcctggtgctggatgtggccccacctggactggacagccccatctggtttagcgccggcaatggctctgccctggacgcctttacctacggcccaagccctgccaccgatggcacctggacaaatctggcccacctgagcctgcccagcgaggaactggcttcttgggagcctctcgtgtgccacacaggacctggcgctgagggacacagcagatccacccagcctatgcacctgtctggcgaggccagcaccgccagaacctgtcctcaggaacctctgagaggcacccctggcggagcactgtggctgggagtgctgagactgctgctgttcaagctgctgctgtttgacctgctgctgacctgctcctgtctgtgcgatcctgccggccctctgccttctcctgccaccaccacaagactgagagccctgggcagccacagactgcaccctgccacagagacaggcggcagagaggccacaagcagccctagaccccagcccagagacagaagatggggcgataccccccctggcagaaagcctggatctccagtccgcgccaagagaagcggatctggcgtgaagcagaccctgaatttcgacctgctgaagctggctggcgacgtggaatccaacccaggcccttctagaggccatatgaccgagtacaagcccacggtgcgcctcgccacccgcgacgacgtccccagggccgtacgcaccctcgccgccgcgttcgccgactaccccgccacgcgccacaccgtcgatccggaccgccacatcgagcgggtcaccgagctgcaagaactcttcctcacgcgcgtcgggctcgacatcggcaaggtgtgggtcgcggacgacggcgccgcggtggcggtctggaccacgccggagagcgtcgaagcgggggcggtgttcgccgagatcggcccgcgcatggccgagttgagcggttcccggctggccgcgcagcaacagatggaaggcctcctggcgccgcaccggcccaaggagcccgcgtggttcctggccaccgtcggcgtctcgcccgaccaccagggcaagggtctgggcagcgccgtcgtgctccccggagtggaggcggccgagcgcgccggggtgcccgccttcctggagacctccgcgccccgcaacctccccttctacgagcggctcggcttcaccgtcaccgccgacgtcgaggtgcccgaaggaccgcgcacctggtgcatgacccgcaagcccggtgcctga

SEQ ID NO: 5909 - DNA, 3291 bp, Artificial Sequence
  Synthetic Polynucloetide
atggccttaccagtgaccgccttgctcctgccgctggccttgctgctccacgccgccaggccggacatccagatgacacagagccctagcagcctgtctgccagcgtgggagacagagtgaccatcacatgcaaggccagcgaccacatcaacaactggctggcctggtatcagcagaagcctggacaggcccctaagctgctgatctacggcgctaccacactggaaacaggcgtgcccagcagattttctggcagcggctctggcaccgactacaccctgacaatatccagcctccagcctgaggacttcgccacctactactgtcagcagagctggaacaccccttggacattcggccagggcaccaagctggaaatcaagagactcgaggggaaaccaattcccaaccctcttctgggactggattcaaccggcagcggcgacaagcagctggacgccgacgtgtcccccaagcctaccatcttcctgccctctatcgccgagacaaagctccagaaggccggcacctacctgtgcctgctggaaaagttcttcccagatgtgattaagatccactggcaggaaaagaagtccaacaccatcctgggcagccaggaaggcaacaccatgaagaccaacgacacctacatgaagttcagctggctgaccgtgcccgagaagtccctggacaaagaacacagatgcatcgtgcggcacgaaaacaacaagaacggcgtggaccaggaaatcatcttcccacccatcaagaccgatgtgattacaatggaccccaaggacaactgctccaaggacgccaacgataccctgctgctccagctgaccaacaccagcgcctactacatgtacttgttgctgctgctgaagtccgtggtgtacttcgccatcatcacatgctgcctgctgcggagaaccgccttctgctgcaacggcgagaagtctagggccaagcgatctggatctggagcaacaaacttctcactactcaaacaagcaggtgacgtggaggagaatcccgggcctactagtatggactggatttggcgcatccttttccttgtcggcgctgctaccggcgcccattcccagctccagttgcaagagagcggccctggcttggtaaaaccttccgagacccttagcctcacatgcacggttagtgggggcagcatttcctcaggtgattactattggggatggattcggcaacccccgggtaaaggattggagtggattggtcatatttattatagtggagcgacgtactacaacccaagtctcaaatccagggttacaatatccgtcgatacgagcaggaaccaattcagcttgaaactttctagtgtcaccgcagcagacacagccgtctattactgtacgcgggatgactccagtaattggcggtcccgagggcaagggacactggtcacggtctcctcatctggaggcggtggaagcggtggaggaggatctgtggacaacaagttcaacaaagagcggtacagcgcctactacgagatttggcaactgcccaacctgaacgtgcggcagaaggccgccttcatcggatctctgcaggacgaccctagccagagcgccaatctgctggccgaggccaagaagctgaacgacgcccaggcccctaaaggatccggcggcggaggatctggcggaggcggatctgggggcggaggctctttcgaacaagttcagcttcaacagcctggcgctgagctggtcaaacctggcgcttctgtgaagatgagctgcaaagccagcggctacgccttcagcagctactggatcaactggatgaagcagaaacccggccagggactcgaatggatcggccaaatctatcccggcgacggcgacaccaactacaacggcaagttcaagggcagagccacactgaccgccgatacctctagcagcacagcctacatgcagctgagcagcctgaccagcgaagatagcgccgtgtacttctgtgcccggtccatcacaacagtcgtgggctgcgctatggactattggggccagggaacaagcgtgaccgtgtctagtacgcgtgagcagaaactgatctcggaagaggatgggagcggcagccagcctcacaccaagcccagcgtgttcgtgatgaagaacggcaccaacgtggcctgcctcgtgaaagagttctaccccaaggacatcaggatcaacctggtgtccagcaagaagatcaccgagttcgaccccgccatcgtgatctcccccagcggcaagtacaacgccgtgaagctggggaagtacgaggacagcaacagcgtgacctgctccgtgcagcacgacaacaagaccgtgcacagcaccgactttgaagtgaaaaccgactccaccgaccacgtgaagcccaaagagacagagaacaccaagcagcccagcaagagctgccacaagcccaaggccatcgtgcacaccgagaaagtgaacatgatgagcctgaccgtgctgggcctgcggatgctgttcgccaaaaccgtggccgtgaacttcctgctgaccgccaagctgttcttcctccgcgccaagagaagcggatctggcgtgaagcagaccctgaatttcgacctgctgaagctggctggcgacgtggaatccaacccaggcccttctagaggccatatgaccgagtacaagcccacggtgcgcctcgccacccgcgacgacgtccccagggccgtacgcaccctcgccgccgcgttcgccgactaccccgccacgcgccacaccgtcgatccggaccgccacatcgagcgggtcaccgagctgcaagaactcttcctcacgcgcgtcgggctcgacatcggcaaggtgtgggtcgcggacgacggcgccgcggtggcggtctggaccacgccggagagcgtcgaagcgggggcggtgttcgccgagatcggcccgcgcatggccgagttgagcggttcccggctggccgcgcagcaacagatggaaggcctcctggcgccgcaccggcccaaggagcccgcgtggttcctggccaccgtcggcgtctcgcccgaccaccagggcaagggtctgggcagcgccgtcgtgctccccggagtggaggcggccgagcgcgccggggtgcccgccttcctggagacctccgcgccccgcaacctccccttctacgagcggctcggcttcaccgtcaccgccgacgtcgaggtgcccgaaggaccgcgcacctggtgcatgacccgcaagcccggtgcctga

SEQ ID NO: 5910 - DNA, 2502 bp, Artificial Sequence
  Synthetic Polynucloetide
atggccttaccagtgaccgccttgctcctgccgctggccttgctgctccacgccgccaggccggacatccagatgacacagagccctagcagcctgtctgccagcgtgggagacagagtgaccatcacatgcaaggccagcgaccacatcaacaactggctggcctggtatcagcagaagcctggacaggcccctaagctgctgatctacggcgctaccacactggaaacaggcgtgcccagcagattttctggcagcggctctggcaccgactacaccctgacaatatccagcctccagcctgaggacttcgccacctactactgtcagcagagctggaacaccccttggacattcggccagggcaccaagctggaaatcaagagactcgagagccagcctcacaccaagcccagcgtgttcgtgatgaagaacggcaccaacgtggcctgcctcgtgaaagagttctaccccaaggacatcaggatcaacctggtgtccagcaagaagatcaccgagttcgaccccgccatcgtgatctcccccagcggcaagtacaacgccgtgaagctggggaagtacgaggacagcaacagcgtgacctgctccgtgcagcacgacaacaagaccgtgcacagcaccgactttgaagtgaaaaccgactccaccgaccacgtgaagcccaaagagacagagaacaccaagcagcccagcaagagctgccacaagcccaaggccatcgtgcacaccgagaaagtgaacatgatgagcctgaccgtgctgggcctgcggatgctgttcgccaaaaccgtggccgtgaacttcctgctgaccgccaagctgttcttcctcagggccaagcgatctggatctggagcaacaaacttctcactactcaaacaagcaggtgacgtggaggagaatcccgggcctactagtatggactggatttggcgcatccttttccttgtcggcgctgctaccggcgcccattcccagctccagttgcaagagagcggccctggcttggtaaaaccttccgagacccttagcctcacatgcacggttagtgggggcagcatttcctcaggtgattactattggggatggattcggcaacccccgggtaaaggattggagtggattggtcatatttattatagtggagcgacgtactacaacccaagtctcaaatccagggttacaatatccgtcgatacgagcaggaaccaattcagcttgaaactttctagtgtcaccgcagcagacacagccgtctattactgtacgcgggatgactccagtaattggcggtcccgagggcaagggacactggtcacggtctcctcatctggaggcggtggaagcggtggaggaggatctgtggacaacaagttcaacaaagagcggtacagcgcctactacgagatttggcaactgcccaacctgaacgtgcggcagaaggccgccttcatcggatctctgcaggacgaccctagccagagcgccaatctgctggccgaggccaagaagctgaacgacgcccaggcccctaaaggatccggcggcggaggatctggcggaggcggatctgggggcggaggctctttcgaacaagttcagcttcaacagcctggcgctgagctggtcaaacctggcgcttctgtgaagatgagctgcaaagccagcggctacgccttcagcagctactggatcaactggatgaagcagaaacccggccagggactcgaatggatcggccaaatctatcccggcgacggcgacaccaactacaacggcaagttcaagggcagagccacactgaccgccgatacctctagcagcacagcctacatgcagctgagcagcctgaccagcgaagatagcgccgtgtacttctgtgcccggtccatcacaacagtcgtgggctgcgctatggactattggggccagggaacaagcgtgaccgtgtctagtacgcgtgacaagcagctggacgccgacgtgtcccccaagcctaccatcttcctgccctctatcgccgagacaaagctccagaaggccggcacctacctgtgcctgctggaaaagttcttcccagatgtgattaagatccactggcaggaaaagaagtccaacaccatcctgggcagccaggaaggcaacaccatgaagaccaacgacacctacatgaagttcagctggctgaccgtgcccgagaagtccctggacaaagaacacagatgcatcgtgcggcacgaaaacaacaagaacggcgtggaccaggaaatcatcttcccacccatcaagaccgatgtgattacaatggaccccaaggacaactgctccaaggacgccaacgataccctgctgctccagctgaccaacaccagcgcctactacatgtacttgttgctgctgctgaagtccgtggtgtacttcgccatcatcacatgctgcctgctgcggagaaccgccttctgctgcaacggcgagaagtct

SEQ ID NO: 5911 - DNA, 3711 bp, Artificial Sequence
  Synthetic Polynucloetide
atggccttaccagtgaccgccttgctcctgccgctggccttgctgctccacgccgccaggccggacatccagatgacacagagccctagcagcctgtctgccagcgtgggagacagagtgaccatcacatgcaaggccagcgaccacatcaacaactggctggcctggtatcagcagaagcctggacaggcccctaagctgctgatctacggcgctaccacactggaaacaggcgtgcccagcagattttctggcagcggctctggcaccgactacaccctgacaatatccagcctccagcctgaggacttcgccacctactactgtcagcagagctggaacaccccttggacattcggccagggcaccaagctggaaatcaagagaggacagcctaaggccaatcctaccgtgacactgttccctccaagcagcgaagaactccaggccaacaaggccacacttgtgtgcctgatctccgacttctaccctggggctgtgacagtggcttggaaggccgatggatctcctgtgaaagccggcgtggaaaccaccaagccatccaagcagagcaacaacaaatacgccgccagctcctacctgagcctgacacctgagcagtggaagtcccacagatcctacagctgccaagtgacccacgaaggcagcaccgtggaaaagacagtggcccctacagagtgcagcggatcccagagcttcggcctgctggaccccaagctgtgctacctgctggatggcatcctgttcatctacggcgtgatcctgaccgccctgttcctgagagtgaagttcagcagaagcgccgacgcccctgcctaccagcagggacagaaccaactgtacaacgagctgaacctgggcagacgggaagagtacgacgtgctggacaagcggagaggcagggaccctgagatgggcggaaagccccagcggagaaagaacccccaggaaggactgtataacgaactccagaaagacaagatggccgaagcctacagcgagatcggcatgaagggcgagcggagaagaggcaagggccacgatggcctgtaccagggcctgagcaccgccaccaaggacacctatgacgccctgcacatgcaggccctgcctccaagaagggccaagcgatctggatctggagcaacaaacttctcactactcaaacaagcaggtgacgtggaggagaatcccgggcctactagtatggactggatttggcgcatccttttccttgtcggcgctgctaccggcgcccattcccagctccagttgcaagagagcggccctggcttggtaaaaccttccgagacccttagcctcacatgcacggttagtgggggcagcatttcctcaggtgattactattggggatggattcggcaacccccgggtaaaggattggagtggattggtcatatttattatagtggagcgacgtactacaacccaagtctcaaatccagggttacaatatccgtcgatacgagcaggaaccaattcagcttgaaactttctagtgtcaccgcagcagacacagccgtctattactgtacgcgggatgactccagtaattggcggtcccgagggcaagggacactggtcacggtctcctcatctggaggcggtggaagcggtggaggaggatctgtggacaacaagttcaacaaagagcggtacagcgcctactacgagatttggcaactgcccaacctgaacgtgcggcagaaggccgccttcatcggatctctgcaggacgaccctagccagagcgccaatctgctggccgaggccaagaagctgaacgacgcccaggcccctaaaggatccggcggcggaggatctggcggaggcggatctgggggcggaggctctttcgaacaagttcagcttcaacagcctggcgctgagctggtcaaacctggcgcttctgtgaagatgagctgcaaagccagcggctacgccttcagcagctactggatcaactggatgaagcagaaacccggccagggactcgaatggatcggccaaatctatcccggcgacggcgacaccaactacaacggcaagttcaagggcagagccacactgaccgccgatacctctagcagcacagcctacatgcagctgagcagcctgaccagcgaagatagcgccgtgtacttctgtgcccggtccatcacaacagtcgtgggctgcgctatggactattggggccagggaacaagcgtgaccgtgtctagtgcctctacaaagggaccctccgtgtttcctctggctcccagcagcaagtctacaagcggaggaacagccgctctgggctgcctggtcaaggattactttcccgagcctgtgaccgtgtcctggaatagcggagcactgacaagcggcgtgcacacctttccagccgtgctgcaaagcagcggcctgtactctctgagcagcgtggtcacagtgcctagctctagcctgggcacccagacctacatctgcaatgtgaaccacaagcctagcaacaccaaggtggacaagagagtggaacccaagagctgtggtacccagagttttgggttgttggaccctaaattgtgctatctgttggacggaatcctgttcatttacggagtgatcctgaccgcattgttcctgcgggttaagttttccagatccgcagacgcacccgcttaccaacaagggcagaaccaactctacaatgaacttaatttggggcggagggaagagtacgacgttctggacaaaaggaggggacgagatcccgagatgggcggaaagcctcagcgaaggaagaatccgcaagaggggctttataacgaactccagaaagataaaatggcagaagcctatagtgagattgggatgaagggagaaaggaggaggggtaaaggtcacgatgggttgtaccaaggattgagcacagccactaaagatacctatgatgcgctccacatgcaggccctgccgccaagacgcgccaagagaagcggatctggcgtgaagcagaccctgaatttcgacctgctgaagctggctggcgacgtggaatccaacccaggcccttctagaggccatatgaccgagtacaagcccacggtgcgcctcgccacccgcgacgacgtccccagggccgtacgcaccctcgccgccgcgttcgccgactaccccgccacgcgccacaccgtcgatccggaccgccacatcgagcgggtcaccgagctgcaagaactcttcctcacgcgcgtcgggctcgacatcggcaaggtgtgggtcgcggacgacggcgccgcggtggcggtctggaccacgccggagagcgtcgaagcgggggcggtgttcgccgagatcggcccgcgcatggccgagttgagcggttcccggctggccgcgcagcaacagatggaaggcctcctggcgccgcaccggcccaaggagcccgcgtggttcctggccaccgtcggcgtctcgcccgaccaccagggcaagggtctgggcagcgccgtcgtgctccccggagtggaggcggccgagcgcgccggggtgcccgccttcctggagacctccgcgccccgcaacctccccttctacgagcggctcggcttcaccgtcaccgccgacgtcgaggtgcccgaaggaccgcgcacctggtgcatgacccgcaagcccggtgcctga

SEQ ID NO: 5912 - DNA, 3066 bp, Artificial Sequence
  Synthetic Polynucloetide
atggccttaccagtgaccgccttgctcctgccgctggccttgctgctccacgccgccaggccggacatccagatgacacagagccctagcagcctgtctgccagcgtgggagacagagtgaccatcacatgcaaggccagcgaccacatcaacaactggctggcctggtatcagcagaagcctggacaggcccctaagctgctgatctacggcgctaccacactggaaacaggcgtgcccagcagattttctggcagcggctctggcaccgactacaccctgacaatatccagcctccagcctgaggacttcgccacctactactgtcagcagagctggaacaccccttggacattcggccagggcaccaagctggaaatcaagagactcgaggacctgaagaacgtgttcccacctgaggtggccgtgttcgagcctagcgaggccgagatcagccacacccagaaagccaccctcgtgtgcctggctaccggcttctaccccgaccatgtggaactgtcttggtgggtcaacggcaaagaggtgcacagcggcgtgtctaccgacccccagccactgaaagaacagcccgccctgaacgacagccggtactgcctgagcagcagactgagagtgtccgccaccttctggcagaacccccggaaccacttcagatgccaggtgcagttctacggcctgagcgagaacgacgagtggacccaggacagagccaagcccgtgacccagatcgtgtctgccgaagcctggggcagagccgattgcggatcccagagcttcggcctgctggaccccaagctgtgctacctgctggatggcatcctgttcatctacggcgtgatcctgaccgccctgttcctgagagtgaagttcagcagaagcgccgacgcccctgcctaccagcagggacagaaccaactgtacaacgagctgaacctgggcagacgggaagagtacgacgtgctggacaagcggagaggcagggaccctgagatgggcggaaagccccagcggagaaagaacccccaggaaggactgtataacgaactccagaaagacaagatggccgaagcctacagcgagatcggcatgaagggcgagcggagaagaggcaagggccacgatggcctgtaccagggcctgagcaccgccaccaaggacacctatgacgccctgcacatgcaggccctgcctccaagaagggccaagcgatctggatctggagcaacaaacttctcactactcaaacaagcaggtgacgtggaggagaatcccgggcctactagtatggactggatttggcgcatccttttccttgtcggcgctgctaccggcgcccattcccagctccagttgcaagagagcggccctggcttggtaaaaccttccgagacccttagcctcacatgcacggttagtgggggcagcatttcctcaggtgattactattggggatggattcggcaacccccgggtaaaggattggagtggattggtcatatttattatagtggagcgacgtactacaacccaagtctcaaatccagggttacaatatccgtcgatacgagcaggaaccaattcagcttgaaactttctagtgtcaccgcagcagacacagccgtctattactgtacgcgggatgactccagtaattggcggtcccgagggcaagggacactggtcacggtctcctcatctggaggcggtggaagcggtggaggaggatctgtggacaacaagttcaacaaagagcggtacagcgcctactacgagatttggcaactgcccaacctgaacgtgcggcagaaggccgccttcatcggatctctgcaggacgaccctagccagagcgccaatctgctggccgaggccaagaagctgaacgacgcccaggcccctaaaggatccggcggcggaggatctggcggaggcggatctgggggcggaggctctttcgaacaagttcagcttcaacagcctggcgctgagctggtcaaacctggcgcttctgtgaagatgagctgcaaagccagcggctacgccttcagcagctactggatcaactggatgaagcagaaacccggccagggactcgaatggatcggccaaatctatcccggcgacggcgacaccaactacaacggcaagttcaagggcagagccacactgaccgccgatacctctagcagcacagcctacatgcagctgagcagcctgaccagcgaagatagcgccgtgtacttctgtgcccggtccatcacaacagtcgtgggctgcgctatggactattggggccagggaacaagcgtgaccgtgtctagtacgcgtatccagaaccctgatcctgccgtgtaccagctgcgggatagcaagagcagcgacaagagcgtgtgtctgttcaccgacttcgacagccagaccaacgtgtcccagagcaaggactccgacgtgtacatcaccgataagaccgtgctggacatgcggagcatggacttcaagagcaactccgccgtggcctggtccaacaagtccgatttcgcctgcgccaacgccttcaacaacagcattatccccgaggacacattcttcccaagccccgagagcagctgcggtacccagagttttgggttgttggaccctaaattgtgctatctgttggacggaatcctgttcatttacggagtgatcctgaccgcattgttcctgcgggttaagttttccagatccgcagacgcacccgcttaccaacaagggcagaaccaactctacaatgaacttaatttggggcggagggaagagtacgacgttctggacaaaaggaggggacgagatcccgagatgggcggaaagcctcagcgaaggaagaatccgcaagaggggctttataacgaactccagaaagataaaatggcagaagcctatagtgagattgggatgaagggagaaaggaggaggggtaaaggtcacgatgggttgtaccaaggattgagcacagccactaaagatacctatgatgcgctccacatgcaggccctgccgccaaga

SEQ ID NO: 5913 - DNA, 3066 bp, Artificial Sequence
  Synthetic Polynucloetide
atggccttaccagtgaccgccttgctcctgccgctggccttgctgctccacgccgccaggccggacatccagatgacacagagccctagcagcctgtctgccagcgtgggagacagagtgaccatcacatgcaaggccagcgaccacatcaacaactggctggcctggtatcagcagaagcctggacaggcccctaagctgctgatctacggcgctaccacactggaaacaggcgtgcccagcagattttctggcagcggctctggcaccgactacaccctgacaatatccagcctccagcctgaggacttcgccacctactactgtcagcagagctggaacaccccttggacattcggccagggcaccaagctggaaatcaagagactcgaggacctgaagaacgtgttcccacctgaggtggccgtgttcgagcctagcaaggccgagatcgcccacacccagaaagccaccctcgtgtgcctggctaccggcttctaccccgaccatgtggaactgtcttggtgggtcaacggcaaagaggtgcacagcggcgtgtgtaccgacccccagccactgaaagaacagcccgccctgaacgacagccggtactgcctgagcagcagactgagagtgtccgccaccttctggcagaacccccggaaccacttcagatgccaggtgcagttctacggcctgagcgagaacgacgagtggacccaggacagagccaagcccgtgacccagatcgtgtctgccgaagcctggggcagagccgattgcggatcccagagcttcggcctgctggaccccaagctgtgctacctgctggatggcatcctgttcatctacggcgtgatcctgaccgccctgttcctgagagtgaagttcagcagaagcgccgacgcccctgcctaccagcagggacagaaccaactgtacaacgagctgaacctgggcagacgggaagagtacgacgtgctggacaagcggagaggcagggaccctgagatgggcggaaagccccagcggagaaagaacccccaggaaggactgtataacgaactccagaaagacaagatggccgaagcctacagcgagatcggcatgaagggcgagcggagaagaggcaagggccacgatggcctgtaccagggcctgagcaccgccaccaaggacacctatgacgccctgcacatgcaggccctgcctccaagaagggccaagcgatctggatctggagcaacaaacttctcactactcaaacaagcaggtgacgtggaggagaatcccgggcctactagtatggactggatttggcgcatccttttccttgtcggcgctgctaccggcgcccattcccagctccagttgcaagagagcggccctggcttggtaaaaccttccgagacccttagcctcacatgcacggttagtgggggcagcatttcctcaggtgattactattggggatggattcggcaacccccgggtaaaggattggagtggattggtcatatttattatagtggagcgacgtactacaacccaagtctcaaatccagggttacaatatccgtcgatacgagcaggaaccaattcagcttgaaactttctagtgtcaccgcagcagacacagccgtctattactgtacgcgggatgactccagtaattggcggtcccgagggcaagggacactggtcacggtctcctcatctggaggcggtggaagcggtggaggaggatctgtggacaacaagttcaacaaagagcggtacagcgcctactacgagatttggcaactgcccaacctgaacgtgcggcagaaggccgccttcatcggatctctgcaggacgaccctagccagagcgccaatctgctggccgaggccaagaagctgaacgacgcccaggcccctaaaggatccggcggcggaggatctggcggaggcggatctgggggcggaggctctttcgaacaagttcagcttcaacagcctggcgctgagctggtcaaacctggcgcttctgtgaagatgagctgcaaagccagcggctacgccttcagcagctactggatcaactggatgaagcagaaacccggccagggactcgaatggatcggccaaatctatcccggcgacggcgacaccaactacaacggcaagttcaagggcagagccacactgaccgccgatacctctagcagcacagcctacatgcagctgagcagcctgaccagcgaagatagcgccgtgtacttctgtgcccggtccatcacaacagtcgtgggctgcgctatggactattggggccagggaacaagcgtgaccgtgtctagtacgcgtatccagaaccctgatcctgccgtgtaccagctgcgggatagcaagagcagcgacaagagcgtgtgtctgttcaccgacttcgacagccagaccaacgtgtcccagagcaaggactccgacgtgtacatcaccgataagtgcgtgctggacatgcggagcatggacttcaagagcaactccgccgtggcctggtccaacaagtccgatttcgcctgcgccaacgccttcaacaacagcattatccccgaggacacattcttcccaagcagcgacgtgccctgcggtacccagagttttgggttgttggaccctaaattgtgctatctgttggacggaatcctgttcatttacggagtgatcctgaccgcattgttcctgcgggttaagttttccagatccgcagacgcacccgcttaccaacaagggcagaaccaactctacaatgaacttaatttggggcggagggaagagtacgacgttctggacaaaaggaggggacgagatcccgagatgggcggaaagcctcagcgaaggaagaatccgcaagaggggctttataacgaactccagaaagataaaatggcagaagcctatagtgagattgggatgaagggagaaaggaggaggggtaaaggtcacgatgggttgtaccaaggattgagcacagccactaaagatacctatgatgcgctccacatgcaggccctgccgccaaga

SEQ ID NO: 5914 - DNA, 3279 bp, Artificial Sequence
  Synthetic Polynucloetide
atggccttaccagtgaccgccttgctcctgccgctggccttgctgctccacgccgccaggccggacatccagatgacacagagccctagcagcctgtctgccagcgtgggagacagagtgaccatcacatgcaaggccagcgaccacatcaacaactggctggcctggtatcagcagaagcctggacaggcccctaagctgctgatctacggcgctaccacactggaaacaggcgtgcccagcagattttctggcagcggctctggcaccgactacaccctgacaatatccagcctccagcctgaggacttcgccacctactactgtcagcagagctggaacaccccttggacattcggccagggcaccaagctggaaatcaagagactcgaggggaaaccaattcccaaccctcttctgggactggattcaaccggcagcggcgaggacctgaagaacgtgttcccacctgaggtggccgtgttcgagcctagcgaggccgagatcagccacacccagaaagccaccctcgtgtgcctggctaccggcttctaccccgaccatgtggaactgtcttggtgggtcaacggcaaagaggtgcacagcggcgtgtctaccgacccccagccactgaaagaacagcccgccctgaacgacagccggtactgcctgagcagcagactgagagtgtccgccaccttctggcagaacccccggaaccacttcagatgccaggtgcagttctacggcctgagcgagaacgacgagtggacccaggacagagccaagcccgtgacccagatcgtgtctgccgaagcctggggcagagccgattgcggatcccagagcttcggcctgctggaccccaagctgtgctacctgctggatggcatcctgttcatctacggcgtgatcctgaccgccctgttcctgagagtgaagttcagcagaagcgccgacgcccctgcctaccagcagggacagaaccaactgtacaacgagctgaacctgggcagacgggaagagtacgacgtgctggacaagcggagaggcagggaccctgagatgggcggaaagccccagcggagaaagaacccccaggaaggactgtataacgaactccagaaagacaagatggccgaagcctacagcgagatcggcatgaagggcgagcggagaagaggcaagggccacgatggcctgtaccagggcctgagcaccgccaccaaggacacctatgacgccctgcacatgcaggccctgcctccaagaagggccaagcgatctggatctggagcaacaaacttctcactactcaaacaagcaggtgacgtggaggagaatcccgggcctactagtatggactggatttggcgcatccttttccttgtcggcgctgctaccggcgcccattcccagctccagttgcaagagagcggccctggcttggtaaaaccttccgagacccttagcctcacatgcacggttagtgggggcagcatttcctcaggtgattactattggggatggattcggcaacccccgggtaaaggattggagtggattggtcatatttattatagtggagcgacgtactacaacccaagtctcaaatccagggttacaatatccgtcgatacgagcaggaaccaattcagcttgaaactttctagtgtcaccgcagcagacacagccgtctattactgtacgcgggatgactccagtaattggcggtcccgagggcaagggacactggtcacggtctcctcatctggaggcggtggaagcggtggaggaggatctgtggacaacaagttcaacaaagagcggtacagcgcctactacgagatttggcaactgcccaacctgaacgtgcggcagaaggccgccttcatcggatctctgcaggacgaccctagccagagcgccaatctgctggccgaggccaagaagctgaacgacgcccaggcccctaaaggatccggcggcggaggatctggcggaggcggatctgggggcggaggctctttcgaacaagttcagcttcaacagcctggcgctgagctggtcaaacctggcgcttctgtgaagatgagctgcaaagccagcggctacgccttcagcagctactggatcaactggatgaagcagaaacccggccagggactcgaatggatcggccaaatctatcccggcgacggcgacaccaactacaacggcaagttcaagggcagagccacactgaccgccgatacctctagcagcacagcctacatgcagctgagcagcctgaccagcgaagatagcgccgtgtacttctgtgcccggtccatcacaacagtcgtgggctgcgctatggactattggggccagggaacaagcgtgaccgtgtctagtacgcgtgagcagaaactgatctcggaagaggatgggagcggcatccagaaccctgatcctgccgtgtaccagctgcgggatagcaagagcagcgacaagagcgtgtgtctgttcaccgacttcgacagccagaccaacgtgtcccagagcaaggactccgacgtgtacatcaccgataagaccgtgctggacatgcggagcatggacttcaagagcaactccgccgtggcctggtccaacaagtccgatttcgcctgcgccaacgccttcaacaacagcattatccccgaggacacattcttcccaagccccgagagcagctgcggtacccagagttttgggttgttggaccctaaattgtgctatctgttggacggaatcctgttcatttacggagtgatcctgaccgcattgttcctgaggagcaagcggtcacggctgctccacagcgattacatgaatatgacaccacgaagaccgggtcctactcgcaaacactaccaaccctacgcacctccccgcgactttgcagcgtaccgatctcgggttaagttttccagatccgcagacgcacccgcttaccaacaagggcagaaccaactctacaatgaacttaatttggggcggagggaagagtacgacgttctggacaaaaggaggggacgagatcccgagatgggcggaaagcctcagcgaaggaagaatccgcaagaggggctttataacgaactccagaaagataaaatggcagaagcctatagtgagattgggatgaagggagaaaggaggaggggtaaaggtcacgatgggttgtaccaaggattgagcacagccactaaagatacctatgatgcgctccacatgcaggccctgccgccaaga

SEQ ID NO: 5915 - DNA, 3402 bp, Artificial Sequence
  Synthetic Polynucloetide
atggccttaccagtgaccgccttgctcctgccgctggccttgctgctccacgccgccaggccggacatccagatgacacagagccctagcagcctgtctgccagcgtgggagacagagtgaccatcacatgcaaggccagcgaccacatcaacaactggctggcctggtatcagcagaagcctggacaggcccctaagctgctgatctacggcgctaccacactggaaacaggcgtgcccagcagattttctggcagcggctctggcaccgactacaccctgacaatatccagcctccagcctgaggacttcgccacctactactgtcagcagagctggaacaccccttggacattcggccagggcaccaagctggaaatcaagagactcgaggggaaaccaattcccaaccctcttctgggactggattcaaccggcagcggcgaggacctgaagaacgtgttcccacctgaggtggccgtgttcgagcctagcgaggccgagatcagccacacccagaaagccaccctcgtgtgcctggctaccggcttctaccccgaccatgtggaactgtcttggtgggtcaacggcaaagaggtgcacagcggcgtgtctaccgacccccagccactgaaagaacagcccgccctgaacgacagccggtactgcctgagcagcagactgagagtgtccgccaccttctggcagaacccccggaaccacttcagatgccaggtgcagttctacggcctgagcgagaacgacgagtggacccaggacagagccaagcccgtgacccagatcgtgtctgccgaagcctggggcagagccgattgcggatcccagagcttcggcctgctggaccccaagctgtgctacctgctggatggcatcctgttcatctacggcgtgatcctgaccgccctgttcctgaggagtaagaggagcaggctcctgcacagtgactacatgaacatgactccacgccgccccggacccacccgcaagcattaccagccctatgccccaccacgcgacttcgcagcctatcgctccagagtgaagttcagcagaagcgccgacgcccctgcctaccagcagggacagaaccaactgtacaacgagctgaacctgggcagacgggaagagtacgacgtgctggacaagcggagaggcagggaccctgagatgggcggaaagccccagcggagaaagaacccccaggaaggactgtataacgaactccagaaagacaagatggccgaagcctacagcgagatcggcatgaagggcgagcggagaagaggcaagggccacgatggcctgtaccagggcctgagcaccgccaccaaggacacctatgacgccctgcacatgcaggccctgcctccaagaagggccaagcgatctggatctggagcaacaaacttctcactactcaaacaagcaggtgacgtggaggagaatcccgggcctactagtatggactggatttggcgcatccttttccttgtcggcgctgctaccggcgcccattcccagctccagttgcaagagagcggccctggcttggtaaaaccttccgagacccttagcctcacatgcacggttagtgggggcagcatttcctcaggtgattactattggggatggattcggcaacccccgggtaaaggattggagtggattggtcatatttattatagtggagcgacgtactacaacccaagtctcaaatccagggttacaatatccgtcgatacgagcaggaaccaattcagcttgaaactttctagtgtcaccgcagcagacacagccgtctattactgtacgcgggatgactccagtaattggcggtcccgagggcaagggacactggtcacggtctcctcatctggaggcggtggaagcggtggaggaggatctgtggacaacaagttcaacaaagagcggtacagcgcctactacgagatttggcaactgcccaacctgaacgtgcggcagaaggccgccttcatcggatctctgcaggacgaccctagccagagcgccaatctgctggccgaggccaagaagctgaacgacgcccaggcccctaaaggatccggcggcggaggatctggcggaggcggatctgggggcggaggctctttcgaacaagttcagcttcaacagcctggcgctgagctggtcaaacctggcgcttctgtgaagatgagctgcaaagccagcggctacgccttcagcagctactggatcaactggatgaagcagaaacccggccagggactcgaatggatcggccaaatctatcccggcgacggcgacaccaactacaacggcaagttcaagggcagagccacactgaccgccgatacctctagcagcacagcctacatgcagctgagcagcctgaccagcgaagatagcgccgtgtacttctgtgcccggtccatcacaacagtcgtgggctgcgctatggactattggggccagggaacaagcgtgaccgtgtctagtacgcgtgagcagaaactgatctcggaagaggatgggagcggcatccagaaccctgatcctgccgtgtaccagctgcgggatagcaagagcagcgacaagagcgtgtgtctgttcaccgacttcgacagccagaccaacgtgtcccagagcaaggactccgacgtgtacatcaccgataagaccgtgctggacatgcggagcatggacttcaagagcaactccgccgtggcctggtccaacaagtccgatttcgcctgcgccaacgccttcaacaacagcattatccccgaggacacattcttcccaagccccgagagcagctgcggtacccagagttttgggttgttggaccctaaattgtgctatctgttggacggaatcctgttcatttacggagtgatcctgaccgcattgttcctgaggagcaagcggtcacggctgctccacagcgattacatgaatatgacaccacgaagaccgggtcctactcgcaaacactaccaaccctacgcacctccccgcgactttgcagcgtaccgatctcgggttaagttttccagatccgcagacgcacccgcttaccaacaagggcagaaccaactctacaatgaacttaatttggggcggagggaagagtacgacgttctggacaaaaggaggggacgagatcccgagatgggcggaaagcctcagcgaaggaagaatccgcaagaggggctttataacgaactccagaaagataaaatggcagaagcctatagtgagattgggatgaagggagaaaggaggaggggtaaaggtcacgatgggttgtaccaaggattgagcacagccactaaagatacctatgatgcgctccacatgcaggccctgccgccaaga

SEQ ID NO: 5916 - DNA, 3285 bp, Artificial Sequence
  Synthetic Polynucloetide
atggccttaccagtgaccgccttgctcctgccgctggccttgctgctccacgccgccaggccggacatccagatgacacagagccctagcagcctgtctgccagcgtgggagacagagtgaccatcacatgcaaggccagcgaccacatcaacaactggctggcctggtatcagcagaagcctggacaggcccctaagctgctgatctacggcgctaccacactggaaacaggcgtgcccagcagattttctggcagcggctctggcaccgactacaccctgacaatatccagcctccagcctgaggacttcgccacctactactgtcagcagagctggaacaccccttggacattcggccagggcaccaagctggaaatcaagagactcgaggggaaaccaattcccaaccctcttctgggactggattcaaccggcagcggcgaggacctgaagaacgtgttcccacctgaggtggccgtgttcgagcctagcgaggccgagatcagccacacccagaaagccaccctcgtgtgcctggctaccggcttctaccccgaccatgtggaactgtcttggtgggtcaacggcaaagaggtgcacagcggcgtgtctaccgacccccagccactgaaagaacagcccgccctgaacgacagccggtactgcctgagcagcagactgagagtgtccgccaccttctggcagaacccccggaaccacttcagatgccaggtgcagttctacggcctgagcgagaacgacgagtggacccaggacagagccaagcccgtgacccagatcgtgtctgccgaagcctggggcagagccgattgcggatcccagagcttcggcctgctggaccccaagctgtgctacctgctggatggcatcctgttcatctacggcgtgatcctgaccgccctgttcctgagagtgaagttcagcagaagcgccgacgcccctgcctaccagcagggacagaaccaactgtacaacgagctgaacctgggcagacgggaagagtacgacgtgctggacaagcggagaggcagggaccctgagatgggcggaaagccccagcggagaaagaacccccaggaaggactgtataacgaactccagaaagacaagatggccgaagcctacagcgagatcggcatgaagggcgagcggagaagaggcaagggccacgatggcctgtaccagggcctgagcaccgccaccaaggacacctatgacgccctgcacatgcaggccctgcctccaagaagggccaagcgatctggatctggagcaacaaacttctcactactcaaacaagcaggtgacgtggaggagaatcccgggcctactagtatggactggatttggcgcatccttttccttgtcggcgctgctaccggcgcccattcccagctccagttgcaagagagcggccctggcttggtaaaaccttccgagacccttagcctcacatgcacggttagtgggggcagcatttcctcaggtgattactattggggatggattcggcaacccccgggtaaaggattggagtggattggtcatatttattatagtggagcgacgtactacaacccaagtctcaaatccagggttacaatatccgtcgatacgagcaggaaccaattcagcttgaaactttctagtgtcaccgcagcagacacagccgtctattactgtacgcgggatgactccagtaattggcggtcccgagggcaagggacactggtcacggtctcctcatctggaggcggtggaagcggtggaggaggatctgtggacaacaagttcaacaaagagcggtacagcgcctactacgagatttggcaactgcccaacctgaacgtgcggcagaaggccgccttcatcggatctctgcaggacgaccctagccagagcgccaatctgctggccgaggccaagaagctgaacgacgcccaggcccctaaaggatccggcggcggaggatctggcggaggcggatctgggggcggaggctctttcgaacaagttcagcttcaacagcctggcgctgagctggtcaaacctggcgcttctgtgaagatgagctgcaaagccagcggctacgccttcagcagctactggatcaactggatgaagcagaaacccggccagggactcgaatggatcggccaaatctatcccggcgacggcgacaccaactacaacggcaagttcaagggcagagccacactgaccgccgatacctctagcagcacagcctacatgcagctgagcagcctgaccagcgaagatagcgccgtgtacttctgtgcccggtccatcacaacagtcgtgggctgcgctatggactattggggccagggaacaagcgtgaccgtgtctagtacgcgtgagcagaaactgatctcggaagaggatctggggagcggcatccagaaccctgatcctgccgtgtaccagctgcgggatagcaagagcagcgacaagagcgtgtgtctgttcaccgacttcgacagccagaccaacgtgtcccagagcaaggactccgacgtgtacatcaccgataagaccgtgctggacatgcggagcatggacttcaagagcaactccgccgtggcctggtccaacaagtccgatttcgcctgcgccaacgccttcaacaacagcattatccccgaggacacattcttcccaagccccgagagcagctgcggtacccagagttttgggttgttggaccctaaattgtgctatctgttggacggaatcctgttcatttacggagtgatcctgaccgcattgttcctgaagagaggccggaagaagctgctgtacatcttcaagcagcctttcatgcggcccgtgcagaccacccaggaagaggacggctgctcctgccggttccccgaggaagaagaaggcggctgcgagctgcgggttaagttttccagatccgcagacgcacccgcttaccaacaagggcagaaccaactctacaatgaacttaatttggggcggagggaagagtacgacgttctggacaaaaggaggggacgagatcccgagatgggcggaaagcctcagcgaaggaagaatccgcaagaggggctttataacgaactccagaaagataaaatggcagaagcctatagtgagattgggatgaagggagaaaggaggaggggtaaaggtcacgatgggttgtaccaaggattgagcacagccactaaagatacctatgatgcgctccacatgcaggccctgccgccaaga

SEQ ID NO: 5917 - DNA, 3411 bp, Artificial Sequence
  Synthetic Polynucloetide
atggccttaccagtgaccgccttgctcctgccgctggccttgctgctccacgccgccaggccggacatccagatgacacagagccctagcagcctgtctgccagcgtgggagacagagtgaccatcacatgcaaggccagcgaccacatcaacaactggctggcctggtatcagcagaagcctggacaggcccctaagctgctgatctacggcgctaccacactggaaacaggcgtgcccagcagattttctggcagcggctctggcaccgactacaccctgacaatatccagcctccagcctgaggacttcgccacctactactgtcagcagagctggaacaccccttggacattcggccagggcaccaagctggaaatcaagagactcgaggggaaaccaattcccaaccctcttctgggactggattcaaccggcagcggcgaggacctgaagaacgtgttcccacctgaggtggccgtgttcgagcctagcgaggccgagatcagccacacccagaaagccaccctcgtgtgcctggctaccggcttctaccccgaccatgtggaactgtcttggtgggtcaacggcaaagaggtgcacagcggcgtgtctaccgacccccagccactgaaagaacagcccgccctgaacgacagccggtactgcctgagcagcagactgagagtgtccgccaccttctggcagaacccccggaaccacttcagatgccaggtgcagttctacggcctgagcgagaacgacgagtggacccaggacagagccaagcccgtgacccagatcgtgtctgccgaagcctggggcagagccgattgcggatcccagagcttcggcctgctggaccccaagctgtgctacctgctggatggcatcctgttcatctacggcgtgatcctgaccgccctgttcctgaaacggggcagaaagaaactcctgtatatattcaaacaaccatttatgagaccagtacaaactactcaagaggaagatggctgtagctgccgatttccagaagaagaagaaggaggatgtgaactgagagtgaagttcagcagaagcgccgacgcccctgcctaccagcagggacagaaccaactgtacaacgagctgaacctgggcagacgggaagagtacgacgtgctggacaagcggagaggcagggaccctgagatgggcggaaagccccagcggagaaagaacccccaggaaggactgtataacgaactccagaaagacaagatggccgaagcctacagcgagatcggcatgaagggcgagcggagaagaggcaagggccacgatggcctgtaccagggcctgagcaccgccaccaaggacacctatgacgccctgcacatgcaggccctgcctccaagaagggccaagcgatctggatctggagcaacaaacttctcactactcaaacaagcaggtgacgtggaggagaatcccgggcctactagtatggactggatttggcgcatccttttccttgtcggcgctgctaccggcgcccattcccagctccagttgcaagagagcggccctggcttggtaaaaccttccgagacccttagcctcacatgcacggttagtgggggcagcatttcctcaggtgattactattggggatggattcggcaacccccgggtaaaggattggagtggattggtcatatttattatagtggagcgacgtactacaacccaagtctcaaatccagggttacaatatccgtcgatacgagcaggaaccaattcagcttgaaactttctagtgtcaccgcagcagacacagccgtctattactgtacgcgggatgactccagtaattggcggtcccgagggcaagggacactggtcacggtctcctcatctggaggcggtggaagcggtggaggaggatctgtggacaacaagttcaacaaagagcggtacagcgcctactacgagatttggcaactgcccaacctgaacgtgcggcagaaggccgccttcatcggatctctgcaggacgaccctagccagagcgccaatctgctggccgaggccaagaagctgaacgacgcccaggcccctaaaggatccggcggcggaggatctggcggaggcggatctgggggcggaggctctttcgaacaagttcagcttcaacagcctggcgctgagctggtcaaacctggcgcttctgtgaagatgagctgcaaagccagcggctacgccttcagcagctactggatcaactggatgaagcagaaacccggccagggactcgaatggatcggccaaatctatcccggcgacggcgacaccaactacaacggcaagttcaagggcagagccacactgaccgccgatacctctagcagcacagcctacatgcagctgagcagcctgaccagcgaagatagcgccgtgtacttctgtgcccggtccatcacaacagtcgtgggctgcgctatggactattggggccagggaacaagcgtgaccgtgtctagtacgcgtgagcagaaactgatctcggaagaggatctggggagcggcatccagaaccctgatcctgccgtgtaccagctgcgggatagcaagagcagcgacaagagcgtgtgtctgttcaccgacttcgacagccagaccaacgtgtcccagagcaaggactccgacgtgtacatcaccgataagaccgtgctggacatgcggagcatggacttcaagagcaactccgccgtggcctggtccaacaagtccgatttcgcctgcgccaacgccttcaacaacagcattatccccgaggacacattcttcccaagccccgagagcagctgcggtacccagagttttgggttgttggaccctaaattgtgctatctgttggacggaatcctgttcatttacggagtgatcctgaccgcattgttcctgaagagaggccggaagaagctgctgtacatcttcaagcagcctttcatgcggcccgtgcagaccacccaggaagaggacggctgctcctgccggttccccgaggaagaagaaggcggctgcgagctgcgggttaagttttccagatccgcagacgcacccgcttaccaacaagggcagaaccaactctacaatgaacttaatttggggcggagggaagagtacgacgttctggacaaaaggaggggacgagatcccgagatgggcggaaagcctcagcgaaggaagaatccgcaagaggggctttataacgaactccagaaagataaaatggcagaagcctatagtgagattgggatgaagggagaaaggaggaggggtaaaggtcacgatgggttgtaccaaggattgagcacagccactaaagatacctatgatgcgctccacatgcaggccctgccgccaaga

SEQ ID NO: 5918 - DNA, 3084 bp, Artificial Sequence
  Synthetic Polynucloetide
atggccttaccagtgaccgccttgctcctgccgctggccttgctgctccacgccgccaggccggacatccagatgacacagagccctagcagcctgtctgccagcgtgggagacagagtgaccatcacatgcaaggccagcgaccacatcaacaactggctggcctggtatcagcagaagcctggacaggcccctaagctgctgatctacggcgctaccacactggaaacaggcgtgcccagcagattttctggcagcggctctggcaccgactacaccctgacaatatccagcctccagcctgaggacttcgccacctactactgtcagcagagctggaacaccccttggacattcggccagggcaccaagctggaaatcaagagactcgagcagagcttcggcctgctggaccccaagctgtgctacctgctggatggcatcctgttcatctacggcgtgatcctgaccgccctgttcctgagagtgaagttcagcagaagcgccgacgcccctgcctaccagcagggacagaaccaactgtacaacgagctgaacctgggcagacgggaagagtacgacgtgctggacaagcggagaggcagggaccctgagatgggcggaaagccccagcggagaaagaacccccaggaaggactgtataacgaactccagaaagacaagatggccgaagcctacagcgagatcggcatgaagggcgagcggagaagaggcaagggccacgatggcctgtaccagggcctgagcaccgccaccaaggacacctatgacgccctgcacatgcaggccctgcctccaagaagggccaagcgatctggatctggagcaacaaacttctcactactcaaacaagcaggtgacgtggaggagaatcccgggcctactagtatggactggatttggcgcatccttttccttgtcggcgctgctaccggcgcccattcccagctccagttgcaagagagcggccctggcttggtaaaaccttccgagacccttagcctcacatgcacggttagtgggggcagcatttcctcaggtgattactattggggatggattcggcaacccccgggtaaaggattggagtggattggtcatatttattatagtggagcgacgtactacaacccaagtctcaaatccagggttacaatatccgtcgatacgagcaggaaccaattcagcttgaaactttctagtgtcaccgcagcagacacagccgtctattactgtacgcgggatgactccagtaattggcggtcccgagggcaagggacactggtcacggtctcctcatctggaggcggtggaagcggtggaggaggatctgtggacaacaagttcaacaaagagcggtacagcgcctactacgagatttggcaactgcccaacctgaacgtgcggcagaaggccgccttcatcggatctctgcaggacgaccctagccagagcgccaatctgctggccgaggccaagaagctgaacgacgcccaggcccctaaaggatccggcggcggaggatctggcggaggcggatctgggggcggaggctctttcgaacaagttcagcttcaacagcctggcgctgagctggtcaaacctggcgcttctgtgaagatgagctgcaaagccagcggctacgccttcagcagctactggatcaactggatgaagcagaaacccggccagggactcgaatggatcggccaaatctatcccggcgacggcgacaccaactacaacggcaagttcaagggcagagccacactgaccgccgatacctctagcagcacagcctacatgcagctgagcagcctgaccagcgaagatagcgccgtgtacttctgtgcccggtccatcacaacagtcgtgggctgcgctatggactattggggccagggaacaagcgtgaccgtgtctagtacgcgtcagagttttgggttgttggaccctaaattgtgctatctgttggacggaatcctgttcatttacggagtgatcctgaccgcattgttcctgcgggttaagttttccagatccgcagacgcacccgcttaccaacaagggcagaaccaactctacaatgaacttaatttggggcggagggaagagtacgacgttctggacaaaaggaggggacgagatcccgagatgggcggaaagcctcagcgaaggaagaatccgcaagaggggctttataacgaactccagaaagataaaatggcagaagcctatagtgagattgggatgaagggagaaaggaggaggggtaaaggtcacgatgggttgtaccaaggattgagcacagccactaaagatacctatgatgcgctccacatgcaggccctgccgccaagacgcgccaagagaagcggatctggcgtgaagcagaccctgaatttcgacctgctgaagctggctggcgacgtggaatccaacccaggcccttctagaggccatatgaccgagtacaagcccacggtgcgcctcgccacccgcgacgacgtccccagggccgtacgcaccctcgccgccgcgttcgccgactaccccgccacgcgccacaccgtcgatccggaccgccacatcgagcgggtcaccgagctgcaagaactcttcctcacgcgcgtcgggctcgacatcggcaaggtgtgggtcgcggacgacggcgccgcggtggcggtctggaccacgccggagagcgtcgaagcgggggcggtgttcgccgagatcggcccgcgcatggccgagttgagcggttcccggctggccgcgcagcaacagatggaaggcctcctggcgccgcaccggcccaaggagcccgcgtggttcctggccaccgtcggcgtctcgcccgaccaccagggcaagggtctgggcagcgccgtcgtgctccccggagtggaggcggccgagcgcgccggggtgcccgccttcctggagacctccgcgccccgcaacctccccttctacgagcggctcggcttcaccgtcaccgccgacgtcgaggtgcccgaaggaccgcgcacctggtgcatgacccgcaagcccggtgcctga

SEQ ID NO: 5919 - DNA, 2556 bp, Artificial Sequence
  Synthetic Polynucloetide
atggccttaccagtgaccgccttgctcctgccgctggccttgctgctccacgccgccaggccggacatccagatgacacagagccctagcagcctgtctgccagcgtgggagacagagtgaccatcacatgcaaggccagcgaccacatcaacaactggctggcctggtatcagcagaagcctggacaggcccctaagctgctgatctacggcgctaccacactggaaacaggcgtgcccagcagattttctggcagcggctctggcaccgactacaccctgacaatatccagcctccagcctgaggacttcgccacctactactgtcagcagagctggaacaccccttggacattcggccagggcaccaagctggaaatcaagagactcgagggacagcctaaggccaatcctaccgtgacactgttccctccaagcagcgaagaactccaggccaacaaggccacacttgtgtgcctgatctccgacttctaccctggggctgtgacagtggcttggaaggccgatggatctcctgtgaaagccggcgtggaaaccaccaagccatccaagcagagcaacaacaaatacgccgccagctcctacctgagcctgacacctgagcagtggaagtcccacagatcctacagctgccaagtgacccacgaaggcagcaccgtggaaaagacagtggcccctacagagtgcagccccatcaagaccgatgtgattacaatggaccccaaggacaactgctccaaggacgccaacgataccctgctgctccagctgaccaacaccagcgcctactacatgtacttgttgctgctgctgaagtccgtggtgtacttcgccatcatcacatgctgcctgctgcggagaaccgccttctgctgcaacggcgagaagtctagggccaagcgatctggatctggagcaacaaacttctcactactcaaacaagcaggtgacgtggaggagaatcccgggcctactagtatggactggatttggcgcatccttttccttgtcggcgctgctaccggcgcccattcccagctccagttgcaagagagcggccctggcttggtaaaaccttccgagacccttagcctcacatgcacggttagtgggggcagcatttcctcaggtgattactattggggatggattcggcaacccccgggtaaaggattggagtggattggtcatatttattatagtggagcgacgtactacaacccaagtctcaaatccagggttacaatatccgtcgatacgagcaggaaccaattcagcttgaaactttctagtgtcaccgcagcagacacagccgtctattactgtacgcgggatgactccagtaattggcggtcccgagggcaagggacactggtcacggtctcctcatctggaggcggtggaagcggtggaggaggatctgtggacaacaagttcaacaaagagcggtacagcgcctactacgagatttggcaactgcccaacctgaacgtgcggcagaaggccgccttcatcggatctctgcaggacgaccctagccagagcgccaatctgctggccgaggccaagaagctgaacgacgcccaggcccctaaaggatccggcggcggaggatctggcggaggcggatctgggggcggaggctctttcgaacaagttcagcttcaacagcctggcgctgagctggtcaaacctggcgcttctgtgaagatgagctgcaaagccagcggctacgccttcagcagctactggatcaactggatgaagcagaaacccggccagggactcgaatggatcggccaaatctatcccggcgacggcgacaccaactacaacggcaagttcaagggcagagccacactgaccgccgatacctctagcagcacagcctacatgcagctgagcagcctgaccagcgaagatagcgccgtgtacttctgtgcccggtccatcacaacagtcgtgggctgcgctatggactattggggccagggaacaagcgtgaccgtgtctagtacgcgtgcctctacaaagggaccctccgtgtttcctctggctcccagcagcaagtctacaagcggaggaacagccgctctgggctgcctggtcaaggattactttcccgagcctgtgaccgtgtcctggaatagcggagcactgacaagcggcgtgcacacctttccagccgtgctgcaaagcagcggcctgtactctctgagcagcgtggtcacagtgcctagctctagcctgggcacccagacctacatctgcaatgtgaaccacaagcctagcaacaccaaggtggacaagagagtggaacccaagagctgtgaagtgaaaaccgactccaccgaccacgtgaagcccaaagagacagagaacaccaagcagcccagcaagagctgccacaagcccaaggccatcgtgcacaccgagaaagtgaacatgatgagcctgaccgtgctgggcctgcggatgctgttcgccaaaaccgtggccgtgaacttcctgctgaccgccaagctgttcttcctc

SEQ ID NO: 5920 - DNA, 2490 bp, Artificial Sequence
  Synthetic Polynucloetide
atggccttaccagtgaccgccttgctcctgccgctggccttgctgctccacgccgccaggccggacatccagatgacacagagccctagcagcctgtctgccagcgtgggagacagagtgaccatcacatgcaaggccagcgaccacatcaacaactggctggcctggtatcagcagaagcctggacaggcccctaagctgctgatctacggcgctaccacactggaaacaggcgtgcccagcagattttctggcagcggctctggcaccgactacaccctgacaatatccagcctccagcctgaggacttcgccacctactactgtcagcagagctggaacaccccttggacattcggccagggcaccaagctggaaatcaagagactcgagggacagcctaaggccaatcctaccgtgacactgttccctccaagcagcgaagaactccaggccaacaaggccacacttgtgtgcctgatctccgacttctaccctggggctgtgacagtggcttggaaggccgatggatctcctgtgaaagccggcgtggaaaccaccaagccatccaagcagagcaacaacaaatacgccgccagctcctacctgagcctgacacctgagcagtggaagtcccacagatcctacagctgccaagtgacccacgaaggcagcaccgtggaaaagacagtggcccctacagagtgcagcggcagagccgattgcggcatcaccagcgccagctaccaccagggcgtgctgagcgccaccatcctgtacgagatcctgctgggcaaggccaccctgtacgccgtgctggtgtctgccctggtgctgatggctatggtcaagcggaaggacagccggggaagggccaagcgatctggatctggagcaacaaacttctcactactcaaacaagcaggtgacgtggaggagaatcccgggcctactagtatggactggatttggcgcatccttttccttgtcggcgctgctaccggcgcccattcccagctccagttgcaagagagcggccctggcttggtaaaaccttccgagacccttagcctcacatgcacggttagtgggggcagcatttcctcaggtgattactattggggatggattcggcaacccccgggtaaaggattggagtggattggtcatatttattatagtggagcgacgtactacaacccaagtctcaaatccagggttacaatatccgtcgatacgagcaggaaccaattcagcttgaaactttctagtgtcaccgcagcagacacagccgtctattactgtacgcgggatgactccagtaattggcggtcccgagggcaagggacactggtcacggtctcctcatctggaggcggtggaagcggtggaggaggatctgtggacaacaagttcaacaaagagcggtacagcgcctactacgagatttggcaactgcccaacctgaacgtgcggcagaaggccgccttcatcggatctctgcaggacgaccctagccagagcgccaatctgctggccgaggccaagaagctgaacgacgcccaggcccctaaaggatccggcggcggaggatctggcggaggcggatctgggggcggaggctctttcgaacaagttcagcttcaacagcctggcgctgagctggtcaaacctggcgcttctgtgaagatgagctgcaaagccagcggctacgccttcagcagctactggatcaactggatgaagcagaaacccggccagggactcgaatggatcggccaaatctatcccggcgacggcgacaccaactacaacggcaagttcaagggcagagccacactgaccgccgatacctctagcagcacagcctacatgcagctgagcagcctgaccagcgaagatagcgccgtgtacttctgtgcccggtccatcacaacagtcgtgggctgcgctatggactattggggccagggaacaagcgtgaccgtgtctagtacgcgtgcctctacaaagggaccctccgtgtttcctctggctcccagcagcaagtctacaagcggaggaacagccgctctgggctgcctggtcaaggattactttcccgagcctgtgaccgtgtcctggaatagcggagcactgacaagcggcgtgcacacctttccagccgtgctgcaaagcagcggcctgtactctctgagcagcgtggtcacagtgcctagctctagcctgggcacccagacctacatctgcaatgtgaaccacaagcctagcaacaccaaggtggacaagagagtggaacccaagagctgtatccccgaggacacattcttcccaagcagcgacgtgccctgcgacgtgaagctggtggaaaagagcttcgagacagacaccaacctgaacttccagaacctgagcgtgatcggcttcagaatcctgctgctgaaagtggccggctttaacctgctgatgaccctgcggctgtggtccagc

SEQ ID NO: 5921 - DNA, 2490 bp, Artificial Sequence
  Synthetic Polynucloetide
atggccttaccagtgaccgccttgctcctgccgctggccttgctgctccacgccgccaggccggacatccagatgacacagagccctagcagcctgtctgccagcgtgggagacagagtgaccatcacatgcaaggccagcgaccacatcaacaactggctggcctggtatcagcagaagcctggacaggcccctaagctgctgatctacggcgctaccacactggaaacaggcgtgcccagcagattttctggcagcggctctggcaccgactacaccctgacaatatccagcctccagcctgaggacttcgccacctactactgtcagcagagctggaacaccccttggacattcggccagggcaccaagctggaaatcaagagactcgagggacagcctaaggccaatcctaccgtgacactgttccctccaagcagcgaagaactccaggccaacaaggccacacttgtgtgcctgatctccgacttctaccctggggctgtgacagtggcttggaaggccgatggatctcctgtgaaagccggcgtggaaaccaccaagccatccaagcagagcaacaacaaatacgccgccagctcctacctgagcctgacacctgagcagtggaagtcccacagatcctacagctgccaagtgacccacgaaggcagcaccgtggaaaagacagtggcccctacagagtgcagcggcagagccgattgcggctttaccagcgagagctaccagcagggcgtgctgagcgccaccatcctgtacgagatcctgctgggcaaggccaccctgtacgccgtgctggtgtctgccctggtgctgatggctatggtcaagcggaaggacagccggggaagggccaagcgatctggatctggagcaacaaacttctcactactcaaacaagcaggtgacgtggaggagaatcccgggcctactagtatggactggatttggcgcatccttttccttgtcggcgctgctaccggcgcccattcccagctccagttgcaagagagcggccctggcttggtaaaaccttccgagacccttagcctcacatgcacggttagtgggggcagcatttcctcaggtgattactattggggatggattcggcaacccccgggtaaaggattggagtggattggtcatatttattatagtggagcgacgtactacaacccaagtctcaaatccagggttacaatatccgtcgatacgagcaggaaccaattcagcttgaaactttctagtgtcaccgcagcagacacagccgtctattactgtacgcgggatgactccagtaattggcggtcccgagggcaagggacactggtcacggtctcctcatctggaggcggtggaagcggtggaggaggatctgtggacaacaagttcaacaaagagcggtacagcgcctactacgagatttggcaactgcccaacctgaacgtgcggcagaaggccgccttcatcggatctctgcaggacgaccctagccagagcgccaatctgctggccgaggccaagaagctgaacgacgcccaggcccctaaaggatccggcggcggaggatctggcggaggcggatctgggggcggaggctctttcgaacaagttcagcttcaacagcctggcgctgagctggtcaaacctggcgcttctgtgaagatgagctgcaaagccagcggctacgccttcagcagctactggatcaactggatgaagcagaaacccggccagggactcgaatggatcggccaaatctatcccggcgacggcgacaccaactacaacggcaagttcaagggcagagccacactgaccgccgatacctctagcagcacagcctacatgcagctgagcagcctgaccagcgaagatagcgccgtgtacttctgtgcccggtccatcacaacagtcgtgggctgcgctatggactattggggccagggaacaagcgtgaccgtgtctagtacgcgtgcctctacaaagggaccctccgtgtttcctctggctcccagcagcaagtctacaagcggaggaacagccgctctgggctgcctggtcaaggattactttcccgagcctgtgaccgtgtcctggaatagcggagcactgacaagcggcgtgcacacctttccagccgtgctgcaaagcagcggcctgtactctctgagcagcgtggtcacagtgcctagctctagcctgggcacccagacctacatctgcaatgtgaaccacaagcctagcaacaccaaggtggacaagagagtggaacccaagagctgtatccccgaggacacattcttcccaagccccgagagcagctgcgacgtgaagctggtggaaaagagcttcgagacagacaccaacctgaacttccagaacctgagcgtgatcggcttcagaatcctgctgctgaaagtggccggctttaacctgctgatgaccctgcggctgtggtccagc

SEQ ID NO: 5922 - DNA, 1980 bp, Artificial Sequence
  Synthetic Polynucloetide
atggactggatttggcgcatccttttccttgtcggcgctgctaccggcgcccattcccagctccagttgcaagagagcggccctggcttggtaaaaccttccgagacccttagcctcacatgcacggttagtgggggcagcatttcctcaggtgattactattggggatggattcggcaacccccgggtaaaggattggagtggattggtcatatttattatagtggagcgacgtactacaacccaagtctcaaatccagggttacaatatccgtcgatacgagcaggaaccaattcagcttgaaactttctagtgtcaccgcagcagacacagccgtctattactgtacgcgggatgactccagtaattggcggtcccgagggcaagggacactggtcacggtctcctcatctggaggcggtggaagcggtggaggaggatctgtggacaacaagttcaacaaagagcggtacagcgcctactacgagatttggcaactgcccaacctgaacgtgcggcagaaggccgccttcatcggatctctgcaggacgaccctagccagagcgccaatctgctggccgaggccaagaagctgaacgacgcccaggcccctaaaggatccggcggcggaggatctggcggaggcggatctgggggcggaggctctttcgaacaagttcagcttcaacagcctggcgctgagctggtcaaacctggcgcttctgtgaagatgagctgcaaagccagcggctacgccttcagcagctactggatcaactggatgaagcagaaacccggccagggactcgaatggatcggccaaatctatcccggcgacggcgacaccaactacaacggcaagttcaagggcagagccacactgaccgccgatacctctagcagcacagcctacatgcagctgagcagcctgaccagcgaagatagcgccgtgtacttctgtgcccggtccatcacaacagtcgtgggctgcgctatggactattggggccagggaacaagcgtgaccgtgtctagtggcggaggcggaagtggaggcggaggatctggcggcggaggctctgacatccagatgacacagagccctagcagcctgtctgccagcgtgggagacagagtgaccatcacatgcaaggccagcgaccacatcaacaactggctggcctggtatcagcagaagcctggacaggcccctaagctgctgatctacggcgctaccacactggaaacaggcgtgcccagcagattttctggcagcggctctggcaccgactacaccctgacaatatccagcctccagcctgaggacttcgccacctactactgtcagcagagctggaacaccccttggacattcggccagggcaccaagctggaaatcaagagaacgcgtggcggaggcagcgacggtaacgaggagatgggaggaatcactcaaaccccttacaaagtctcaatttcaggaacaactgttatccttacatgtccccagtatcctggcagcgagatcctttggcagcataacgacaagaatatagggggagatgaagacgataagaatatcggatctgacgaggatcacttgagcctgaaagagttctccgagcttgaacaaagcggatattatgtgtgctatccgcgcgggtcaaagccggaagacgctaacttttacctttatctccgagccagagtgtgcgaaaattgcatggaaatggacgttatgtccgttgctacaatagttatcgtagatatatgcatcacgggtggactgcttctgctggtttattattggtccaagaatagaaaggccaaagctaaacccgtgaccagaggcgctggcgcaggcggaaggcaaaggggacaaaacaaagaacggccaccaccagtgccaaatccagattatgagcctattcggaaaggacagagggacctgtactctggcctgaatcagagaagaatc

SEQ ID NO: 5923 - DNA, 1875 bp, Artificial Sequence
  Synthetic Polynucloetide
atggactggatttggcgcatccttttccttgtcggcgctgctaccggcgcccattcccagctccagttgcaagagagcggccctggcttggtaaaaccttccgagacccttagcctcacatgcacggttagtgggggcagcatttcctcaggtgattactattggggatggattcggcaacccccgggtaaaggattggagtggattggtcatatttattatagtggagcgacgtactacaacccaagtctcaaatccagggttacaatatccgtcgatacgagcaggaaccaattcagcttgaaactttctagtgtcaccgcagcagacacagccgtctattactgtacgcgggatgactccagtaattggcggtcccgagggcaagggacactggtcacggtctcctcatctggaggcggtggaagcggtggaggaggatctgtggacaacaagttcaacaaagagcggtacagcgcctactacgagatttggcaactgcccaacctgaacgtgcggcagaaggccgccttcatcggatctctgcaggacgaccctagccagagcgccaatctgctggccgaggccaagaagctgaacgacgcccaggcccctaaaggatccggcggcggaggatctggcggaggcggatctgggggcggaggctctttcgaacaagttcagcttcaacagcctggcgctgagctggtcaaacctggcgcttctgtgaagatgagctgcaaagccagcggctacgccttcagcagctactggatcaactggatgaagcagaaacccggccagggactcgaatggatcggccaaatctatcccggcgacggcgacaccaactacaacggcaagttcaagggcagagccacactgaccgccgatacctctagcagcacagcctacatgcagctgagcagcctgaccagcgaagatagcgccgtgtacttctgtgcccggtccatcacaacagtcgtgggctgcgctatggactattggggccagggaacaagcgtgaccgtgtctagtggcggaggcggaagtggaggcggaggatctggcggcggaggctctgacatccagatgacacagagccctagcagcctgtctgccagcgtgggagacagagtgaccatcacatgcaaggccagcgaccacatcaacaactggctggcctggtatcagcagaagcctggacaggcccctaagctgctgatctacggcgctaccacactggaaacaggcgtgcccagcagattttctggcagcggctctggcaccgactacaccctgacaatatccagcctccagcctgaggacttcgccacctactactgtcagcagagctggaacaccccttggacattcggccagggcaccaagctggaaatcaagagaacgcgtggcggaggcagcttcaagatccccatcgaggaactggaagatcgggtgttcgtgaactgcaacacctctatcacctgggtggaaggcaccgtgggaacactgctgagcgacatcaccagactggacctcggcaagcggattctggaccctcggggcatctacagatgcaacggcaccgacatctacaaggacaaagaaagcaccgtgcaggtccactacagaatgtgccagtcctgcgtggaactggaccctgctacagtggccggcatcatcgtgaccgatgtgatcgctactctgctgctggctctgggagtgttctgcttcgccggacacgaaacaggcagactgtctggcgctgccgatacacaggccctgctgagaaacgaccaagtgtatcagcccctgcgcgacagagatgatgcccagtattctcacctcggcggcaactgggctagaaacaag

SEQ ID NO: 5924 - DNA, 1905 bp, Artificial Sequence
  Synthetic Polynucloetide
atggactggatttggcgcatccttttccttgtcggcgctgctaccggcgcccattcccagctccagttgcaagagagcggccctggcttggtaaaaccttccgagacccttagcctcacatgcacggttagtgggggcagcatttcctcaggtgattactattggggatggattcggcaacccccgggtaaaggattggagtggattggtcatatttattatagtggagcgacgtactacaacccaagtctcaaatccagggttacaatatccgtcgatacgagcaggaaccaattcagcttgaaactttctagtgtcaccgcagcagacacagccgtctattactgtacgcgggatgactccagtaattggcggtcccgagggcaagggacactggtcacggtctcctcatctggaggcggtggaagcggtggaggaggatctgtggacaacaagttcaacaaagagcggtacagcgcctactacgagatttggcaactgcccaacctgaacgtgcggcagaaggccgccttcatcggatctctgcaggacgaccctagccagagcgccaatctgctggccgaggccaagaagctgaacgacgcccaggcccctaaaggatccggcggcggaggatctggcggaggcggatctgggggcggaggctctttcgaacaagttcagcttcaacagcctggcgctgagctggtcaaacctggcgcttctgtgaagatgagctgcaaagccagcggctacgccttcagcagctactggatcaactggatgaagcagaaacccggccagggactcgaatggatcggccaaatctatcccggcgacggcgacaccaactacaacggcaagttcaagggcagagccacactgaccgccgatacctctagcagcacagcctacatgcagctgagcagcctgaccagcgaagatagcgccgtgtacttctgtgcccggtccatcacaacagtcgtgggctgcgctatggactattggggccagggaacaagcgtgaccgtgtctagtggcggaggcggaagtggaggcggaggatctggcggcggaggctctgacatccagatgacacagagccctagcagcctgtctgccagcgtgggagacagagtgaccatcacatgcaaggccagcgaccacatcaacaactggctggcctggtatcagcagaagcctggacaggcccctaagctgctgatctacggcgctaccacactggaaacaggcgtgcccagcagattttctggcagcggctctggcaccgactacaccctgacaatatccagcctccagcctgaggacttcgccacctactactgtcagcagagctggaacaccccttggacattcggccagggcaccaagctggaaatcaagagaacgcgtggcggaggcagccagagcatcaagggcaaccacctggtcaaggtgtacgactaccaagaggacggcagcgtgctgctgacatgtgatgccgaggccaagaacatcacctggtttaaggacggcaagatgatcggcttcctgaccgaggacaagaagaagtggaacctgggcagcaacgctaaggaccccagaggcatgtatcagtgcaagggcagccagaacaagagcaagcccctccaggtgtactaccggatgtgccagaactgcatcgagctgaacgccgctaccatcagcggctttctgttcgccgagatcgtgtccatcttcgtgctggccgtgggcgtgtactttatcgctggacaggatggcgtgcggcagagcagagcttccgataagcaaaccctgctgcctaacgaccagctgtaccagcctctgaaggacagagaggacgaccagtacagccacctccagggcaatcagctgagaagaaac

SEQ ID NO: 5925 - DNA, 1854 bp, Artificial Sequence
  Synthetic Polynucloetide
atggactggatttggcgcatccttttccttgtcggcgctgctaccggcgcccattcccagctccagttgcaagagagcggccctggcttggtaaaaccttccgagacccttagcctcacatgcacggttagtgggggcagcatttcctcaggtgattactattggggatggattcggcaacccccgggtaaaggattggagtggattggtcatatttattatagtggagcgacgtactacaacccaagtctcaaatccagggttacaatatccgtcgatacgagcaggaaccaattcagcttgaaactttctagtgtcaccgcagcagacacagccgtctattactgtacgcgggatgactccagtaattggcggtcccgagggcaagggacactggtcacggtctcctcatctggaggcggtggaagcggtggaggaggatctgtggacaacaagttcaacaaagagcggtacagcgcctactacgagatttggcaactgcccaacctgaacgtgcggcagaaggccgccttcatcggatctctgcaggacgaccctagccagagcgccaatctgctggccgaggccaagaagctgaacgacgcccaggcccctaaaggatccggcggcggaggatctggcggaggcggatctgggggcggaggctctttcgaacaagttcagcttcaacagcctggcgctgagctggtcaaacctggcgcttctgtgaagatgagctgcaaagccagcggctacgccttcagcagctactggatcaactggatgaagcagaaacccggccagggactcgaatggatcggccaaatctatcccggcgacggcgacaccaactacaacggcaagttcaagggcagagccacactgaccgccgatacctctagcagcacagcctacatgcagctgagcagcctgaccagcgaagatagcgccgtgtacttctgtgcccggtccatcacaacagtcgtgggctgcgctatggactattggggccagggaacaagcgtgaccgtgtctagtggcggaggcggaagtggaggcggaggatctggcggcggaggctctgacatccagatgacacagagccctagcagcctgtctgccagcgtgggagacagagtgaccatcacatgcaaggccagcgaccacatcaacaactggctggcctggtatcagcagaagcctggacaggcccctaagctgctgatctacggcgctaccacactggaaacaggcgtgcccagcagattttctggcagcggctctggcaccgactacaccctgacaatatccagcctccagcctgaggacttcgccacctactactgtcagcagagctggaacaccccttggacattcggccagggcaccaagctggaaatcaagagaacgcgtggcggaggcagccagagttttgggttgttggaccctaaattgtgctatctgttggacggaatcctgttcatttacggagtgatcctgaccgcattgttcctgcgggttaagttttccagatccgcagacgcacccgcttaccaacaagggcagaaccaactctacaatgaacttaatttggggcggagggaagagtacgacgttctggacaaaaggaggggacgagatcccgagatgggcggaaagcctcagcgaaggaagaatccgcaagaggggctttataacgaactccagaaagataaaatggcagaagcctatagtgagattgggatgaagggagaaaggaggaggggtaaaggtcacgatgggttgtaccaaggattgagcacagccactaaagatacctatgatgcgctccacatgcaggccctgccgccaaga

SEQ ID NO: 5926 - DNA, 1965 bp, Artificial Sequence
  Synthetic Polynucloetide
atggactggatttggcgcatccttttccttgtcggcgctgctaccggcgcccattcccagctccagttgcaagagagcggccctggcttggtaaaaccttccgagacccttagcctcacatgcacggttagtgggggcagcatttcctcaggtgattactattggggatggattcggcaacccccgggtaaaggattggagtggattggtcatatttattatagtggagcgacgtactacaacccaagtctcaaatccagggttacaatatccgtcgatacgagcaggaaccaattcagcttgaaactttctagtgtcaccgcagcagacacagccgtctattactgtacgcgggatgactccagtaattggcggtcccgagggcaagggacactggtcacggtctcctcatctggaggcggtggaagcggtggaggaggatctgtggacaacaagttcaacaaagagcggtacagcgcctactacgagatttggcaactgcccaacctgaacgtgcggcagaaggccgccttcatcggatctctgcaggacgaccctagccagagcgccaatctgctggccgaggccaagaagctgaacgacgcccaggcccctaaaggatccggcggcggaggatctggcggaggcggatctgggggcggaggctctttcgaacaagttcagcttcaacagcctggcgctgagctggtcaaacctggcgcttctgtgaagatgagctgcaaagccagcggctacgccttcagcagctactggatcaactggatgaagcagaaacccggccagggactcgaatggatcggccaaatctatcccggcgacggcgacaccaactacaacggcaagttcaagggcagagccacactgaccgccgatacctctagcagcacagcctacatgcagctgagcagcctgaccagcgaagatagcgccgtgtacttctgtgcccggtccatcacaacagtcgtgggctgcgctatggactattggggccagggaacaagcgtgaccgtgtctagtacgcgtatccagaaccctgatcctgccgtgtaccagctgcgggatagcaagagcagcgacaagagcgtgtgtctgttcaccgacttcgacagccagaccaacgtgtcccagagcaaggactccgacgtgtacatcaccgataagaccgtgctggacatgcggagcatggacttcaagagcaactccgccgtggcctggtccaacaagtccgatttcgcctgcgccaacgccttcaacaacagcattatccccgaggacacattcttcccaagccccgagagcagctgcgacgtgaagctggtggaaaagagcttcgagacagacaccaacctgaacttccagaacctgagcgtgatcggcttcagaatcctgctgctgaaagtggccggctttaacctgctgatgaccctgcggctgtggtccagccgcgccaagagaagcggatctggcgtgaagcagaccctgaatttcgacctgctgaagctggctggcgacgtggaatccaacccaggcccttctagaggccatatggccaagcctttgtctcaagaagaatccaccctcattgaaagagcaacggctacaatcaacagcatccccatctctgaagactacagcgtcgccagcgcagctctctctagcgacggccgcatcttcactggtgtcaatgtatatcattttactgggggaccttgtgcagaactcgtggtgctgggcactgctgctgctgcggcagctggcaacctgacttgtatcgtcgcgatcggaaatgagaacaggggcatcttgagcccctgcggacggtgccgacaggtgcttctcgatctgcatcctgggatcaaagccatagtgaaggacagtgatggacagccgacggcagttgggattcgtgaattgctgccctctggttatgtgtgggagggctga

SEQ ID NO: 5927 - DNA, 1464 bp, Artificial Sequence
  Synthetic Polynucloetide
atggactggatttggcgcatccttttccttgtcggcgctgctaccggcgcccattcccagctccagttgcaagagagcggccctggcttggtaaaaccttccgagacccttagcctcacatgcacggttagtgggggcagcatttcctcaggtgattactattggggatggattcggcaacccccgggtaaaggattggagtggattggtcatatttattatagtggagcgacgtactacaacccaagtctcaaatccagggttacaatatccgtcgatacgagcaggaaccaattcagcttgaaactttctagtgtcaccgcagcagacacagccgtctattactgtacgcgggatgactccagtaattggcggtcccgagggcaagggacactggtcacggtctcctcatctggaggcggtggaagcggtggaggaggatctgtggacaacaagttcaacaaagagcggtacagcgcctactacgagatttggcaactgcccaacctgaacgtgcggcagaaggccgccttcatcggatctctgcaggacgaccctagccagagcgccaatctgctggccgaggccaagaagctgaacgacgcccaggcccctaaaggatccggcggcggaggatctggcggaggcggatctgggggcggaggctctttcgaacaagttcagcttcaacagcctggcgctgagctggtcaaacctggcgcttctgtgaagatgagctgcaaagccagcggctacgccttcagcagctactggatcaactggatgaagcagaaacccggccagggactcgaatggatcggccaaatctatcccggcgacggcgacaccaactacaacggcaagttcaagggcagagccacactgaccgccgatacctctagcagcacagcctacatgcagctgagcagcctgaccagcgaagatagcgccgtgtacttctgtgcccggtccatcacaacagtcgtgggctgcgctatggactattggggccagggaacaagcgtgaccgtgtctagtacgcgtatccagaaccctgatcctgccgtgtaccagctgcgggatagcaagagcagcgacaagagcgtgtgtctgttcaccgacttcgacagccagaccaacgtgtcccagagcaaggactccgacgtgtacatcaccgataagaccgtgctggacatgcggagcatggacttcaagagcaactccgccgtggcctggtccaacaagtccgatttcgcctgcgccaacgccttcaacaacagcattatccccgaggacacattcttcccaagccccgagagcagctgcgacgtgaagctggtggaaaagagcttcgagacagacaccaacctgaacttccagaacctgagcgtgatcggcttcagaatcctgctgctgaaagtggccggctttaacctgctgatgaccctgcggctgtggtccagc

SEQ ID NO: 5928 - DNA, 2001 bp, Artificial Sequence
  Synthetic Polynucloetide
atggactggatttggcgcatccttttccttgtcggcgctgctaccggcgcccattcccagctccagttgcaagagagcggccctggcttggtaaaaccttccgagacccttagcctcacatgcacggttagtgggggcagcatttcctcaggtgattactattggggatggattcggcaacccccgggtaaaggattggagtggattggtcatatttattatagtggagcgacgtactacaacccaagtctcaaatccagggttacaatatccgtcgatacgagcaggaaccaattcagcttgaaactttctagtgtcaccgcagcagacacagccgtctattactgtacgcgggatgactccagtaattggcggtcccgagggcaagggacactggtcacggtctcctcatctggaggcggtggaagcggtggaggaggatctgtggacaacaagttcaacaaagagcggtacagcgcctactacgagatttggcaactgcccaacctgaacgtgcggcagaaggccgccttcatcggatctctgcaggacgaccctagccagagcgccaatctgctggccgaggccaagaagctgaacgacgcccaggcccctaaaggatccggcggcggaggatctggcggaggcggatctgggggcggaggctctttcgaacaagttcagcttcaacagcctggcgctgagctggtcaaacctggcgcttctgtgaagatgagctgcaaagccagcggctacgccttcagcagctactggatcaactggatgaagcagaaacccggccagggactcgaatggatcggccaaatctatcccggcgacggcgacaccaactacaacggcaagttcaagggcagagccacactgaccgccgatacctctagcagcacagcctacatgcagctgagcagcctgaccagcgaagatagcgccgtgtacttctgtgcccggtccatcacaacagtcgtgggctgcgctatggactattggggccagggaacaagcgtgaccgtgtctagtacgcgtgagcagaaactgatctcggaagaggatgggagcggcatccagaaccctgatcctgccgtgtaccagctgcgggatagcaagagcagcgacaagagcgtgtgtctgttcaccgacttcgacagccagaccaacgtgtcccagagcaaggactccgacgtgtacatcaccgataagtgcgtgctggacatgcggagcatggacttcaagagcaactccgccgtggcctggtccaacaagtccgatttcgcctgcgccaacgccttcaacaacagcattatccccgaggacacattcttcccaagccccgagagcagctgcgacgtgaagctggtggaaaagagcttcgagacagacaccaacctgaacttccagaacctgagcgtgatcggcttcagaatcctgctgctgaaagtggccggctttaacctgctgatgaccctgcggctgtggtccagccgcgccaagagaagcggatctggcgtgaagcagaccctgaatttcgacctgctgaagctggctggcgacgtggaatccaacccaggcccttctagaggccatatggccaagcctttgtctcaagaagaatccaccctcattgaaagagcaacggctacaatcaacagcatccccatctctgaagactacagcgtcgccagcgcagctctctctagcgacggccgcatcttcactggtgtcaatgtatatcattttactgggggaccttgtgcagaactcgtggtgctgggcactgctgctgctgcggcagctggcaacctgacttgtatcgtcgcgatcggaaatgagaacaggggcatcttgagcccctgcggacggtgccgacaggtgcttctcgatctgcatcctgggatcaaagccatagtgaaggacagtgatggacagccgacggcagttgggattcgtgaattgctgccctctggttatgtgtgggagggctga

SEQ ID NO: 5929 - DNA, 1503 bp, Artificial Sequence
  Synthetic Polynucloetide
atggactggatttggcgcatccttttccttgtcggcgctgctaccggcgcccattcccagctccagttgcaagagagcggccctggcttggtaaaaccttccgagacccttagcctcacatgcacggttagtgggggcagcatttcctcaggtgattactattggggatggattcggcaacccccgggtaaaggattggagtggattggtcatatttattatagtggagcgacgtactacaacccaagtctcaaatccagggttacaatatccgtcgatacgagcaggaaccaattcagcttgaaactttctagtgtcaccgcagcagacacagccgtctattactgtacgcgggatgactccagtaattggcggtcccgagggcaagggacactggtcacggtctcctcatctggaggcggtggaagcggtggaggaggatctgtggacaacaagttcaacaaagagcggtacagcgcctactacgagatttggcaactgcccaacctgaacgtgcggcagaaggccgccttcatcggatctctgcaggacgaccctagccagagcgccaatctgctggccgaggccaagaagctgaacgacgcccaggcccctaaaggatccggcggcggaggatctggcggaggcggatctgggggcggaggctctttcgaacaagttcagcttcaacagcctggcgctgagctggtcaaacctggcgcttctgtgaagatgagctgcaaagccagcggctacgccttcagcagctactggatcaactggatgaagcagaaacccggccagggactcgaatggatcggccaaatctatcccggcgacggcgacaccaactacaacggcaagttcaagggcagagccacactgaccgccgatacctctagcagcacagcctacatgcagctgagcagcctgaccagcgaagatagcgccgtgtacttctgtgcccggtccatcacaacagtcgtgggctgcgctatggactattggggccagggaacaagcgtgaccgtgtctagtacgcgtgagcagaaactgatctcggaagaggatgggagcggcatccagaaccctgatcctgccgtgtaccagctgcgggatagcaagagcagcgacaagagcgtgtgtctgttcaccgacttcgacagccagaccaacgtgtcccagagcaaggactccgacgtgtacatcaccgataagtgcgtgctggacatgcggagcatggacttcaagagcaactccgccgtggcctggtccaacaagtccgatttcgcctgcgccaacgccttcaacaacagcattatccccgaggacacattcttcccaagccccgagagcagctgcgacgtgaagctggtggaaaagagcttcgagacagacaccaacctgaacttccagaacctgagcgtgatcggcttcagaatcctgctgctgaaagtggccggctttaacctgctgatgaccctgcggctgtggtccagctga

SEQ ID NO: 5930 - DNA, 4008 bp, Artificial Sequence
  Synthetic Polynucloetide
atggccttaccagtgaccgccttgctcctgccgctggccttgctgctccacgccgccaggccggaggtgcaactggtggaaagcggcggaggctctgtgcagacaggcggctctctgagactgacctgtgccgccagcggcagaaccagcagatcctatggcatgggctggttcagacaggcccctggcaaagaacgcgagttcgtgtccggcatctcttggagaggcgacagcaccggctacgccgatagcgtgaagggccggttcaccatcagccgggacaacgccaagaacaccgtggacctgcagatgaacagcctgaagcccgaggacaccgccatctactactgtgccgctgccgccggatctgcttggtacggcacactgtacgagtacgactactggggccagggcacccttgtgaccgtgtcatctggcggaggaagcggcggaggatctgaagtgcaactggtggaatctggaggctctctggtgcagccagggggaagcctgagactgtcttgtgccgcttccggcttcaccttcgacgactacgccatgagctgggtgcgccaggtgccaggcaaaggcctggaatgggtgtccagcatcaactggagcggcacccacaccgattacgccgactccgtgaaaggcagattcacaatcagcagaaacaacgccaacaataccctgtacctgcagatgaactccctgaagtctgaggatacagcagtgtattattgcgccaagaactggcgggacgccggcaccacttggtttgagaaaagcggctctgccggacagggaacccaagtgacagtgtcctccggtaccggcggaggcggatctggcggcggaggtagcggtggcggaggatctgaattcgacatccagatgacacagagccctagcagcctgtctgccagcgtgggagacagagtgaccatcacatgcaaggccagcgaccacatcaacaactggctggcctggtatcagcagaagcctggacaggcccctaagctgctgatctacggcgctaccacactggaaacaggcgtgcccagcagattttctggcagcggctctggcaccgactacaccctgacaatatccagcctccagcctgaggacttcgccacctactactgtcagcagagctggaacaccccttggacattcggccagggcaccaagctggaaatcaagagactcgagatccagaaccctgatcctgccgtgtaccagctgcgggatagcaagagcagcgacaagagcgtgtgtctgttcaccgacttcgacagccagaccaacgtgtcccagagcaaggactccgacgtgtacatcaccgataagtgcgtgctggacatgcggagcatggacttcaagagcaactccgccgtggcctggtccaacaagtccgatttcgcctgcgccaacgccttcaacaacagcattatccccgaggacacattcttcccaagcagcgacgtgccctgcgacgtgaagctggtggaaaagagcttcgagacagacaccaacctgaacttccagaacctgagcgtgatcggcttcagaatcctgctgctgaaagtggccggctttaacctgctgatgaccctgcggctgtggtccagccgcgccaagagaagcggatctggcgtgaagcagaccctgaatttcgacctgctgaagctggctggcgacgtggaatccaacccaggccctactagtatggactggatttggcgcatccttttccttgtcggcgctgctaccggcgcccattcccagctccagttgcaagagagcggccctggcttggtaaaaccttccgagacccttagcctcacatgcacggttagtgggggcagcatttcctcaggtgattactattggggatggattcggcaacccccgggtaaaggattggagtggattggtcatatttattatagtggagcgacgtactacaacccaagtctcaaatccagggttacaatatccgtcgatacgagcaggaaccaattcagcttgaaactttctagtgtcaccgcagcagacacagccgtctattactgtacgcgggatgactccagtaattggcggtcccgagggcaagggacactggtcacggtctcctcatctggaggcggtggaagcggtggaggaggatctgtggacaacaagttcaacaaagagcggtacagcgcctactacgagatttggcaactgcccaacctgaacgtgcggcagaaggccgccttcatcggatctctgcaggacgaccctagccagagcgccaatctgctggccgaggccaagaagctgaacgacgcccaggcccctaaaggatccggcggcggaggatctggcggaggcggatctgggggcggaggctctttcgaacaagttcagcttcaacagcctggcgctgagctggtcaaacctggcgcttctgtgaagatgagctgcaaagccagcggctacgccttcagcagctactggatcaactggatgaagcagaaacccggccagggactcgaatggatcggccaaatctatcccggcgacggcgacaccaactacaacggcaagttcaagggcagagccacactgaccgccgatacctctagcagcacagcctacatgcagctgagcagcctgaccagcgaagatagcgccgtgtacttctgtgcccggtccatcacaacagtcgtgggctgcgctatggactattggggccagggaacaagcgtgaccgtgtctagtacgcgtgaggacctgaagaacgtgttcccacctgaggtggccgtgttcgagcctagcaaggccgagatcgcccacacccagaaagccaccctcgtgtgcctggctaccggcttctaccccgaccatgtggaactgtcttggtgggtcaacggcaaagaggtgcacagcggcgtgtgtaccgacccccagccactgaaagaacagcccgccctgaacgacagccggtactgcctgagcagcagactgagagtgtccgccaccttctggcagaacccccggaaccacttcagatgccaggtgcagttctacggcctgagcgagaacgacgagtggacccaggacagagccaagcccgtgacccagatcgtgtctgccgaagcctggggcagagccgattgcggcatcaccagcgccagctaccaccagggcgtgctgagcgccaccatcctgtacgagatcctgctgggcaaggccaccctgtacgccgtgctggtgtctgccctggtgctgatggctatggtcaagcggaaggacagccggggaagggccaagcgatctggatctggagcaacaaacttctcactactcaaacaagcaggtgacgtggaggagaatcccgggccttctagaggccatatgaccgagtacaagcccacggtgcgcctcgccacccgcgacgacgtccccagggccgtacgcaccctcgccgccgcgttcgccgactaccccgccacgcgccacaccgtcgatccggaccgccacatcgagcgggtcaccgagctgcaagaactcttcctcacgcgcgtcgggctcgacatcggcaaggtgtgggtcgcggacgacggcgccgcggtggcggtctggaccacgccggagagcgtcgaagcgggggcggtgttcgccgagatcggcccgcgcatggccgagttgagcggttcccggctggccgcgcagcaacagatggaaggcctcctggcgccgcaccggcccaaggagcccgcgtggttcctggccaccgtcggcgtctcgcccgaccaccagggcaagggtctgggcagcgccgtcgtgctccccggagtggaggcggccgagcgcgccggggtgcccgccttcctggagacctccgcgccccgcaacctccccttctacgagcggctcggcttcaccgtcaccgccgacgtcgaggtgcccgaaggaccgcgcacctggtgcatgacccgcaagcccggtgcctga

SEQ ID NO: 5931 - DNA, 4005 bp, Artificial Sequence
  Synthetic Polynucloetide
atggccttaccagtgaccgccttgctcctgccgctggccttgctgctccacgccgccaggccggaggtgcaactggtggaaagcggcggaggctctgtgcagacaggcggctctctgagactgacctgtgccgccagcggcagaaccagcagatcctatggcatgggctggttcagacaggcccctggcaaagaacgcgagttcgtgtccggcatctcttggagaggcgacagcaccggctacgccgatagcgtgaagggccggttcaccatcagccgggacaacgccaagaacaccgtggacctgcagatgaacagcctgaagcccgaggacaccgccatctactactgtgccgctgccgccggatctgcttggtacggcacactgtacgagtacgactactggggccagggcacccttgtgaccgtgtcatctggcggaggaagcggcggaggatctgaagtgcaactggtggaatctggaggctctctggtgcagccagggggaagcctgagactgtcttgtgccgcttccggcttcaccttcgacgactacgccatgagctgggtgcgccaggtgccaggcaaaggcctggaatgggtgtccagcatcaactggagcggcacccacaccgattacgccgactccgtgaaaggcagattcacaatcagcagaaacaacgccaacaataccctgtacctgcagatgaactccctgaagtctgaggatacagcagtgtattattgcgccaagaactggcgggacgccggcaccacttggtttgagaaaagcggctctgccggacagggaacccaagtgacagtgtcctccggtaccggcggaggcggatctggcggcggaggtagcggtggcggaggatctgaattcgacatccagatgacacagagccctagcagcctgtctgccagcgtgggagacagagtgaccatcacatgcaaggccagcgaccacatcaacaactggctggcctggtatcagcagaagcctggacaggcccctaagctgctgatctacggcgctaccacactggaaacaggcgtgcccagcagattttctggcagcggctctggcaccgactacaccctgacaatatccagcctccagcctgaggacttcgccacctactactgtcagcagagctggaacaccccttggacattcggccagggcaccaagctggaaatcaagagactcgaggacctgaagaacgtgttcccacctgaggtggccgtgttcgagcctagcaaggccgagatcgcccacacccagaaagccaccctcgtgtgcctggctaccggcttctaccccgaccatgtggaactgtcttggtgggtcaacggcaaagaggtgcacagcggcgtgtgtaccgacccccagccactgaaagaacagcccgccctgaacgacagccggtactgcctgagcagcagactgagagtgtccgccaccttctggcagaacccccggaaccacttcagatgccaggtgcagttctacggcctgagcgagaacgacgagtggacccaggacagagccaagcccgtgacccagatcgtgtctgccgaagcctggggcagagccgattgcggcatcaccagcgccagctaccaccagggcgtgctgagcgccaccatcctgtacgagatcctgctgggcaaggccaccctgtacgccgtgctggtgtctgccctggtgctgatggctatggtcaagcggaaggacagccggggaagggccaagcgatctggatctggagcaacaaacttctcactactcaaacaagcaggtgacgtggaggagaatcccgggcctactagtatggactggatttggcgcatccttttccttgtcggcgctgctaccggcgcccattcccagctccagttgcaagagagcggccctggcttggtaaaaccttccgagacccttagcctcacatgcacggttagtgggggcagcatttcctcaggtgattactattggggatggattcggcaacccccgggtaaaggattggagtggattggtcatatttattatagtggagcgacgtactacaacccaagtctcaaatccagggttacaatatccgtcgatacgagcaggaaccaattcagcttgaaactttctagtgtcaccgcagcagacacagccgtctattactgtacgcgggatgactccagtaattggcggtcccgagggcaagggacactggtcacggtctcctcatctggaggcggtggaagcggtggaggaggatctgtggacaacaagttcaacaaagagcggtacagcgcctactacgagatttggcaactgcccaacctgaacgtgcggcagaaggccgccttcatcggatctctgcaggacgaccctagccagagcgccaatctgctggccgaggccaagaagctgaacgacgcccaggcccctaaaggatccggcggcggaggatctggcggaggcggatctgggggcggaggctctttcgaacaagttcagcttcaacagcctggcgctgagctggtcaaacctggcgcttctgtgaagatgagctgcaaagccagcggctacgccttcagcagctactggatcaactggatgaagcagaaacccggccagggactcgaatggatcggccaaatctatcccggcgacggcgacaccaactacaacggcaagttcaagggcagagccacactgaccgccgatacctctagcagcacagcctacatgcagctgagcagcctgaccagcgaagatagcgccgtgtacttctgtgcccggtccatcacaacagtcgtgggctgcgctatggactattggggccagggaacaagcgtgaccgtgtctagtacgcgtatccagaaccctgatcctgccgtgtaccagctgcgggatagcaagagcagcgacaagagcgtgtgtctgttcaccgacttcgacagccagaccaacgtgtcccagagcaaggactccgacgtgtacatcaccgataagtgcgtgctggacatgcggagcatggacttcaagagcaactccgccgtggcctggtccaacaagtccgatttcgcctgcgccaacgccttcaacaacagcattatccccgaggacacattcttcccaagcagcgacgtgccctgcgacgtgaagctggtggaaaagagcttcgagacagacaccaacctgaacttccagaacctgagcgtgatcggcttcagaatcctgctgctgaaagtggccggctttaacctgctgatgaccctgcggctgtggtccagccgcgccaagagaagcggatctggcgtgaagcagaccctgaatttcgacctgctgaagctggctggcgacgtggaatccaacccaggcccttctagaggccatatgaccgagtacaagcccacggtgcgcctcgccacccgcgacgacgtccccagggccgtacgcaccctcgccgccgcgttcgccgactaccccgccacgcgccacaccgtcgatccggaccgccacatcgagcgggtcaccgagctgcaagaactcttcctcacgcgcgtcgggctcgacatcggcaaggtgtgggtcgcggacgacggcgccgcggtggcggtctggaccacgccggagagcgtcgaagcgggggcggtgttcgccgagatcggcccgcgcatggccgagttgagcggttcccggctggccgcgcagcaacagatggaaggcctcctggcgccgcaccggcccaaggagcccgcgtggttcctggccaccgtcggcgtctcgcccgaccaccagggcaagggtctgggcagcgccgtcgtgctccccggagtggaggcggccgagcgcgccggggtgcccgccttcctggagacctccgcgccccgcaacctccccttctacgagcggctcggcttcaccgtcaccgccgacgtcgaggtgcccgaaggaccgcgcacctggtgcatgacccgcaagcccggtgcctga

SEQ ID NO: 5932 - DNA, 4005 bp, Artificial Sequence
  Synthetic Polynucloetide
atggccttaccagtgaccgccttgctcctgccgctggccttgctgctccacgccgccaggccggaggtgcaactggtggaaagcggcggaggctctgtgcagacaggcggctctctgagactgacctgtgccgccagcggcagaaccagcagatcctatggcatgggctggttcagacaggcccctggcaaagaacgcgagttcgtgtccggcatctcttggagaggcgacagcaccggctacgccgatagcgtgaagggccggttcaccatcagccgggacaacgccaagaacaccgtggacctgcagatgaacagcctgaagcccgaggacaccgccatctactactgtgccgctgccgccggatctgcttggtacggcacactgtacgagtacgactactggggccagggcacccttgtgaccgtgtcatctggcggaggaagcggcggaggatctgaagtgcaactggtggaatctggaggctctctggtgcagccagggggaagcctgagactgtcttgtgccgcttccggcttcaccttcgacgactacgccatgagctgggtgcgccaggtgccaggcaaaggcctggaatgggtgtccagcatcaactggagcggcacccacaccgattacgccgactccgtgaaaggcagattcacaatcagcagaaacaacgccaacaataccctgtacctgcagatgaactccctgaagtctgaggatacagcagtgtattattgcgccaagaactggcgggacgccggcaccacttggtttgagaaaagcggctctgccggacagggaacccaagtgacagtgtcctccggtaccggcggaggcggatctggcggcggaggtagcggtggcggaggatctgaattcgacatccagatgacacagagccctagcagcctgtctgccagcgtgggagacagagtgaccatcacatgcaaggccagcgaccacatcaacaactggctggcctggtatcagcagaagcctggacaggcccctaagctgctgatctacggcgctaccacactggaaacaggcgtgcccagcagattttctggcagcggctctggcaccgactacaccctgacaatatccagcctccagcctgaggacttcgccacctactactgtcagcagagctggaacaccccttggacattcggccagggcaccaagctggaaatcaagagactcgaggacctgaagaacgtgttcccacctgaggtggccgtgttcgagcctagcgaggccgagatcagccacacccagaaagccaccctcgtgtgcctggctaccggcttctaccccgaccatgtggaactgtcttggtgggtcaacggcaaagaggtgcacagcggcgtgtgtaccgacccccagccactgaaagaacagcccgccctgaacgacagccggtactgcctgagcagcagactgagagtgtccgccaccttctggcagaacccccggaaccacttcagatgccaggtgcagttctacggcctgagcgagaacgacgagtggacccaggacagagccaagcccgtgacccagatcgtgtctgccgaagcctggggcagagccgattgcggctttaccagcgagagctaccagcagggcgtgctgagcgccaccatcctgtacgagatcctgctgggcaaggccaccctgtacgccgtgctggtgtctgccctggtgctgatggctatggtcaagcggaaggacagccggggaagggccaagcgatctggatctggagcaacaaacttctcactactcaaacaagcaggtgacgtggaggagaatcccgggcctactagtatggactggatttggcgcatccttttccttgtcggcgctgctaccggcgcccattcccagctccagttgcaagagagcggccctggcttggtaaaaccttccgagacccttagcctcacatgcacggttagtgggggcagcatttcctcaggtgattactattggggatggattcggcaacccccgggtaaaggattggagtggattggtcatatttattatagtggagcgacgtactacaacccaagtctcaaatccagggttacaatatccgtcgatacgagcaggaaccaattcagcttgaaactttctagtgtcaccgcagcagacacagccgtctattactgtacgcgggatgactccagtaattggcggtcccgagggcaagggacactggtcacggtctcctcatctggaggcggtggaagcggtggaggaggatctgtggacaacaagttcaacaaagagcggtacagcgcctactacgagatttggcaactgcccaacctgaacgtgcggcagaaggccgccttcatcggatctctgcaggacgaccctagccagagcgccaatctgctggccgaggccaagaagctgaacgacgcccaggcccctaaaggatccggcggcggaggatctggcggaggcggatctgggggcggaggctctttcgaacaagttcagcttcaacagcctggcgctgagctggtcaaacctggcgcttctgtgaagatgagctgcaaagccagcggctacgccttcagcagctactggatcaactggatgaagcagaaacccggccagggactcgaatggatcggccaaatctatcccggcgacggcgacaccaactacaacggcaagttcaagggcagagccacactgaccgccgatacctctagcagcacagcctacatgcagctgagcagcctgaccagcgaagatagcgccgtgtacttctgtgcccggtccatcacaacagtcgtgggctgcgctatggactattggggccagggaacaagcgtgaccgtgtctagtacgcgtatccagaaccctgatcctgccgtgtaccagctgcgggatagcaagagcagcgacaagagcgtgtgtctgttcaccgacttcgacagccagaccaacgtgtcccagagcaaggactccgacgtgtacatcaccgataagtgcgtgctggacatgcggagcatggacttcaagagcaactccgccgtggcctggtccaacaagtccgatttcgcctgcgccaacgccttcaacaacagcattatccccgaggacacattcttcccaagccccgagagcagctgcgacgtgaagctggtggaaaagagcttcgagacagacaccaacctgaacttccagaacctgagcgtgatcggcttcagaatcctgctgctgaaagtggccggctttaacctgctgatgaccctgcggctgtggtccagccgcgccaagagaagcggatctggcgtgaagcagaccctgaatttcgacctgctgaagctggctggcgacgtggaatccaacccaggcccttctagaggccatatgaccgagtacaagcccacggtgcgcctcgccacccgcgacgacgtccccagggccgtacgcaccctcgccgccgcgttcgccgactaccccgccacgcgccacaccgtcgatccggaccgccacatcgagcgggtcaccgagctgcaagaactcttcctcacgcgcgtcgggctcgacatcggcaaggtgtgggtcgcggacgacggcgccgcggtggcggtctggaccacgccggagagcgtcgaagcgggggcggtgttcgccgagatcggcccgcgcatggccgagttgagcggttcccggctggccgcgcagcaacagatggaaggcctcctggcgccgcaccggcccaaggagcccgcgtggttcctggccaccgtcggcgtctcgcccgaccaccagggcaagggtctgggcagcgccgtcgtgctccccggagtggaggcggccgagcgcgccggggtgcccgccttcctggagacctccgcgccccgcaacctccccttctacgagcggctcggcttcaccgtcaccgccgacgtcgaggtgcccgaaggaccgcgcacctggtgcatgacccgcaagcccggtgcctga

SEQ ID NO: 5933 - DNA, 3303 bp, Artificial Sequence
  Synthetic Polynucloetide
atggccttaccagtgaccgccttgctcctgccgctggccttgctgctccacgccgccaggccggaggtgcaactggtggaaagcggcggaggctctgtgcagacaggcggctctctgagactgacctgtgccgccagcggcagaaccagcagatcctatggcatgggctggttcagacaggcccctggcaaagaacgcgagttcgtgtccggcatctcttggagaggcgacagcaccggctacgccgatagcgtgaagggccggttcaccatcagccgggacaacgccaagaacaccgtggacctgcagatgaacagcctgaagcccgaggacaccgccatctactactgtgccgctgccgccggatctgcttggtacggcacactgtacgagtacgactactggggccagggcacccttgtgaccgtgtcatctggcggaggaagcggcggaggatctgaagtgcaactggtggaatctggaggctctctggtgcagccagggggaagcctgagactgtcttgtgccgcttccggcttcaccttcgacgactacgccatgagctgggtgcgccaggtgccaggcaaaggcctggaatgggtgtccagcatcaactggagcggcacccacaccgattacgccgactccgtgaaaggcagattcacaatcagcagaaacaacgccaacaataccctgtacctgcagatgaactccctgaagtctgaggatacagcagtgtattattgcgccaagaactggcgggacgccggcaccacttggtttgagaaaagcggctctgccggacagggaacccaagtgacagtgtcctccggtaccggcggaggcggatctggcggcggaggtagcggtggcggaggatctgaattcgacatccagatgacacagagccctagcagcctgtctgccagcgtgggagacagagtgaccatcacatgcaaggccagcgaccacatcaacaactggctggcctggtatcagcagaagcctggacaggcccctaagctgctgatctacggcgctaccacactggaaacaggcgtgcccagcagattttctggcagcggctctggcaccgactacaccctgacaatatccagcctccagcctgaggacttcgccacctactactgtcagcagagctggaacaccccttggacattcggccagggcaccaagctggaaatcaagagactcgaggacctgaagaacgtgttcccacctgaggtggccgtgttcgagcctagcgaggccgagatcagccacacccagaaagccaccctcgtgtgcctggctaccggcttctaccccgaccatgtggaactgtcttggtgggtcaacggcaaagaggtgcacagcggcgtgtgtaccgacccccagccactgaaagaacagcccgccctgaacgacagccggtactgcctgagcagcagactgagagtgtccgccaccttctggcagaacccccggaaccacttcagatgccaggtgcagttctacggcctgagcgagaacgacgagtggacccaggacagagccaagcccgtgacccagatcgtgtctgccgaagcctggggcagagccgattgcggctttaccagcgagagctaccagcagggcgtgctgagcgccaccatcctgtacgagatcctgctgggcaaggccaccctgtacgccgtgctggtgtctgccctggtgctgatggctatggtcaagcggaaggacagccggggaagggccaagcgatctggatctggagcaacaaacttctcactactcaaacaagcaggtgacgtggaggagaatcccgggcctactagtatggactggatttggcgcatccttttccttgtcggcgctgctaccggcgcccattcccagctccagttgcaagagagcggccctggcttggtaaaaccttccgagacccttagcctcacatgcacggttagtgggggcagcatttcctcaggtgattactattggggatggattcggcaacccccgggtaaaggattggagtggattggtcatatttattatagtggagcgacgtactacaacccaagtctcaaatccagggttacaatatccgtcgatacgagcaggaaccaattcagcttgaaactttctagtgtcaccgcagcagacacagccgtctattactgtacgcgggatgactccagtaattggcggtcccgagggcaagggacactggtcacggtctcctcatctggaggcggtggaagcggtggaggaggatctgtggacaacaagttcaacaaagagcggtacagcgcctactacgagatttggcaactgcccaacctgaacgtgcggcagaaggccgccttcatcggatctctgcaggacgaccctagccagagcgccaatctgctggccgaggccaagaagctgaacgacgcccaggcccctaaaggatccggcggcggaggatctggcggaggcggatctgggggcggaggctctttcgaacaagttcagcttcaacagcctggcgctgagctggtcaaacctggcgcttctgtgaagatgagctgcaaagccagcggctacgccttcagcagctactggatcaactggatgaagcagaaacccggccagggactcgaatggatcggccaaatctatcccggcgacggcgacaccaactacaacggcaagttcaagggcagagccacactgaccgccgatacctctagcagcacagcctacatgcagctgagcagcctgaccagcgaagatagcgccgtgtacttctgtgcccggtccatcacaacagtcgtgggctgcgctatggactattggggccagggaacaagcgtgaccgtgtctagtacgcgtatccagaaccctgatcctgccgtgtaccagctgcgggatagcaagagcagcgacaagagcgtgtgtctgttcaccgacttcgacagccagaccaacgtgtcccagagcaaggactccgacgtgtacatcaccgataagtgcgtgctggacatgcggagcatggacttcaagagcaactccgccgtggcctggtccaacaagtccgatttcgcctgcgccaacgccttcaacaacagcattatccccgaggacacattcttcccaagccccgagagcagctgcgacgtgaagctggtggaaaagagcttcgagacagacaccaacctgaacttccagaacctgagcgtgatcggcttcagaatcctgctgctgaaagtggccggctttaacctgctgatgaccctgcggctgtggtccagc

SEQ ID NO: 5934 - DNA, 3978 bp, Artificial Sequence
  Synthetic Polynucloetide
atggccttaccagtgaccgccttgctcctgccgctggccttgctgctccacgccgccaggccggaggtgcaactggtggaaagcggcggaggctctgtgcagacaggcggctctctgagactgacctgtgccgccagcggcagaaccagcagatcctatggcatgggctggttcagacaggcccctggcaaagaacgcgagttcgtgtccggcatctcttggagaggcgacagcaccggctacgccgatagcgtgaagggccggttcaccatcagccgggacaacgccaagaacaccgtggacctgcagatgaacagcctgaagcccgaggacaccgccatctactactgtgccgctgccgccggatctgcttggtacggcacactgtacgagtacgactactggggccagggcacccttgtgaccgtgtcatctggcggaggaagcggcggaggatctgaagtgcaactggtggaatctggaggctctctggtgcagccagggggaagcctgagactgtcttgtgccgcttccggcttcaccttcgacgactacgccatgagctgggtgcgccaggtgccaggcaaaggcctggaatgggtgtccagcatcaactggagcggcacccacaccgattacgccgactccgtgaaaggcagattcacaatcagcagaaacaacgccaacaataccctgtacctgcagatgaactccctgaagtctgaggatacagcagtgtattattgcgccaagaactggcgggacgccggcaccacttggtttgagaaaagcggctctgccggacagggaacccaagtgacagtgtcctccggtaccggcggaggcggatctggcggcggaggtagcggtggcggaggatctgaattcgacatccagatgacacagagccctagcagcctgtctgccagcgtgggagacagagtgaccatcacatgcaaggccagcgaccacatcaacaactggctggcctggtatcagcagaagcctggacaggcccctaagctgctgatctacggcgctaccacactggaaacaggcgtgcccagcagattttctggcagcggctctggcaccgactacaccctgacaatatccagcctccagcctgaggacttcgccacctactactgtcagcagagctggaacaccccttggacattcggccagggcaccaagctggaaatcaagagactcgaggacctgaagaacgtgttcccacctgaggtggccgtgttcgagcctagcgaggccgagatcagccacacccagaaagccaccctcgtgtgcctggctaccggcttctaccccgaccatgtggaactgtcttggtgggtcaacggcaaagaggtgcacagcggcgtgtgtaccgacccccagccactgaaagaacagcccgccctgaacgacagccggtactgcctgagcagcagactgagagtgtccgccaccttctggcagaacccccggaaccacttcagatgccaggtgcagttctacggcctgagcgagaacgacgagtggacccaggacagagccaagcccgtgacccagatcgtgtctgccgaagcctggggcagagccgattgcggctttaccagcgagagctaccagcagggcgtgctgagcgccaccatcctgtacgagatcctgctgggcaaggccaccctgtacgccgtgctggtgtctgccctggtgctgatggctatggtcaagcggaaggacagccggggaagggccaagcgatctggatctggagcaacaaacttctcactactcaaacaagcaggtgacgtggaggagaatcccgggcctactagtatggactggatttggcgcatccttttccttgtcggcgctgctaccggcgcccattcccagctccagttgcaagagagcggccctggcttggtaaaaccttccgagacccttagcctcacatgcacggttagtgggggcagcatttcctcaggtgattactattggggatggattcggcaacccccgggtaaaggattggagtggattggtcatatttattatagtggagcgacgtactacaacccaagtctcaaatccagggttacaatatccgtcgatacgagcaggaaccaattcagcttgaaactttctagtgtcaccgcagcagacacagccgtctattactgtacgcgggatgactccagtaattggcggtcccgagggcaagggacactggtcacggtctcctcatctggaggcggtggaagcggtggaggaggatctgtggacaacaagttcaacaaagagcggtacagcgcctactacgagatttggcaactgcccaacctgaacgtgcggcagaaggccgccttcatcggatctctgcaggacgaccctagccagagcgccaatctgctggccgaggccaagaagctgaacgacgcccaggcccctaaaggatccggcggcggaggatctggcggaggcggatctgggggcggaggctctttcgaacaagttcagcttcaacagcctggcgctgagctggtcaaacctggcgcttctgtgaagatgagctgcaaagccagcggctacgccttcagcagctactggatcaactggatgaagcagaaacccggccagggactcgaatggatcggccaaatctatcccggcgacggcgacaccaactacaacggcaagttcaagggcagagccacactgaccgccgatacctctagcagcacagcctacatgcagctgagcagcctgaccagcgaagatagcgccgtgtacttctgtgcccggtccatcacaacagtcgtgggctgcgctatggactattggggccagggaacaagcgtgaccgtgtctagtacgcgtatccagaaccctgatcctgccgtgtaccagctgcgggatagcaagagcagcgacaagagcgtgtgtctgttcaccgacttcgacagccagaccaacgtgtcccagagcaaggactccgacgtgtacatcaccgataagtgcgtgctggacatgcggagcatggacttcaagagcaactccgccgtggcctggtccaacaagtccgatttcgcctgcgccaacgccttcaacaacagcattatccccgaggacacattcttcccaagccccgagagcagctgcgacgtgaagctggtggaaaagagcttcgagacagacaccaacctgaacttccagaacctgagcgtgatcggcttcagaatcctgctgctgaaagtggccggctttaacctgctgatgaccctgcggctgtggtccagccgcgccaagagaagcggatctggcgtgaagcagaccctgaatttcgacctgctgaagctggctggcgacgtggaatccaacccaggcccttctagaggcgggatccacaccatggctacctacgaggtgctgtgcgaggtggcaagaaagctgggcaccgacgacagagaagtggtgctgttcctgctgaacgtgttcatccctcagcctacactggcccagctgatcggtgcactgagagccctgaaagaggaaggccggctgacctttcctctgctggccgaatgcctgttcagagccggaagaagggatctgctgcgggacctgctgcatctggaccccagatttctggaaagacacctggccggcaccatgagctacttcagcccttaccagctgaccgtgctgcacgttgacggcgaactgtgcgccagagatattcggagcctgatcttcctgagcaaggacaccatcggcagccggtctacccctcagacatttctgcactgggtgtactgcatggaaaacctggacctgctcggccccacagatgtggatgccctgatgtccatgctgagaagcctgagcagagtggacctccagagacaggtgcagacactgatgggactgcacctgagcggacctagccacagccagcactacagacacacccct

SEQ ID NO: 5935 - DNA, 3315 bp, Artificial Sequence
  Synthetic Polynucloetide
atggccttaccagtgaccgccttgctcctgccgctggccttgctgctccacgccgccaggccggaggtgcaactggtggaaagcggcggaggctctgtgcagacaggcggctctctgagactgacctgtgccgccagcggcagaaccagcagatcctatggcatgggctggttcagacaggcccctggcaaagaacgcgagttcgtgtccggcatctcttggagaggcgacagcaccggctacgccgatagcgtgaagggccggttcaccatcagccgggacaacgccaagaacaccgtggacctgcagatgaacagcctgaagcccgaggacaccgccatctactactgtgccgctgccgccggatctgcttggtacggcacactgtacgagtacgactactggggccagggcacccttgtgaccgtgtcatctggcggaggaagcggcggaggatctgaagtgcaactggtggaatctggaggctctctggtgcagccagggggaagcctgagactgtcttgtgccgcttccggcttcaccttcgacgactacgccatgagctgggtgcgccaggtgccaggcaaaggcctggaatgggtgtccagcatcaactggagcggcacccacaccgattacgccgactccgtgaaaggcagattcacaatcagcagaaacaacgccaacaataccctgtacctgcagatgaactccctgaagtctgaggatacagcagtgtattattgcgccaagaactggcgggacgccggcaccacttggtttgagaaaagcggctctgccggacagggaacccaagtgacagtgtcctccggtaccggcggaggcggatctggcggcggaggtagcggtggcggaggatctgaattcgacatccagatgacacagagccctagcagcctgtctgccagcgtgggagacagagtgaccatcacatgcaaggccagcgaccacatcaacaactggctggcctggtatcagcagaagcctggacaggcccctaagctgctgatctacggcgctaccacactggaaacaggcgtgcccagcagattttctggcagcggctctggcaccgactacaccctgacaatatccagcctccagcctgaggacttcgccacctactactgtcagcagagctggaacaccccttggacattcggccagggcaccaagctggaaatcaagagactcgagatccagaaccctgatcctgccgtgtaccagctgcgggatagcaagagcagcgacaagagcgtgtgtctgttcaccgacttcgacagccagaccaacgtgtcccagagcaaggactccgacgtgtacatcaccgataagtgcgtgctggacatgcggagcatggacttcaagagcaactccgccgtggcctggtccaacaagtccgatttcgcctgcgccaacgccttcaacaacagcattatccccgaggacacattcttcccaagccccgagagcagctgcgacgtgaagctggtggaaaagagcttcgagacagacaccaacctgaacttccagaacctgagcgtgatcggcttcagaatcctgctgctgaaagtggccggctttaacctgctgatgaccctgcggctgtggtccagccgcgccaagagaagcggatctggcgtgaagcagaccctgaatttcgacctgctgaagctggctggcgacgtggaatccaacccaggccctactagtatggactggatttggcgcatccttttccttgtcggcgctgctaccggcgcccattcccagctccagttgcaagagagcggccctggcttggtaaaaccttccgagacccttagcctcacatgcacggttagtgggggcagcatttcctcaggtgattactattggggatggattcggcaacccccgggtaaaggattggagtggattggtcatatttattatagtggagcgacgtactacaacccaagtctcaaatccagggttacaatatccgtcgatacgagcaggaaccaattcagcttgaaactttctagtgtcaccgcagcagacacagccgtctattactgtacgcgggatgactccagtaattggcggtcccgagggcaagggacactggtcacggtctcctcatctggaggcggtggaagcggtggaggaggatctgtggacaacaagttcaacaaagagcggtacagcgcctactacgagatttggcaactgcccaacctgaacgtgcggcagaaggccgccttcatcggatctctgcaggacgaccctagccagagcgccaatctgctggccgaggccaagaagctgaacgacgcccaggcccctaaaggatccggcggcggaggatctggcggaggcggatctgggggcggaggctctttcgaacaagttcagcttcaacagcctggcgctgagctggtcaaacctggcgcttctgtgaagatgagctgcaaagccagcggctacgccttcagcagctactggatcaactggatgaagcagaaacccggccagggactcgaatggatcggccaaatctatcccggcgacggcgacaccaactacaacggcaagttcaagggcagagccacactgaccgccgatacctctagcagcacagcctacatgcagctgagcagcctgaccagcgaagatagcgccgtgtacttctgtgcccggtccatcacaacagtcgtgggctgcgctatggactattggggccagggaacaagcgtgaccgtgtctagtacgcgtgaggacctgaagaacgtgttcccacctgaggtggccgtgttcgagcctagcgaggccgagatcagccacacccagaaagccaccctcgtgtgcctggctaccggcttctaccccgaccatgtggaactgtcttggtgggtcaacggcaaagaggtgcacagcggcgtgtgtaccgacccccagccactgaaagaacagcccgccctgaacgacagccggtactgcctgagcagcagactgagagtgtccgccaccttctggcagaacccccggaaccacttcagatgccaggtgcagttctacggcctgagcgagaacgacgagtggacccaggacagagccaagcccgtgacccagatcgtgtctgccgaagcctggggcagagccgattgcggctttaccagcgagagctaccagcagggcgtgctgagcgccaccatcctgtacgagatcctgctgggcaaggccaccctgtacgccgtgctggtgtctgccctggtgctgatggctatggtcaagcggaaggacagccgggga

SEQ ID NO: 5936 - DNA, 3981 bp, Artificial Sequence
  Synthetic Polynucloetide
atggccttaccagtgaccgccttgctcctgccgctggccttgctgctccacgccgccaggccggaggtgcaactggtggaaagcggcggaggctctgtgcagacaggcggctctctgagactgacctgtgccgccagcggcagaaccagcagatcctatggcatgggctggttcagacaggcccctggcaaagaacgcgagttcgtgtccggcatctcttggagaggcgacagcaccggctacgccgatagcgtgaagggccggttcaccatcagccgggacaacgccaagaacaccgtggacctgcagatgaacagcctgaagcccgaggacaccgccatctactactgtgccgctgccgccggatctgcttggtacggcacactgtacgagtacgactactggggccagggcacccttgtgaccgtgtcatctggcggaggaagcggcggaggatctgaagtgcaactggtggaatctggaggctctctggtgcagccagggggaagcctgagactgtcttgtgccgcttccggcttcaccttcgacgactacgccatgagctgggtgcgccaggtgccaggcaaaggcctggaatgggtgtccagcatcaactggagcggcacccacaccgattacgccgactccgtgaaaggcagattcacaatcagcagaaacaacgccaacaataccctgtacctgcagatgaactccctgaagtctgaggatacagcagtgtattattgcgccaagaactggcgggacgccggcaccacttggtttgagaaaagcggctctgccggacagggaacccaagtgacagtgtcctccggtaccggcggaggcggatctggcggcggaggtagcggtggcggaggatctgaattcgacatccagatgacacagagccctagcagcctgtctgccagcgtgggagacagagtgaccatcacatgcaaggccagcgaccacatcaacaactggctggcctggtatcagcagaagcctggacaggcccctaagctgctgatctacggcgctaccacactggaaacaggcgtgcccagcagattttctggcagcggctctggcaccgactacaccctgacaatatccagcctccagcctgaggacttcgccacctactactgtcagcagagctggaacaccccttggacattcggccagggcaccaagctggaaatcaagagactcgagatccagaaccctgatcctgccgtgtaccagctgcgggatagcaagagcagcgacaagagcgtgtgtctgttcaccgacttcgacagccagaccaacgtgtcccagagcaaggactccgacgtgtacatcaccgataagtgcgtgctggacatgcggagcatggacttcaagagcaactccgccgtggcctggtccaacaagtccgatttcgcctgcgccaacgccttcaacaacagcattatccccgaggacacattcttcccaagccccgagagcagctgcgacgtgaagctggtggaaaagagcttcgagacagacaccaacctgaacttccagaacctgagcgtgatcggcttcagaatcctgctgctgaaagtggccggctttaacctgctgatgaccctgcggctgtggtccagccgcgccaagagaagcggatctggcgtgaagcagaccctgaatttcgacctgctgaagctggctggcgacgtggaatccaacccaggccctactagtatggactggatttggcgcatccttttccttgtcggcgctgctaccggcgcccattcccagctccagttgcaagagagcggccctggcttggtaaaaccttccgagacccttagcctcacatgcacggttagtgggggcagcatttcctcaggtgattactattggggatggattcggcaacccccgggtaaaggattggagtggattggtcatatttattatagtggagcgacgtactacaacccaagtctcaaatccagggttacaatatccgtcgatacgagcaggaaccaattcagcttgaaactttctagtgtcaccgcagcagacacagccgtctattactgtacgcgggatgactccagtaattggcggtcccgagggcaagggacactggtcacggtctcctcatctggaggcggtggaagcggtggaggaggatctgtggacaacaagttcaacaaagagcggtacagcgcctactacgagatttggcaactgcccaacctgaacgtgcggcagaaggccgccttcatcggatctctgcaggacgaccctagccagagcgccaatctgctggccgaggccaagaagctgaacgacgcccaggcccctaaaggatccggcggcggaggatctggcggaggcggatctgggggcggaggctctttcgaacaagttcagcttcaacagcctggcgctgagctggtcaaacctggcgcttctgtgaagatgagctgcaaagccagcggctacgccttcagcagctactggatcaactggatgaagcagaaacccggccagggactcgaatggatcggccaaatctatcccggcgacggcgacaccaactacaacggcaagttcaagggcagagccacactgaccgccgatacctctagcagcacagcctacatgcagctgagcagcctgaccagcgaagatagcgccgtgtacttctgtgcccggtccatcacaacagtcgtgggctgcgctatggactattggggccagggaacaagcgtgaccgtgtctagtacgcgtgaggacctgaagaacgtgttcccacctgaggtggccgtgttcgagcctagcgaggccgagatcagccacacccagaaagccaccctcgtgtgcctggctaccggcttctaccccgaccatgtggaactgtcttggtgggtcaacggcaaagaggtgcacagcggcgtgtgtaccgacccccagccactgaaagaacagcccgccctgaacgacagccggtactgcctgagcagcagactgagagtgtccgccaccttctggcagaacccccggaaccacttcagatgccaggtgcagttctacggcctgagcgagaacgacgagtggacccaggacagagccaagcccgtgacccagatcgtgtctgccgaagcctggggcagagccgattgcggctttaccagcgagagctaccagcagggcgtgctgagcgccaccatcctgtacgagatcctgctgggcaaggccaccctgtacgccgtgctggtgtctgccctggtgctgatggctatggtcaagcggaaggacagccggggaagggccaagcgatctggatctggagcaacaaacttctcactactcaaacaagcaggtgacgtggaggagaatcccgggccttctagaggcgggatccacaccatggctacctacgaggtgctgtgcgaggtggcaagaaagctgggcaccgacgacagagaagtggtgctgttcctgctgaacgtgttcatccctcagcctacactggcccagctgatcggtgcactgagagccctgaaagaggaaggccggctgacctttcctctgctggccgaatgcctgttcagagccggaagaagggatctgctgcgggacctgctgcatctggaccccagatttctggaaagacacctggccggcaccatgagctacttcagcccttaccagctgaccgtgctgcacgttgacggcgaactgtgcgccagagatattcggagcctgatcttcctgagcaaggacaccatcggcagccggtctacccctcagacatttctgcactgggtgtactgcatggaaaacctggacctgctcggccccacagatgtggatgccctgatgtccatgctgagaagcctgagcagagtggacctccagagacaggtgcagacactgatgggactgcacctgagcggacctagccacagccagcactacagacacacccct

SEQ ID NO: 5937 - DNA, 4005 bp, Artificial Sequence
  Synthetic Polynucloetide
atggccttaccagtgaccgccttgctcctgccgctggccttgctgctccacgccgccaggccggaggtgcaactggtggaaagcggcggaggctctgtgcagacaggcggctctctgagactgacctgtgccgccagcggcagaaccagcagatcctatggcatgggctggttcagacaggcccctggcaaagaacgcgagttcgtgtccggcatctcttggagaggcgacagcaccggctacgccgatagcgtgaagggccggttcaccatcagccgggacaacgccaagaacaccgtggacctgcagatgaacagcctgaagcccgaggacaccgccatctactactgtgccgctgccgccggatctgcttggtacggcacactgtacgagtacgactactggggccagggcacccttgtgaccgtgtcatctggcggaggaagcggcggaggatctgaagtgcaactggtggaatctggaggctctctggtgcagccagggggaagcctgagactgtcttgtgccgcttccggcttcaccttcgacgactacgccatgagctgggtgcgccaggtgccaggcaaaggcctggaatgggtgtccagcatcaactggagcggcacccacaccgattacgccgactccgtgaaaggcagattcacaatcagcagaaacaacgccaacaataccctgtacctgcagatgaactccctgaagtctgaggatacagcagtgtattattgcgccaagaactggcgggacgccggcaccacttggtttgagaaaagcggctctgccggacagggaacccaagtgacagtgtcctccggtaccggcggaggcggatctggcggcggaggtagcggtggcggaggatctgaattcgacatccagatgacacagagccctagcagcctgtctgccagcgtgggagacagagtgaccatcacatgcaaggccagcgaccacatcaacaactggctggcctggtatcagcagaagcctggacaggcccctaagctgctgatctacggcgctaccacactggaaacaggcgtgcccagcagattttctggcagcggctctggcaccgactacaccctgacaatatccagcctccagcctgaggacttcgccacctactactgtcagcagagctggaacaccccttggacattcggccagggcaccaagctggaaatcaagagactcgaggacctgaagaacgtgttcccacctgaggtggccgtgttcgagcctagcgaggccgagatcagccacacccagaaagccaccctcgtgtgcctggctaccggcttctaccccgaccatgtggaactgtcttggtgggtcaacggcaaagaggtgcacagcggcgtgtctaccgacccccagccactgaaagaacagcccgccctgaacgacagccggtactgcctgagcagcagactgagagtgtccgccaccttctggcagaacccccggaaccacttcagatgccaggtgcagttctacggcctgagcgagaacgacgagtggacccaggacagagccaagcccgtgacccagatcgtgtctgccgaagcctggggcagagccgattgcggctttaccagcgagagctaccagcagggcgtgctgagcgccaccatcctgtacgagatcctgctgggcaaggccaccctgtacgccgtgctggtgtctgccctggtgctgatggctatggtcaagcggaaggacagccggggaagggccaagcgatctggatctggagcaacaaacttctcactactcaaacaagcaggtgacgtggaggagaatcccgggcctactagtatggactggatttggcgcatccttttccttgtcggcgctgctaccggcgcccattcccagctccagttgcaagagagcggccctggcttggtaaaaccttccgagacccttagcctcacatgcacggttagtgggggcagcatttcctcaggtgattactattggggatggattcggcaacccccgggtaaaggattggagtggattggtcatatttattatagtggagcgacgtactacaacccaagtctcaaatccagggttacaatatccgtcgatacgagcaggaaccaattcagcttgaaactttctagtgtcaccgcagcagacacagccgtctattactgtacgcgggatgactccagtaattggcggtcccgagggcaagggacactggtcacggtctcctcatctggaggcggtggaagcggtggaggaggatctgtggacaacaagttcaacaaagagcggtacagcgcctactacgagatttggcaactgcccaacctgaacgtgcggcagaaggccgccttcatcggatctctgcaggacgaccctagccagagcgccaatctgctggccgaggccaagaagctgaacgacgcccaggcccctaaaggatccggcggcggaggatctggcggaggcggatctgggggcggaggctctttcgaacaagttcagcttcaacagcctggcgctgagctggtcaaacctggcgcttctgtgaagatgagctgcaaagccagcggctacgccttcagcagctactggatcaactggatgaagcagaaacccggccagggactcgaatggatcggccaaatctatcccggcgacggcgacaccaactacaacggcaagttcaagggcagagccacactgaccgccgatacctctagcagcacagcctacatgcagctgagcagcctgaccagcgaagatagcgccgtgtacttctgtgcccggtccatcacaacagtcgtgggctgcgctatggactattggggccagggaacaagcgtgaccgtgtctagtacgcgtatccagaaccctgatcctgccgtgtaccagctgcgggatagcaagagcagcgacaagagcgtgtgtctgttcaccgacttcgacagccagaccaacgtgtcccagagcaaggactccgacgtgtacatcaccgataagaccgtgctggacatgcggagcatggacttcaagagcaactccgccgtggcctggtccaacaagtccgatttcgcctgcgccaacgccttcaacaacagcattatccccgaggacacattcttcccaagccccgagagcagctgcgacgtgaagctggtggaaaagagcttcgagacagacaccaacctgaacttccagaacctgagcgtgatcggcttcagaatcctgctgctgaaagtggccggctttaacctgctgatgaccctgcggctgtggtccagccgcgccaagagaagcggatctggcgtgaagcagaccctgaatttcgacctgctgaagctggctggcgacgtggaatccaacccaggcccttctagaggccatatgaccgagtacaagcccacggtgcgcctcgccacccgcgacgacgtccccagggccgtacgcaccctcgccgccgcgttcgccgactaccccgccacgcgccacaccgtcgatccggaccgccacatcgagcgggtcaccgagctgcaagaactcttcctcacgcgcgtcgggctcgacatcggcaaggtgtgggtcgcggacgacggcgccgcggtggcggtctggaccacgccggagagcgtcgaagcgggggcggtgttcgccgagatcggcccgcgcatggccgagttgagcggttcccggctggccgcgcagcaacagatggaaggcctcctggcgccgcaccggcccaaggagcccgcgtggttcctggccaccgtcggcgtctcgcccgaccaccagggcaagggtctgggcagcgccgtcgtgctccccggagtggaggcggccgagcgcgccggggtgcccgccttcctggagacctccgcgccccgcaacctccccttctacgagcggctcggcttcaccgtcaccgccgacgtcgaggtgcccgaaggaccgcgcacctggtgcatgacccgcaagcccggtgcctga

SEQ ID NO: 5938 - DNA, 4251 bp, Artificial Sequence
  Synthetic Polynucloetide
atggccttaccagtgaccgccttgctcctgccgctggccttgctgctccacgccgccaggccggaggtgcaactggtggaaagcggcggaggctctgtgcagacaggcggctctctgagactgacctgtgccgccagcggcagaaccagcagatcctatggcatgggctggttcagacaggcccctggcaaagaacgcgagttcgtgtccggcatctcttggagaggcgacagcaccggctacgccgatagcgtgaagggccggttcaccatcagccgggacaacgccaagaacaccgtggacctgcagatgaacagcctgaagcccgaggacaccgccatctactactgtgccgctgccgccggatctgcttggtacggcacactgtacgagtacgactactggggccagggcacccttgtgaccgtgtcatctggcggaggaagcggcggaggatctgaagtgcaactggtggaatctggaggctctctggtgcagccagggggaagcctgagactgtcttgtgccgcttccggcttcaccttcgacgactacgccatgagctgggtgcgccaggtgccaggcaaaggcctggaatgggtgtccagcatcaactggagcggcacccacaccgattacgccgactccgtgaaaggcagattcacaatcagcagaaacaacgccaacaataccctgtacctgcagatgaactccctgaagtctgaggatacagcagtgtattattgcgccaagaactggcgggacgccggcaccacttggtttgagaaaagcggctctgccggacagggaacccaagtgacagtgtcctccggtaccggcggaggcggatctggcggcggaggtagcggtggcggaggatctgaattcgacatccagatgacacagagccctagcagcctgtctgccagcgtgggagacagagtgaccatcacatgcaaggccagcgaccacatcaacaactggctggcctggtatcagcagaagcctggacaggcccctaagctgctgatctacggcgctaccacactggaaacaggcgtgcccagcagattttctggcagcggctctggcaccgactacaccctgacaatatccagcctccagcctgaggacttcgccacctactactgtcagcagagctggaacaccccttggacattcggccagggcaccaagctggaaatcaagagactcgaggacctgaagaacgtgttcccacctgaggtggccgtgttcgagcctagcgaggccgagatcagccacacccagaaagccaccctcgtgtgcctggctaccggcttctaccccgaccatgtggaactgtcttggtgggtcaacggcaaagaggtgcacagcggcgtgtctaccgacccccagccactgaaagaacagcccgccctgaacgacagccggtactgcctgagcagcagactgagagtgtccgccaccttctggcagaacccccggaaccacttcagatgccaggtgcagttctacggcctgagcgagaacgacgagtggacccaggacagagccaagcccgtgacccagatcgtgtctgccgaagcctggggcagagccgattgcggctttaccagcgagagctaccagcagggcgtgctgagcgccaccatcctgtacgagatcctgctgggcaaggccaccctgtacgccgtgctggtgtctgccctggtgctgatggctatggtcaagcggaaggacagccggggaagggccaagcgatctggatctggagcaacaaacttctcactactcaaacaagcaggtgacgtggaggagaatcccgggcctactagtatggactggatttggcgcatccttttccttgtcggcgctgctaccggcgcccattcccagctccagttgcaagagagcggccctggcttggtaaaaccttccgagacccttagcctcacatgcacggttagtgggggcagcatttcctcaggtgattactattggggatggattcggcaacccccgggtaaaggattggagtggattggtcatatttattatagtggagcgacgtactacaacccaagtctcaaatccagggttacaatatccgtcgatacgagcaggaaccaattcagcttgaaactttctagtgtcaccgcagcagacacagccgtctattactgtacgcgggatgactccagtaattggcggtcccgagggcaagggacactggtcacggtctcctcatctggaggcggtggaagcggtggaggaggatctgtggacaacaagttcaacaaagagcggtacagcgcctactacgagatttggcaactgcccaacctgaacgtgcggcagaaggccgccttcatcggatctctgcaggacgaccctagccagagcgccaatctgctggccgaggccaagaagctgaacgacgcccaggcccctaaaggatccggcggcggaggatctggcggaggcggatctgggggcggaggctctttcgaacaagttcagcttcaacagcctggcgctgagctggtcaaacctggcgcttctgtgaagatgagctgcaaagccagcggctacgccttcagcagctactggatcaactggatgaagcagaaacccggccagggactcgaatggatcggccaaatctatcccggcgacggcgacaccaactacaacggcaagttcaagggcagagccacactgaccgccgatacctctagcagcacagcctacatgcagctgagcagcctgaccagcgaagatagcgccgtgtacttctgtgcccggtccatcacaacagtcgtgggctgcgctatggactattggggccagggaacaagcgtgaccgtgtctagtacgcgtgagcagaaactgatctcggaagaggatgggagcggcaccccattcccttctctggcccctcccatcatgctgctggtggacggcaagcagcagatggtggtcgtgtgcctggtgctggatgtggccccacctggactggacagccccatctggtttagcgccggcaatggctctgccctggacgcctttacctacggcccaagccctgccaccgatggcacctggacaaatctggcccacctgagcctgcccagcgaggaactggcttcttgggagcctctcgtgtgccacacaggacctggcgctgagggacacagcagatccacccagcctatgcacctgtctggcgaggccagcaccgccagaacctgtcctcaggaacctctgagaggcacccctggcggagcactgtggctgggagtgctgagactgctgctgttcaagctgctgctgtttgacctgctgctgacctgctcctgtctgtgcgatcctgccggccctctgccttctcctgccaccaccacaagactgagagccctgggcagccacagactgcaccctgccacagagacaggcggcagagaggccacaagcagccctagaccccagcccagagacagaagatggggcgataccccccctggcagaaagcctggatctccagtccgcgccaagagaagcggatctggcgtgaagcagaccctgaatttcgacctgctgaagctggctggcgacgtggaatccaacccaggcccttctagaggccatatgaccgagtacaagcccacggtgcgcctcgccacccgcgacgacgtccccagggccgtacgcaccctcgccgccgcgttcgccgactaccccgccacgcgccacaccgtcgatccggaccgccacatcgagcgggtcaccgagctgcaagaactcttcctcacgcgcgtcgggctcgacatcggcaaggtgtgggtcgcggacgacggcgccgcggtggcggtctggaccacgccggagagcgtcgaagcgggggcggtgttcgccgagatcggcccgcgcatggccgagttgagcggttcccggctggccgcgcagcaacagatggaaggcctcctggcgccgcaccggcccaaggagcccgcgtggttcctggccaccgtcggcgtctcgcccgaccaccagggcaagggtctgggcagcgccgtcgtgctccccggagtggaggcggccgagcgcgccggggtgcccgccttcctggagacctccgcgccccgcaacctccccttctacgagcggctcggcttcaccgtcaccgccgacgtcgaggtgcccgaaggaccgcgcacctggtgcatgacccgcaagcccggtgcctga

SEQ ID NO: 5939 - DNA, 4116 bp, Artificial Sequence
  Synthetic Polynucloetide
atggccttaccagtgaccgccttgctcctgccgctggccttgctgctccacgccgccaggccggaggtgcaactggtggaaagcggcggaggctctgtgcagacaggcggctctctgagactgacctgtgccgccagcggcagaaccagcagatcctatggcatgggctggttcagacaggcccctggcaaagaacgcgagttcgtgtccggcatctcttggagaggcgacagcaccggctacgccgatagcgtgaagggccggttcaccatcagccgggacaacgccaagaacaccgtggacctgcagatgaacagcctgaagcccgaggacaccgccatctactactgtgccgctgccgccggatctgcttggtacggcacactgtacgagtacgactactggggccagggcacccttgtgaccgtgtcatctggcggaggaagcggcggaggatctgaagtgcaactggtggaatctggaggctctctggtgcagccagggggaagcctgagactgtcttgtgccgcttccggcttcaccttcgacgactacgccatgagctgggtgcgccaggtgccaggcaaaggcctggaatgggtgtccagcatcaactggagcggcacccacaccgattacgccgactccgtgaaaggcagattcacaatcagcagaaacaacgccaacaataccctgtacctgcagatgaactccctgaagtctgaggatacagcagtgtattattgcgccaagaactggcgggacgccggcaccacttggtttgagaaaagcggctctgccggacagggaacccaagtgacagtgtcctccggtaccggcggaggcggatctggcggcggaggtagcggtggcggaggatctgaattcgacatccagatgacacagagccctagcagcctgtctgccagcgtgggagacagagtgaccatcacatgcaaggccagcgaccacatcaacaactggctggcctggtatcagcagaagcctggacaggcccctaagctgctgatctacggcgctaccacactggaaacaggcgtgcccagcagattttctggcagcggctctggcaccgactacaccctgacaatatccagcctccagcctgaggacttcgccacctactactgtcagcagagctggaacaccccttggacattcggccagggcaccaagctggaaatcaagagactcgaggggaaaccaattcccaaccctcttctgggactggattcaaccggcagcggcgacaagcagctggacgccgacgtgtcccccaagcctaccatcttcctgccctctatcgccgagacaaagctccagaaggccggcacctacctgtgcctgctggaaaagttcttcccagatgtgattaagatccactggcaggaaaagaagtccaacaccatcctgggcagccaggaaggcaacaccatgaagaccaacgacacctacatgaagttcagctggctgaccgtgcccgagaagtccctggacaaagaacacagatgcatcgtgcggcacgaaaacaacaagaacggcgtggaccaggaaatcatcttcccacccatcaagaccgatgtgattacaatggaccccaaggacaactgctccaaggacgccaacgataccctgctgctccagctgaccaacaccagcgcctactacatgtacttgttgctgctgctgaagtccgtggtgtacttcgccatcatcacatgctgcctgctgcggagaaccgccttctgctgcaacggcgagaagtctagggccaagcgatctggatctggagcaacaaacttctcactactcaaacaagcaggtgacgtggaggagaatcccgggcctactagtatggactggatttggcgcatccttttccttgtcggcgctgctaccggcgcccattcccagctccagttgcaagagagcggccctggcttggtaaaaccttccgagacccttagcctcacatgcacggttagtgggggcagcatttcctcaggtgattactattggggatggattcggcaacccccgggtaaaggattggagtggattggtcatatttattatagtggagcgacgtactacaacccaagtctcaaatccagggttacaatatccgtcgatacgagcaggaaccaattcagcttgaaactttctagtgtcaccgcagcagacacagccgtctattactgtacgcgggatgactccagtaattggcggtcccgagggcaagggacactggtcacggtctcctcatctggaggcggtggaagcggtggaggaggatctgtggacaacaagttcaacaaagagcggtacagcgcctactacgagatttggcaactgcccaacctgaacgtgcggcagaaggccgccttcatcggatctctgcaggacgaccctagccagagcgccaatctgctggccgaggccaagaagctgaacgacgcccaggcccctaaaggatccggcggcggaggatctggcggaggcggatctgggggcggaggctctttcgaacaagttcagcttcaacagcctggcgctgagctggtcaaacctggcgcttctgtgaagatgagctgcaaagccagcggctacgccttcagcagctactggatcaactggatgaagcagaaacccggccagggactcgaatggatcggccaaatctatcccggcgacggcgacaccaactacaacggcaagttcaagggcagagccacactgaccgccgatacctctagcagcacagcctacatgcagctgagcagcctgaccagcgaagatagcgccgtgtacttctgtgcccggtccatcacaacagtcgtgggctgcgctatggactattggggccagggaacaagcgtgaccgtgtctagtacgcgtgagcagaaactgatctcggaagaggatgggagcggcagccagcctcacaccaagcccagcgtgttcgtgatgaagaacggcaccaacgtggcctgcctcgtgaaagagttctaccccaaggacatcaggatcaacctggtgtccagcaagaagatcaccgagttcgaccccgccatcgtgatctcccccagcggcaagtacaacgccgtgaagctggggaagtacgaggacagcaacagcgtgacctgctccgtgcagcacgacaacaagaccgtgcacagcaccgactttgaagtgaaaaccgactccaccgaccacgtgaagcccaaagagacagagaacaccaagcagcccagcaagagctgccacaagcccaaggccatcgtgcacaccgagaaagtgaacatgatgagcctgaccgtgctgggcctgcggatgctgttcgccaaaaccgtggccgtgaacttcctgctgaccgccaagctgttcttcctccgcgccaagagaagcggatctggcgtgaagcagaccctgaatttcgacctgctgaagctggctggcgacgtggaatccaacccaggcccttctagaggccatatgaccgagtacaagcccacggtgcgcctcgccacccgcgacgacgtccccagggccgtacgcaccctcgccgccgcgttcgccgactaccccgccacgcgccacaccgtcgatccggaccgccacatcgagcgggtcaccgagctgcaagaactcttcctcacgcgcgtcgggctcgacatcggcaaggtgtgggtcgcggacgacggcgccgcggtggcggtctggaccacgccggagagcgtcgaagcgggggcggtgttcgccgagatcggcccgcgcatggccgagttgagcggttcccggctggccgcgcagcaacagatggaaggcctcctggcgccgcaccggcccaaggagcccgcgtggttcctggccaccgtcggcgtctcgcccgaccaccagggcaagggtctgggcagcgccgtcgtgctccccggagtggaggcggccgagcgcgccggggtgcccgccttcctggagacctccgcgccccgcaacctccccttctacgagcggctcggcttcaccgtcaccgccgacgtcgaggtgcccgaaggaccgcgcacctggtgcatgacccgcaagcccggtgcctga

SEQ ID NO: 5940 - DNA, 3327 bp, Artificial Sequence
  Synthetic Polynucloetide
atggccttaccagtgaccgccttgctcctgccgctggccttgctgctccacgccgccaggccggaggtgcaactggtggaaagcggcggaggctctgtgcagacaggcggctctctgagactgacctgtgccgccagcggcagaaccagcagatcctatggcatgggctggttcagacaggcccctggcaaagaacgcgagttcgtgtccggcatctcttggagaggcgacagcaccggctacgccgatagcgtgaagggccggttcaccatcagccgggacaacgccaagaacaccgtggacctgcagatgaacagcctgaagcccgaggacaccgccatctactactgtgccgctgccgccggatctgcttggtacggcacactgtacgagtacgactactggggccagggcacccttgtgaccgtgtcatctggcggaggaagcggcggaggatctgaagtgcaactggtggaatctggaggctctctggtgcagccagggggaagcctgagactgtcttgtgccgcttccggcttcaccttcgacgactacgccatgagctgggtgcgccaggtgccaggcaaaggcctggaatgggtgtccagcatcaactggagcggcacccacaccgattacgccgactccgtgaaaggcagattcacaatcagcagaaacaacgccaacaataccctgtacctgcagatgaactccctgaagtctgaggatacagcagtgtattattgcgccaagaactggcgggacgccggcaccacttggtttgagaaaagcggctctgccggacagggaacccaagtgacagtgtcctccggtaccggcggaggcggatctggcggcggaggtagcggtggcggaggatctgaattcgacatccagatgacacagagccctagcagcctgtctgccagcgtgggagacagagtgaccatcacatgcaaggccagcgaccacatcaacaactggctggcctggtatcagcagaagcctggacaggcccctaagctgctgatctacggcgctaccacactggaaacaggcgtgcccagcagattttctggcagcggctctggcaccgactacaccctgacaatatccagcctccagcctgaggacttcgccacctactactgtcagcagagctggaacaccccttggacattcggccagggcaccaagctggaaatcaagagactcgagagccagcctcacaccaagcccagcgtgttcgtgatgaagaacggcaccaacgtggcctgcctcgtgaaagagttctaccccaaggacatcaggatcaacctggtgtccagcaagaagatcaccgagttcgaccccgccatcgtgatctcccccagcggcaagtacaacgccgtgaagctggggaagtacgaggacagcaacagcgtgacctgctccgtgcagcacgacaacaagaccgtgcacagcaccgactttgaagtgaaaaccgactccaccgaccacgtgaagcccaaagagacagagaacaccaagcagcccagcaagagctgccacaagcccaaggccatcgtgcacaccgagaaagtgaacatgatgagcctgaccgtgctgggcctgcggatgctgttcgccaaaaccgtggccgtgaacttcctgctgaccgccaagctgttcttcctcagggccaagcgatctggatctggagcaacaaacttctcactactcaaacaagcaggtgacgtggaggagaatcccgggcctactagtatggactggatttggcgcatccttttccttgtcggcgctgctaccggcgcccattcccagctccagttgcaagagagcggccctggcttggtaaaaccttccgagacccttagcctcacatgcacggttagtgggggcagcatttcctcaggtgattactattggggatggattcggcaacccccgggtaaaggattggagtggattggtcatatttattatagtggagcgacgtactacaacccaagtctcaaatccagggttacaatatccgtcgatacgagcaggaaccaattcagcttgaaactttctagtgtcaccgcagcagacacagccgtctattactgtacgcgggatgactccagtaattggcggtcccgagggcaagggacactggtcacggtctcctcatctggaggcggtggaagcggtggaggaggatctgtggacaacaagttcaacaaagagcggtacagcgcctactacgagatttggcaactgcccaacctgaacgtgcggcagaaggccgccttcatcggatctctgcaggacgaccctagccagagcgccaatctgctggccgaggccaagaagctgaacgacgcccaggcccctaaaggatccggcggcggaggatctggcggaggcggatctgggggcggaggctctttcgaacaagttcagcttcaacagcctggcgctgagctggtcaaacctggcgcttctgtgaagatgagctgcaaagccagcggctacgccttcagcagctactggatcaactggatgaagcagaaacccggccagggactcgaatggatcggccaaatctatcccggcgacggcgacaccaactacaacggcaagttcaagggcagagccacactgaccgccgatacctctagcagcacagcctacatgcagctgagcagcctgaccagcgaagatagcgccgtgtacttctgtgcccggtccatcacaacagtcgtgggctgcgctatggactattggggccagggaacaagcgtgaccgtgtctagtacgcgtgacaagcagctggacgccgacgtgtcccccaagcctaccatcttcctgccctctatcgccgagacaaagctccagaaggccggcacctacctgtgcctgctggaaaagttcttcccagatgtgattaagatccactggcaggaaaagaagtccaacaccatcctgggcagccaggaaggcaacaccatgaagaccaacgacacctacatgaagttcagctggctgaccgtgcccgagaagtccctggacaaagaacacagatgcatcgtgcggcacgaaaacaacaagaacggcgtggaccaggaaatcatcttcccacccatcaagaccgatgtgattacaatggaccccaaggacaactgctccaaggacgccaacgataccctgctgctccagctgaccaacaccagcgcctactacatgtacttgttgctgctgctgaagtccgtggtgtacttcgccatcatcacatgctgcctgctgcggagaaccgccttctgctgcaacggcgagaagtct

SEQ ID NO: 5941 - DNA, 4536 bp, Artificial Sequence
  Synthetic Polynucloetide
atggccttaccagtgaccgccttgctcctgccgctggccttgctgctccacgccgccaggccggaggtgcaactggtggaaagcggcggaggctctgtgcagacaggcggctctctgagactgacctgtgccgccagcggcagaaccagcagatcctatggcatgggctggttcagacaggcccctggcaaagaacgcgagttcgtgtccggcatctcttggagaggcgacagcaccggctacgccgatagcgtgaagggccggttcaccatcagccgggacaacgccaagaacaccgtggacctgcagatgaacagcctgaagcccgaggacaccgccatctactactgtgccgctgccgccggatctgcttggtacggcacactgtacgagtacgactactggggccagggcacccttgtgaccgtgtcatctggcggaggaagcggcggaggatctgaagtgcaactggtggaatctggaggctctctggtgcagccagggggaagcctgagactgtcttgtgccgcttccggcttcaccttcgacgactacgccatgagctgggtgcgccaggtgccaggcaaaggcctggaatgggtgtccagcatcaactggagcggcacccacaccgattacgccgactccgtgaaaggcagattcacaatcagcagaaacaacgccaacaataccctgtacctgcagatgaactccctgaagtctgaggatacagcagtgtattattgcgccaagaactggcgggacgccggcaccacttggtttgagaaaagcggctctgccggacagggaacccaagtgacagtgtcctccggtaccggcggaggcggatctggcggcggaggtagcggtggcggaggatctgaattcgacatccagatgacacagagccctagcagcctgtctgccagcgtgggagacagagtgaccatcacatgcaaggccagcgaccacatcaacaactggctggcctggtatcagcagaagcctggacaggcccctaagctgctgatctacggcgctaccacactggaaacaggcgtgcccagcagattttctggcagcggctctggcaccgactacaccctgacaatatccagcctccagcctgaggacttcgccacctactactgtcagcagagctggaacaccccttggacattcggccagggcaccaagctggaaatcaagagaggacagcctaaggccaatcctaccgtgacactgttccctccaagcagcgaagaactccaggccaacaaggccacacttgtgtgcctgatctccgacttctaccctggggctgtgacagtggcttggaaggccgatggatctcctgtgaaagccggcgtggaaaccaccaagccatccaagcagagcaacaacaaatacgccgccagctcctacctgagcctgacacctgagcagtggaagtcccacagatcctacagctgccaagtgacccacgaaggcagcaccgtggaaaagacagtggcccctacagagtgcagcggatcccagagcttcggcctgctggaccccaagctgtgctacctgctggatggcatcctgttcatctacggcgtgatcctgaccgccctgttcctgagagtgaagttcagcagaagcgccgacgcccctgcctaccagcagggacagaaccaactgtacaacgagctgaacctgggcagacgggaagagtacgacgtgctggacaagcggagaggcagggaccctgagatgggcggaaagccccagcggagaaagaacccccaggaaggactgtataacgaactccagaaagacaagatggccgaagcctacagcgagatcggcatgaagggcgagcggagaagaggcaagggccacgatggcctgtaccagggcctgagcaccgccaccaaggacacctatgacgccctgcacatgcaggccctgcctccaagaagggccaagcgatctggatctggagcaacaaacttctcactactcaaacaagcaggtgacgtggaggagaatcccgggcctactagtatggactggatttggcgcatccttttccttgtcggcgctgctaccggcgcccattcccagctccagttgcaagagagcggccctggcttggtaaaaccttccgagacccttagcctcacatgcacggttagtgggggcagcatttcctcaggtgattactattggggatggattcggcaacccccgggtaaaggattggagtggattggtcatatttattatagtggagcgacgtactacaacccaagtctcaaatccagggttacaatatccgtcgatacgagcaggaaccaattcagcttgaaactttctagtgtcaccgcagcagacacagccgtctattactgtacgcgggatgactccagtaattggcggtcccgagggcaagggacactggtcacggtctcctcatctggaggcggtggaagcggtggaggaggatctgtggacaacaagttcaacaaagagcggtacagcgcctactacgagatttggcaactgcccaacctgaacgtgcggcagaaggccgccttcatcggatctctgcaggacgaccctagccagagcgccaatctgctggccgaggccaagaagctgaacgacgcccaggcccctaaaggatccggcggcggaggatctggcggaggcggatctgggggcggaggctctttcgaacaagttcagcttcaacagcctggcgctgagctggtcaaacctggcgcttctgtgaagatgagctgcaaagccagcggctacgccttcagcagctactggatcaactggatgaagcagaaacccggccagggactcgaatggatcggccaaatctatcccggcgacggcgacaccaactacaacggcaagttcaagggcagagccacactgaccgccgatacctctagcagcacagcctacatgcagctgagcagcctgaccagcgaagatagcgccgtgtacttctgtgcccggtccatcacaacagtcgtgggctgcgctatggactattggggccagggaacaagcgtgaccgtgtctagtgcctctacaaagggaccctccgtgtttcctctggctcccagcagcaagtctacaagcggaggaacagccgctctgggctgcctggtcaaggattactttcccgagcctgtgaccgtgtcctggaatagcggagcactgacaagcggcgtgcacacctttccagccgtgctgcaaagcagcggcctgtactctctgagcagcgtggtcacagtgcctagctctagcctgggcacccagacctacatctgcaatgtgaaccacaagcctagcaacaccaaggtggacaagagagtggaacccaagagctgtggtacccagagttttgggttgttggaccctaaattgtgctatctgttggacggaatcctgttcatttacggagtgatcctgaccgcattgttcctgcgggttaagttttccagatccgcagacgcacccgcttaccaacaagggcagaaccaactctacaatgaacttaatttggggcggagggaagagtacgacgttctggacaaaaggaggggacgagatcccgagatgggcggaaagcctcagcgaaggaagaatccgcaagaggggctttataacgaactccagaaagataaaatggcagaagcctatagtgagattgggatgaagggagaaaggaggaggggtaaaggtcacgatgggttgtaccaaggattgagcacagccactaaagatacctatgatgcgctccacatgcaggccctgccgccaagacgcgccaagagaagcggatctggcgtgaagcagaccctgaatttcgacctgctgaagctggctggcgacgtggaatccaacccaggcccttctagaggccatatgaccgagtacaagcccacggtgcgcctcgccacccgcgacgacgtccccagggccgtacgcaccctcgccgccgcgttcgccgactaccccgccacgcgccacaccgtcgatccggaccgccacatcgagcgggtcaccgagctgcaagaactcttcctcacgcgcgtcgggctcgacatcggcaaggtgtgggtcgcggacgacggcgccgcggtggcggtctggaccacgccggagagcgtcgaagcgggggcggtgttcgccgagatcggcccgcgcatggccgagttgagcggttcccggctggccgcgcagcaacagatggaaggcctcctggcgccgcaccggcccaaggagcccgcgtggttcctggccaccgtcggcgtctcgcccgaccaccagggcaagggtctgggcagcgccgtcgtgctccccggagtggaggcggccgagcgcgccggggtgcccgccttcctggagacctccgcgccccgcaacctccccttctacgagcggctcggcttcaccgtcaccgccgacgtcgaggtgcccgaaggaccgcgcacctggtgcatgacccgcaagcccggtgcctga

SEQ ID NO: 5942 - DNA, 3891 bp, Artificial Sequence
  Synthetic Polynucloetide
atggccttaccagtgaccgccttgctcctgccgctggccttgctgctccacgccgccaggccggaggtgcaactggtggaaagcggcggaggctctgtgcagacaggcggctctctgagactgacctgtgccgccagcggcagaaccagcagatcctatggcatgggctggttcagacaggcccctggcaaagaacgcgagttcgtgtccggcatctcttggagaggcgacagcaccggctacgccgatagcgtgaagggccggttcaccatcagccgggacaacgccaagaacaccgtggacctgcagatgaacagcctgaagcccgaggacaccgccatctactactgtgccgctgccgccggatctgcttggtacggcacactgtacgagtacgactactggggccagggcacccttgtgaccgtgtcatctggcggaggaagcggcggaggatctgaagtgcaactggtggaatctggaggctctctggtgcagccagggggaagcctgagactgtcttgtgccgcttccggcttcaccttcgacgactacgccatgagctgggtgcgccaggtgccaggcaaaggcctggaatgggtgtccagcatcaactggagcggcacccacaccgattacgccgactccgtgaaaggcagattcacaatcagcagaaacaacgccaacaataccctgtacctgcagatgaactccctgaagtctgaggatacagcagtgtattattgcgccaagaactggcgggacgccggcaccacttggtttgagaaaagcggctctgccggacagggaacccaagtgacagtgtcctccggtaccggcggaggcggatctggcggcggaggtagcggtggcggaggatctgaattcgacatccagatgacacagagccctagcagcctgtctgccagcgtgggagacagagtgaccatcacatgcaaggccagcgaccacatcaacaactggctggcctggtatcagcagaagcctggacaggcccctaagctgctgatctacggcgctaccacactggaaacaggcgtgcccagcagattttctggcagcggctctggcaccgactacaccctgacaatatccagcctccagcctgaggacttcgccacctactactgtcagcagagctggaacaccccttggacattcggccagggcaccaagctggaaatcaagagactcgaggacctgaagaacgtgttcccacctgaggtggccgtgttcgagcctagcgaggccgagatcagccacacccagaaagccaccctcgtgtgcctggctaccggcttctaccccgaccatgtggaactgtcttggtgggtcaacggcaaagaggtgcacagcggcgtgtctaccgacccccagccactgaaagaacagcccgccctgaacgacagccggtactgcctgagcagcagactgagagtgtccgccaccttctggcagaacccccggaaccacttcagatgccaggtgcagttctacggcctgagcgagaacgacgagtggacccaggacagagccaagcccgtgacccagatcgtgtctgccgaagcctggggcagagccgattgcggatcccagagcttcggcctgctggaccccaagctgtgctacctgctggatggcatcctgttcatctacggcgtgatcctgaccgccctgttcctgagagtgaagttcagcagaagcgccgacgcccctgcctaccagcagggacagaaccaactgtacaacgagctgaacctgggcagacgggaagagtacgacgtgctggacaagcggagaggcagggaccctgagatgggcggaaagccccagcggagaaagaacccccaggaaggactgtataacgaactccagaaagacaagatggccgaagcctacagcgagatcggcatgaagggcgagcggagaagaggcaagggccacgatggcctgtaccagggcctgagcaccgccaccaaggacacctatgacgccctgcacatgcaggccctgcctccaagaagggccaagcgatctggatctggagcaacaaacttctcactactcaaacaagcaggtgacgtggaggagaatcccgggcctactagtatggactggatttggcgcatccttttccttgtcggcgctgctaccggcgcccattcccagctccagttgcaagagagcggccctggcttggtaaaaccttccgagacccttagcctcacatgcacggttagtgggggcagcatttcctcaggtgattactattggggatggattcggcaacccccgggtaaaggattggagtggattggtcatatttattatagtggagcgacgtactacaacccaagtctcaaatccagggttacaatatccgtcgatacgagcaggaaccaattcagcttgaaactttctagtgtcaccgcagcagacacagccgtctattactgtacgcgggatgactccagtaattggcggtcccgagggcaagggacactggtcacggtctcctcatctggaggcggtggaagcggtggaggaggatctgtggacaacaagttcaacaaagagcggtacagcgcctactacgagatttggcaactgcccaacctgaacgtgcggcagaaggccgccttcatcggatctctgcaggacgaccctagccagagcgccaatctgctggccgaggccaagaagctgaacgacgcccaggcccctaaaggatccggcggcggaggatctggcggaggcggatctgggggcggaggctctttcgaacaagttcagcttcaacagcctggcgctgagctggtcaaacctggcgcttctgtgaagatgagctgcaaagccagcggctacgccttcagcagctactggatcaactggatgaagcagaaacccggccagggactcgaatggatcggccaaatctatcccggcgacggcgacaccaactacaacggcaagttcaagggcagagccacactgaccgccgatacctctagcagcacagcctacatgcagctgagcagcctgaccagcgaagatagcgccgtgtacttctgtgcccggtccatcacaacagtcgtgggctgcgctatggactattggggccagggaacaagcgtgaccgtgtctagtacgcgtatccagaaccctgatcctgccgtgtaccagctgcgggatagcaagagcagcgacaagagcgtgtgtctgttcaccgacttcgacagccagaccaacgtgtcccagagcaaggactccgacgtgtacatcaccgataagaccgtgctggacatgcggagcatggacttcaagagcaactccgccgtggcctggtccaacaagtccgatttcgcctgcgccaacgccttcaacaacagcattatccccgaggacacattcttcccaagccccgagagcagctgcggtacccagagttttgggttgttggaccctaaattgtgctatctgttggacggaatcctgttcatttacggagtgatcctgaccgcattgttcctgcgggttaagttttccagatccgcagacgcacccgcttaccaacaagggcagaaccaactctacaatgaacttaatttggggcggagggaagagtacgacgttctggacaaaaggaggggacgagatcccgagatgggcggaaagcctcagcgaaggaagaatccgcaagaggggctttataacgaactccagaaagataaaatggcagaagcctatagtgagattgggatgaagggagaaaggaggaggggtaaaggtcacgatgggttgtaccaaggattgagcacagccactaaagatacctatgatgcgctccacatgcaggccctgccgccaaga

SEQ ID NO: 5943 - DNA, 3891 bp, Artificial Sequence
  Synthetic Polynucloetide
atggccttaccagtgaccgccttgctcctgccgctggccttgctgctccacgccgccaggccggaggtgcaactggtggaaagcggcggaggctctgtgcagacaggcggctctctgagactgacctgtgccgccagcggcagaaccagcagatcctatggcatgggctggttcagacaggcccctggcaaagaacgcgagttcgtgtccggcatctcttggagaggcgacagcaccggctacgccgatagcgtgaagggccggttcaccatcagccgggacaacgccaagaacaccgtggacctgcagatgaacagcctgaagcccgaggacaccgccatctactactgtgccgctgccgccggatctgcttggtacggcacactgtacgagtacgactactggggccagggcacccttgtgaccgtgtcatctggcggaggaagcggcggaggatctgaagtgcaactggtggaatctggaggctctctggtgcagccagggggaagcctgagactgtcttgtgccgcttccggcttcaccttcgacgactacgccatgagctgggtgcgccaggtgccaggcaaaggcctggaatgggtgtccagcatcaactggagcggcacccacaccgattacgccgactccgtgaaaggcagattcacaatcagcagaaacaacgccaacaataccctgtacctgcagatgaactccctgaagtctgaggatacagcagtgtattattgcgccaagaactggcgggacgccggcaccacttggtttgagaaaagcggctctgccggacagggaacccaagtgacagtgtcctccggtaccggcggaggcggatctggcggcggaggtagcggtggcggaggatctgaattcgacatccagatgacacagagccctagcagcctgtctgccagcgtgggagacagagtgaccatcacatgcaaggccagcgaccacatcaacaactggctggcctggtatcagcagaagcctggacaggcccctaagctgctgatctacggcgctaccacactggaaacaggcgtgcccagcagattttctggcagcggctctggcaccgactacaccctgacaatatccagcctccagcctgaggacttcgccacctactactgtcagcagagctggaacaccccttggacattcggccagggcaccaagctggaaatcaagagactcgaggacctgaagaacgtgttcccacctgaggtggccgtgttcgagcctagcaaggccgagatcgcccacacccagaaagccaccctcgtgtgcctggctaccggcttctaccccgaccatgtggaactgtcttggtgggtcaacggcaaagaggtgcacagcggcgtgtgtaccgacccccagccactgaaagaacagcccgccctgaacgacagccggtactgcctgagcagcagactgagagtgtccgccaccttctggcagaacccccggaaccacttcagatgccaggtgcagttctacggcctgagcgagaacgacgagtggacccaggacagagccaagcccgtgacccagatcgtgtctgccgaagcctggggcagagccgattgcggatcccagagcttcggcctgctggaccccaagctgtgctacctgctggatggcatcctgttcatctacggcgtgatcctgaccgccctgttcctgagagtgaagttcagcagaagcgccgacgcccctgcctaccagcagggacagaaccaactgtacaacgagctgaacctgggcagacgggaagagtacgacgtgctggacaagcggagaggcagggaccctgagatgggcggaaagccccagcggagaaagaacccccaggaaggactgtataacgaactccagaaagacaagatggccgaagcctacagcgagatcggcatgaagggcgagcggagaagaggcaagggccacgatggcctgtaccagggcctgagcaccgccaccaaggacacctatgacgccctgcacatgcaggccctgcctccaagaagggccaagcgatctggatctggagcaacaaacttctcactactcaaacaagcaggtgacgtggaggagaatcccgggcctactagtatggactggatttggcgcatccttttccttgtcggcgctgctaccggcgcccattcccagctccagttgcaagagagcggccctggcttggtaaaaccttccgagacccttagcctcacatgcacggttagtgggggcagcatttcctcaggtgattactattggggatggattcggcaacccccgggtaaaggattggagtggattggtcatatttattatagtggagcgacgtactacaacccaagtctcaaatccagggttacaatatccgtcgatacgagcaggaaccaattcagcttgaaactttctagtgtcaccgcagcagacacagccgtctattactgtacgcgggatgactccagtaattggcggtcccgagggcaagggacactggtcacggtctcctcatctggaggcggtggaagcggtggaggaggatctgtggacaacaagttcaacaaagagcggtacagcgcctactacgagatttggcaactgcccaacctgaacgtgcggcagaaggccgccttcatcggatctctgcaggacgaccctagccagagcgccaatctgctggccgaggccaagaagctgaacgacgcccaggcccctaaaggatccggcggcggaggatctggcggaggcggatctgggggcggaggctctttcgaacaagttcagcttcaacagcctggcgctgagctggtcaaacctggcgcttctgtgaagatgagctgcaaagccagcggctacgccttcagcagctactggatcaactggatgaagcagaaacccggccagggactcgaatggatcggccaaatctatcccggcgacggcgacaccaactacaacggcaagttcaagggcagagccacactgaccgccgatacctctagcagcacagcctacatgcagctgagcagcctgaccagcgaagatagcgccgtgtacttctgtgcccggtccatcacaacagtcgtgggctgcgctatggactattggggccagggaacaagcgtgaccgtgtctagtacgcgtatccagaaccctgatcctgccgtgtaccagctgcgggatagcaagagcagcgacaagagcgtgtgtctgttcaccgacttcgacagccagaccaacgtgtcccagagcaaggactccgacgtgtacatcaccgataagtgcgtgctggacatgcggagcatggacttcaagagcaactccgccgtggcctggtccaacaagtccgatttcgcctgcgccaacgccttcaacaacagcattatccccgaggacacattcttcccaagcagcgacgtgccctgcggtacccagagttttgggttgttggaccctaaattgtgctatctgttggacggaatcctgttcatttacggagtgatcctgaccgcattgttcctgcgggttaagttttccagatccgcagacgcacccgcttaccaacaagggcagaaccaactctacaatgaacttaatttggggcggagggaagagtacgacgttctggacaaaaggaggggacgagatcccgagatgggcggaaagcctcagcgaaggaagaatccgcaagaggggctttataacgaactccagaaagataaaatggcagaagcctatagtgagattgggatgaagggagaaaggaggaggggtaaaggtcacgatgggttgtaccaaggattgagcacagccactaaagatacctatgatgcgctccacatgcaggccctgccgccaaga

SEQ ID NO: 5944 - DNA, 4104 bp, Artificial Sequence
  Synthetic Polynucloetide
atggccttaccagtgaccgccttgctcctgccgctggccttgctgctccacgccgccaggccggaggtgcaactggtggaaagcggcggaggctctgtgcagacaggcggctctctgagactgacctgtgccgccagcggcagaaccagcagatcctatggcatgggctggttcagacaggcccctggcaaagaacgcgagttcgtgtccggcatctcttggagaggcgacagcaccggctacgccgatagcgtgaagggccggttcaccatcagccgggacaacgccaagaacaccgtggacctgcagatgaacagcctgaagcccgaggacaccgccatctactactgtgccgctgccgccggatctgcttggtacggcacactgtacgagtacgactactggggccagggcacccttgtgaccgtgtcatctggcggaggaagcggcggaggatctgaagtgcaactggtggaatctggaggctctctggtgcagccagggggaagcctgagactgtcttgtgccgcttccggcttcaccttcgacgactacgccatgagctgggtgcgccaggtgccaggcaaaggcctggaatgggtgtccagcatcaactggagcggcacccacaccgattacgccgactccgtgaaaggcagattcacaatcagcagaaacaacgccaacaataccctgtacctgcagatgaactccctgaagtctgaggatacagcagtgtattattgcgccaagaactggcgggacgccggcaccacttggtttgagaaaagcggctctgccggacagggaacccaagtgacagtgtcctccggtaccggcggaggcggatctggcggcggaggtagcggtggcggaggatctgaattcgacatccagatgacacagagccctagcagcctgtctgccagcgtgggagacagagtgaccatcacatgcaaggccagcgaccacatcaacaactggctggcctggtatcagcagaagcctggacaggcccctaagctgctgatctacggcgctaccacactggaaacaggcgtgcccagcagattttctggcagcggctctggcaccgactacaccctgacaatatccagcctccagcctgaggacttcgccacctactactgtcagcagagctggaacaccccttggacattcggccagggcaccaagctggaaatcaagagactcgaggggaaaccaattcccaaccctcttctgggactggattcaaccggcagcggcgaggacctgaagaacgtgttcccacctgaggtggccgtgttcgagcctagcgaggccgagatcagccacacccagaaagccaccctcgtgtgcctggctaccggcttctaccccgaccatgtggaactgtcttggtgggtcaacggcaaagaggtgcacagcggcgtgtctaccgacccccagccactgaaagaacagcccgccctgaacgacagccggtactgcctgagcagcagactgagagtgtccgccaccttctggcagaacccccggaaccacttcagatgccaggtgcagttctacggcctgagcgagaacgacgagtggacccaggacagagccaagcccgtgacccagatcgtgtctgccgaagcctggggcagagccgattgcggatcccagagcttcggcctgctggaccccaagctgtgctacctgctggatggcatcctgttcatctacggcgtgatcctgaccgccctgttcctgagagtgaagttcagcagaagcgccgacgcccctgcctaccagcagggacagaaccaactgtacaacgagctgaacctgggcagacgggaagagtacgacgtgctggacaagcggagaggcagggaccctgagatgggcggaaagccccagcggagaaagaacccccaggaaggactgtataacgaactccagaaagacaagatggccgaagcctacagcgagatcggcatgaagggcgagcggagaagaggcaagggccacgatggcctgtaccagggcctgagcaccgccaccaaggacacctatgacgccctgcacatgcaggccctgcctccaagaagggccaagcgatctggatctggagcaacaaacttctcactactcaaacaagcaggtgacgtggaggagaatcccgggcctactagtatggactggatttggcgcatccttttccttgtcggcgctgctaccggcgcccattcccagctccagttgcaagagagcggccctggcttggtaaaaccttccgagacccttagcctcacatgcacggttagtgggggcagcatttcctcaggtgattactattggggatggattcggcaacccccgggtaaaggattggagtggattggtcatatttattatagtggagcgacgtactacaacccaagtctcaaatccagggttacaatatccgtcgatacgagcaggaaccaattcagcttgaaactttctagtgtcaccgcagcagacacagccgtctattactgtacgcgggatgactccagtaattggcggtcccgagggcaagggacactggtcacggtctcctcatctggaggcggtggaagcggtggaggaggatctgtggacaacaagttcaacaaagagcggtacagcgcctactacgagatttggcaactgcccaacctgaacgtgcggcagaaggccgccttcatcggatctctgcaggacgaccctagccagagcgccaatctgctggccgaggccaagaagctgaacgacgcccaggcccctaaaggatccggcggcggaggatctggcggaggcggatctgggggcggaggctctttcgaacaagttcagcttcaacagcctggcgctgagctggtcaaacctggcgcttctgtgaagatgagctgcaaagccagcggctacgccttcagcagctactggatcaactggatgaagcagaaacccggccagggactcgaatggatcggccaaatctatcccggcgacggcgacaccaactacaacggcaagttcaagggcagagccacactgaccgccgatacctctagcagcacagcctacatgcagctgagcagcctgaccagcgaagatagcgccgtgtacttctgtgcccggtccatcacaacagtcgtgggctgcgctatggactattggggccagggaacaagcgtgaccgtgtctagtacgcgtgagcagaaactgatctcggaagaggatgggagcggcatccagaaccctgatcctgccgtgtaccagctgcgggatagcaagagcagcgacaagagcgtgtgtctgttcaccgacttcgacagccagaccaacgtgtcccagagcaaggactccgacgtgtacatcaccgataagaccgtgctggacatgcggagcatggacttcaagagcaactccgccgtggcctggtccaacaagtccgatttcgcctgcgccaacgccttcaacaacagcattatccccgaggacacattcttcccaagccccgagagcagctgcggtacccagagttttgggttgttggaccctaaattgtgctatctgttggacggaatcctgttcatttacggagtgatcctgaccgcattgttcctgaggagcaagcggtcacggctgctccacagcgattacatgaatatgacaccacgaagaccgggtcctactcgcaaacactaccaaccctacgcacctccccgcgactttgcagcgtaccgatctcgggttaagttttccagatccgcagacgcacccgcttaccaacaagggcagaaccaactctacaatgaacttaatttggggcggagggaagagtacgacgttctggacaaaaggaggggacgagatcccgagatgggcggaaagcctcagcgaaggaagaatccgcaagaggggctttataacgaactccagaaagataaaatggcagaagcctatagtgagattgggatgaagggagaaaggaggaggggtaaaggtcacgatgggttgtaccaaggattgagcacagccactaaagatacctatgatgcgctccacatgcaggccctgccgccaaga

SEQ ID NO: 5945 - DNA, 4227 bp, Artificial Sequence
  Synthetic Polynucloetide
atggccttaccagtgaccgccttgctcctgccgctggccttgctgctccacgccgccaggccggaggtgcaactggtggaaagcggcggaggctctgtgcagacaggcggctctctgagactgacctgtgccgccagcggcagaaccagcagatcctatggcatgggctggttcagacaggcccctggcaaagaacgcgagttcgtgtccggcatctcttggagaggcgacagcaccggctacgccgatagcgtgaagggccggttcaccatcagccgggacaacgccaagaacaccgtggacctgcagatgaacagcctgaagcccgaggacaccgccatctactactgtgccgctgccgccggatctgcttggtacggcacactgtacgagtacgactactggggccagggcacccttgtgaccgtgtcatctggcggaggaagcggcggaggatctgaagtgcaactggtggaatctggaggctctctggtgcagccagggggaagcctgagactgtcttgtgccgcttccggcttcaccttcgacgactacgccatgagctgggtgcgccaggtgccaggcaaaggcctggaatgggtgtccagcatcaactggagcggcacccacaccgattacgccgactccgtgaaaggcagattcacaatcagcagaaacaacgccaacaataccctgtacctgcagatgaactccctgaagtctgaggatacagcagtgtattattgcgccaagaactggcgggacgccggcaccacttggtttgagaaaagcggctctgccggacagggaacccaagtgacagtgtcctccggtaccggcggaggcggatctggcggcggaggtagcggtggcggaggatctgaattcgacatccagatgacacagagccctagcagcctgtctgccagcgtgggagacagagtgaccatcacatgcaaggccagcgaccacatcaacaactggctggcctggtatcagcagaagcctggacaggcccctaagctgctgatctacggcgctaccacactggaaacaggcgtgcccagcagattttctggcagcggctctggcaccgactacaccctgacaatatccagcctccagcctgaggacttcgccacctactactgtcagcagagctggaacaccccttggacattcggccagggcaccaagctggaaatcaagagactcgaggggaaaccaattcccaaccctcttctgggactggattcaaccggcagcggcgaggacctgaagaacgtgttcccacctgaggtggccgtgttcgagcctagcgaggccgagatcagccacacccagaaagccaccctcgtgtgcctggctaccggcttctaccccgaccatgtggaactgtcttggtgggtcaacggcaaagaggtgcacagcggcgtgtctaccgacccccagccactgaaagaacagcccgccctgaacgacagccggtactgcctgagcagcagactgagagtgtccgccaccttctggcagaacccccggaaccacttcagatgccaggtgcagttctacggcctgagcgagaacgacgagtggacccaggacagagccaagcccgtgacccagatcgtgtctgccgaagcctggggcagagccgattgcggatcccagagcttcggcctgctggaccccaagctgtgctacctgctggatggcatcctgttcatctacggcgtgatcctgaccgccctgttcctgaggagtaagaggagcaggctcctgcacagtgactacatgaacatgactccacgccgccccggacccacccgcaagcattaccagccctatgccccaccacgcgacttcgcagcctatcgctccagagtgaagttcagcagaagcgccgacgcccctgcctaccagcagggacagaaccaactgtacaacgagctgaacctgggcagacgggaagagtacgacgtgctggacaagcggagaggcagggaccctgagatgggcggaaagccccagcggagaaagaacccccaggaaggactgtataacgaactccagaaagacaagatggccgaagcctacagcgagatcggcatgaagggcgagcggagaagaggcaagggccacgatggcctgtaccagggcctgagcaccgccaccaaggacacctatgacgccctgcacatgcaggccctgcctccaagaagggccaagcgatctggatctggagcaacaaacttctcactactcaaacaagcaggtgacgtggaggagaatcccgggcctactagtatggactggatttggcgcatccttttccttgtcggcgctgctaccggcgcccattcccagctccagttgcaagagagcggccctggcttggtaaaaccttccgagacccttagcctcacatgcacggttagtgggggcagcatttcctcaggtgattactattggggatggattcggcaacccccgggtaaaggattggagtggattggtcatatttattatagtggagcgacgtactacaacccaagtctcaaatccagggttacaatatccgtcgatacgagcaggaaccaattcagcttgaaactttctagtgtcaccgcagcagacacagccgtctattactgtacgcgggatgactccagtaattggcggtcccgagggcaagggacactggtcacggtctcctcatctggaggcggtggaagcggtggaggaggatctgtggacaacaagttcaacaaagagcggtacagcgcctactacgagatttggcaactgcccaacctgaacgtgcggcagaaggccgccttcatcggatctctgcaggacgaccctagccagagcgccaatctgctggccgaggccaagaagctgaacgacgcccaggcccctaaaggatccggcggcggaggatctggcggaggcggatctgggggcggaggctctttcgaacaagttcagcttcaacagcctggcgctgagctggtcaaacctggcgcttctgtgaagatgagctgcaaagccagcggctacgccttcagcagctactggatcaactggatgaagcagaaacccggccagggactcgaatggatcggccaaatctatcccggcgacggcgacaccaactacaacggcaagttcaagggcagagccacactgaccgccgatacctctagcagcacagcctacatgcagctgagcagcctgaccagcgaagatagcgccgtgtacttctgtgcccggtccatcacaacagtcgtgggctgcgctatggactattggggccagggaacaagcgtgaccgtgtctagtacgcgtgagcagaaactgatctcggaagaggatgggagcggcatccagaaccctgatcctgccgtgtaccagctgcgggatagcaagagcagcgacaagagcgtgtgtctgttcaccgacttcgacagccagaccaacgtgtcccagagcaaggactccgacgtgtacatcaccgataagaccgtgctggacatgcggagcatggacttcaagagcaactccgccgtggcctggtccaacaagtccgatttcgcctgcgccaacgccttcaacaacagcattatccccgaggacacattcttcccaagccccgagagcagctgcggtacccagagttttgggttgttggaccctaaattgtgctatctgttggacggaatcctgttcatttacggagtgatcctgaccgcattgttcctgaggagcaagcggtcacggctgctccacagcgattacatgaatatgacaccacgaagaccgggtcctactcgcaaacactaccaaccctacgcacctccccgcgactttgcagcgtaccgatctcgggttaagttttccagatccgcagacgcacccgcttaccaacaagggcagaaccaactctacaatgaacttaatttggggcggagggaagagtacgacgttctggacaaaaggaggggacgagatcccgagatgggcggaaagcctcagcgaaggaagaatccgcaagaggggctttataacgaactccagaaagataaaatggcagaagcctatagtgagattgggatgaagggagaaaggaggaggggtaaaggtcacgatgggttgtaccaaggattgagcacagccactaaagatacctatgatgcgctccacatgcaggccctgccgccaaga

SEQ ID NO: 5946 - DNA, 4110 bp, Artificial Sequence
  Synthetic Polynucloetide
atggccttaccagtgaccgccttgctcctgccgctggccttgctgctccacgccgccaggccggaggtgcaactggtggaaagcggcggaggctctgtgcagacaggcggctctctgagactgacctgtgccgccagcggcagaaccagcagatcctatggcatgggctggttcagacaggcccctggcaaagaacgcgagttcgtgtccggcatctcttggagaggcgacagcaccggctacgccgatagcgtgaagggccggttcaccatcagccgggacaacgccaagaacaccgtggacctgcagatgaacagcctgaagcccgaggacaccgccatctactactgtgccgctgccgccggatctgcttggtacggcacactgtacgagtacgactactggggccagggcacccttgtgaccgtgtcatctggcggaggaagcggcggaggatctgaagtgcaactggtggaatctggaggctctctggtgcagccagggggaagcctgagactgtcttgtgccgcttccggcttcaccttcgacgactacgccatgagctgggtgcgccaggtgccaggcaaaggcctggaatgggtgtccagcatcaactggagcggcacccacaccgattacgccgactccgtgaaaggcagattcacaatcagcagaaacaacgccaacaataccctgtacctgcagatgaactccctgaagtctgaggatacagcagtgtattattgcgccaagaactggcgggacgccggcaccacttggtttgagaaaagcggctctgccggacagggaacccaagtgacagtgtcctccggtaccggcggaggcggatctggcggcggaggtagcggtggcggaggatctgaattcgacatccagatgacacagagccctagcagcctgtctgccagcgtgggagacagagtgaccatcacatgcaaggccagcgaccacatcaacaactggctggcctggtatcagcagaagcctggacaggcccctaagctgctgatctacggcgctaccacactggaaacaggcgtgcccagcagattttctggcagcggctctggcaccgactacaccctgacaatatccagcctccagcctgaggacttcgccacctactactgtcagcagagctggaacaccccttggacattcggccagggcaccaagctggaaatcaagagactcgaggggaaaccaattcccaaccctcttctgggactggattcaaccggcagcggcgaggacctgaagaacgtgttcccacctgaggtggccgtgttcgagcctagcgaggccgagatcagccacacccagaaagccaccctcgtgtgcctggctaccggcttctaccccgaccatgtggaactgtcttggtgggtcaacggcaaagaggtgcacagcggcgtgtctaccgacccccagccactgaaagaacagcccgccctgaacgacagccggtactgcctgagcagcagactgagagtgtccgccaccttctggcagaacccccggaaccacttcagatgccaggtgcagttctacggcctgagcgagaacgacgagtggacccaggacagagccaagcccgtgacccagatcgtgtctgccgaagcctggggcagagccgattgcggatcccagagcttcggcctgctggaccccaagctgtgctacctgctggatggcatcctgttcatctacggcgtgatcctgaccgccctgttcctgagagtgaagttcagcagaagcgccgacgcccctgcctaccagcagggacagaaccaactgtacaacgagctgaacctgggcagacgggaagagtacgacgtgctggacaagcggagaggcagggaccctgagatgggcggaaagccccagcggagaaagaacccccaggaaggactgtataacgaactccagaaagacaagatggccgaagcctacagcgagatcggcatgaagggcgagcggagaagaggcaagggccacgatggcctgtaccagggcctgagcaccgccaccaaggacacctatgacgccctgcacatgcaggccctgcctccaagaagggccaagcgatctggatctggagcaacaaacttctcactactcaaacaagcaggtgacgtggaggagaatcccgggcctactagtatggactggatttggcgcatccttttccttgtcggcgctgctaccggcgcccattcccagctccagttgcaagagagcggccctggcttggtaaaaccttccgagacccttagcctcacatgcacggttagtgggggcagcatttcctcaggtgattactattggggatggattcggcaacccccgggtaaaggattggagtggattggtcatatttattatagtggagcgacgtactacaacccaagtctcaaatccagggttacaatatccgtcgatacgagcaggaaccaattcagcttgaaactttctagtgtcaccgcagcagacacagccgtctattactgtacgcgggatgactccagtaattggcggtcccgagggcaagggacactggtcacggtctcctcatctggaggcggtggaagcggtggaggaggatctgtggacaacaagttcaacaaagagcggtacagcgcctactacgagatttggcaactgcccaacctgaacgtgcggcagaaggccgccttcatcggatctctgcaggacgaccctagccagagcgccaatctgctggccgaggccaagaagctgaacgacgcccaggcccctaaaggatccggcggcggaggatctggcggaggcggatctgggggcggaggctctttcgaacaagttcagcttcaacagcctggcgctgagctggtcaaacctggcgcttctgtgaagatgagctgcaaagccagcggctacgccttcagcagctactggatcaactggatgaagcagaaacccggccagggactcgaatggatcggccaaatctatcccggcgacggcgacaccaactacaacggcaagttcaagggcagagccacactgaccgccgatacctctagcagcacagcctacatgcagctgagcagcctgaccagcgaagatagcgccgtgtacttctgtgcccggtccatcacaacagtcgtgggctgcgctatggactattggggccagggaacaagcgtgaccgtgtctagtacgcgtgagcagaaactgatctcggaagaggatctggggagcggcatccagaaccctgatcctgccgtgtaccagctgcgggatagcaagagcagcgacaagagcgtgtgtctgttcaccgacttcgacagccagaccaacgtgtcccagagcaaggactccgacgtgtacatcaccgataagaccgtgctggacatgcggagcatggacttcaagagcaactccgccgtggcctggtccaacaagtccgatttcgcctgcgccaacgccttcaacaacagcattatccccgaggacacattcttcccaagccccgagagcagctgcggtacccagagttttgggttgttggaccctaaattgtgctatctgttggacggaatcctgttcatttacggagtgatcctgaccgcattgttcctgaagagaggccggaagaagctgctgtacatcttcaagcagcctttcatgcggcccgtgcagaccacccaggaagaggacggctgctcctgccggttccccgaggaagaagaaggcggctgcgagctgcgggttaagttttccagatccgcagacgcacccgcttaccaacaagggcagaaccaactctacaatgaacttaatttggggcggagggaagagtacgacgttctggacaaaaggaggggacgagatcccgagatgggcggaaagcctcagcgaaggaagaatccgcaagaggggctttataacgaactccagaaagataaaatggcagaagcctatagtgagattgggatgaagggagaaaggaggaggggtaaaggtcacgatgggttgtaccaaggattgagcacagccactaaagatacctatgatgcgctccacatgcaggccctgccgccaaga

SEQ ID NO: 5947 - DNA, 4236 bp, Artificial Sequence
  Synthetic Polynucloetide
atggccttaccagtgaccgccttgctcctgccgctggccttgctgctccacgccgccaggccggaggtgcaactggtggaaagcggcggaggctctgtgcagacaggcggctctctgagactgacctgtgccgccagcggcagaaccagcagatcctatggcatgggctggttcagacaggcccctggcaaagaacgcgagttcgtgtccggcatctcttggagaggcgacagcaccggctacgccgatagcgtgaagggccggttcaccatcagccgggacaacgccaagaacaccgtggacctgcagatgaacagcctgaagcccgaggacaccgccatctactactgtgccgctgccgccggatctgcttggtacggcacactgtacgagtacgactactggggccagggcacccttgtgaccgtgtcatctggcggaggaagcggcggaggatctgaagtgcaactggtggaatctggaggctctctggtgcagccagggggaagcctgagactgtcttgtgccgcttccggcttcaccttcgacgactacgccatgagctgggtgcgccaggtgccaggcaaaggcctggaatgggtgtccagcatcaactggagcggcacccacaccgattacgccgactccgtgaaaggcagattcacaatcagcagaaacaacgccaacaataccctgtacctgcagatgaactccctgaagtctgaggatacagcagtgtattattgcgccaagaactggcgggacgccggcaccacttggtttgagaaaagcggctctgccggacagggaacccaagtgacagtgtcctccggtaccggcggaggcggatctggcggcggaggtagcggtggcggaggatctgaattcgacatccagatgacacagagccctagcagcctgtctgccagcgtgggagacagagtgaccatcacatgcaaggccagcgaccacatcaacaactggctggcctggtatcagcagaagcctggacaggcccctaagctgctgatctacggcgctaccacactggaaacaggcgtgcccagcagattttctggcagcggctctggcaccgactacaccctgacaatatccagcctccagcctgaggacttcgccacctactactgtcagcagagctggaacaccccttggacattcggccagggcaccaagctggaaatcaagagactcgaggggaaaccaattcccaaccctcttctgggactggattcaaccggcagcggcgaggacctgaagaacgtgttcccacctgaggtggccgtgttcgagcctagcgaggccgagatcagccacacccagaaagccaccctcgtgtgcctggctaccggcttctaccccgaccatgtggaactgtcttggtgggtcaacggcaaagaggtgcacagcggcgtgtctaccgacccccagccactgaaagaacagcccgccctgaacgacagccggtactgcctgagcagcagactgagagtgtccgccaccttctggcagaacccccggaaccacttcagatgccaggtgcagttctacggcctgagcgagaacgacgagtggacccaggacagagccaagcccgtgacccagatcgtgtctgccgaagcctggggcagagccgattgcggatcccagagcttcggcctgctggaccccaagctgtgctacctgctggatggcatcctgttcatctacggcgtgatcctgaccgccctgttcctgaaacggggcagaaagaaactcctgtatatattcaaacaaccatttatgagaccagtacaaactactcaagaggaagatggctgtagctgccgatttccagaagaagaagaaggaggatgtgaactgagagtgaagttcagcagaagcgccgacgcccctgcctaccagcagggacagaaccaactgtacaacgagctgaacctgggcagacgggaagagtacgacgtgctggacaagcggagaggcagggaccctgagatgggcggaaagccccagcggagaaagaacccccaggaaggactgtataacgaactccagaaagacaagatggccgaagcctacagcgagatcggcatgaagggcgagcggagaagaggcaagggccacgatggcctgtaccagggcctgagcaccgccaccaaggacacctatgacgccctgcacatgcaggccctgcctccaagaagggccaagcgatctggatctggagcaacaaacttctcactactcaaacaagcaggtgacgtggaggagaatcccgggcctactagtatggactggatttggcgcatccttttccttgtcggcgctgctaccggcgcccattcccagctccagttgcaagagagcggccctggcttggtaaaaccttccgagacccttagcctcacatgcacggttagtgggggcagcatttcctcaggtgattactattggggatggattcggcaacccccgggtaaaggattggagtggattggtcatatttattatagtggagcgacgtactacaacccaagtctcaaatccagggttacaatatccgtcgatacgagcaggaaccaattcagcttgaaactttctagtgtcaccgcagcagacacagccgtctattactgtacgcgggatgactccagtaattggcggtcccgagggcaagggacactggtcacggtctcctcatctggaggcggtggaagcggtggaggaggatctgtggacaacaagttcaacaaagagcggtacagcgcctactacgagatttggcaactgcccaacctgaacgtgcggcagaaggccgccttcatcggatctctgcaggacgaccctagccagagcgccaatctgctggccgaggccaagaagctgaacgacgcccaggcccctaaaggatccggcggcggaggatctggcggaggcggatctgggggcggaggctctttcgaacaagttcagcttcaacagcctggcgctgagctggtcaaacctggcgcttctgtgaagatgagctgcaaagccagcggctacgccttcagcagctactggatcaactggatgaagcagaaacccggccagggactcgaatggatcggccaaatctatcccggcgacggcgacaccaactacaacggcaagttcaagggcagagccacactgaccgccgatacctctagcagcacagcctacatgcagctgagcagcctgaccagcgaagatagcgccgtgtacttctgtgcccggtccatcacaacagtcgtgggctgcgctatggactattggggccagggaacaagcgtgaccgtgtctagtacgcgtgagcagaaactgatctcggaagaggatctggggagcggcatccagaaccctgatcctgccgtgtaccagctgcgggatagcaagagcagcgacaagagcgtgtgtctgttcaccgacttcgacagccagaccaacgtgtcccagagcaaggactccgacgtgtacatcaccgataagaccgtgctggacatgcggagcatggacttcaagagcaactccgccgtggcctggtccaacaagtccgatttcgcctgcgccaacgccttcaacaacagcattatccccgaggacacattcttcccaagccccgagagcagctgcggtacccagagttttgggttgttggaccctaaattgtgctatctgttggacggaatcctgttcatttacggagtgatcctgaccgcattgttcctgaagagaggccggaagaagctgctgtacatcttcaagcagcctttcatgcggcccgtgcagaccacccaggaagaggacggctgctcctgccggttccccgaggaagaagaaggcggctgcgagctgcgggttaagttttccagatccgcagacgcacccgcttaccaacaagggcagaaccaactctacaatgaacttaatttggggcggagggaagagtacgacgttctggacaaaaggaggggacgagatcccgagatgggcggaaagcctcagcgaaggaagaatccgcaagaggggctttataacgaactccagaaagataaaatggcagaagcctatagtgagattgggatgaagggagaaaggaggaggggtaaaggtcacgatgggttgtaccaaggattgagcacagccactaaagatacctatgatgcgctccacatgcaggccctgccgccaaga

SEQ ID NO: 5948 - DNA, 3909 bp, Artificial Sequence
  Synthetic Polynucloetide
atggccttaccagtgaccgccttgctcctgccgctggccttgctgctccacgccgccaggccggaggtgcaactggtggaaagcggcggaggctctgtgcagacaggcggctctctgagactgacctgtgccgccagcggcagaaccagcagatcctatggcatgggctggttcagacaggcccctggcaaagaacgcgagttcgtgtccggcatctcttggagaggcgacagcaccggctacgccgatagcgtgaagggccggttcaccatcagccgggacaacgccaagaacaccgtggacctgcagatgaacagcctgaagcccgaggacaccgccatctactactgtgccgctgccgccggatctgcttggtacggcacactgtacgagtacgactactggggccagggcacccttgtgaccgtgtcatctggcggaggaagcggcggaggatctgaagtgcaactggtggaatctggaggctctctggtgcagccagggggaagcctgagactgtcttgtgccgcttccggcttcaccttcgacgactacgccatgagctgggtgcgccaggtgccaggcaaaggcctggaatgggtgtccagcatcaactggagcggcacccacaccgattacgccgactccgtgaaaggcagattcacaatcagcagaaacaacgccaacaataccctgtacctgcagatgaactccctgaagtctgaggatacagcagtgtattattgcgccaagaactggcgggacgccggcaccacttggtttgagaaaagcggctctgccggacagggaacccaagtgacagtgtcctccggtaccggcggaggcggatctggcggcggaggtagcggtggcggaggatctgaattcgacatccagatgacacagagccctagcagcctgtctgccagcgtgggagacagagtgaccatcacatgcaaggccagcgaccacatcaacaactggctggcctggtatcagcagaagcctggacaggcccctaagctgctgatctacggcgctaccacactggaaacaggcgtgcccagcagattttctggcagcggctctggcaccgactacaccctgacaatatccagcctccagcctgaggacttcgccacctactactgtcagcagagctggaacaccccttggacattcggccagggcaccaagctggaaatcaagagactcgagcagagcttcggcctgctggaccccaagctgtgctacctgctggatggcatcctgttcatctacggcgtgatcctgaccgccctgttcctgagagtgaagttcagcagaagcgccgacgcccctgcctaccagcagggacagaaccaactgtacaacgagctgaacctgggcagacgggaagagtacgacgtgctggacaagcggagaggcagggaccctgagatgggcggaaagccccagcggagaaagaacccccaggaaggactgtataacgaactccagaaagacaagatggccgaagcctacagcgagatcggcatgaagggcgagcggagaagaggcaagggccacgatggcctgtaccagggcctgagcaccgccaccaaggacacctatgacgccctgcacatgcaggccctgcctccaagaagggccaagcgatctggatctggagcaacaaacttctcactactcaaacaagcaggtgacgtggaggagaatcccgggcctactagtatggactggatttggcgcatccttttccttgtcggcgctgctaccggcgcccattcccagctccagttgcaagagagcggccctggcttggtaaaaccttccgagacccttagcctcacatgcacggttagtgggggcagcatttcctcaggtgattactattggggatggattcggcaacccccgggtaaaggattggagtggattggtcatatttattatagtggagcgacgtactacaacccaagtctcaaatccagggttacaatatccgtcgatacgagcaggaaccaattcagcttgaaactttctagtgtcaccgcagcagacacagccgtctattactgtacgcgggatgactccagtaattggcggtcccgagggcaagggacactggtcacggtctcctcatctggaggcggtggaagcggtggaggaggatctgtggacaacaagttcaacaaagagcggtacagcgcctactacgagatttggcaactgcccaacctgaacgtgcggcagaaggccgccttcatcggatctctgcaggacgaccctagccagagcgccaatctgctggccgaggccaagaagctgaacgacgcccaggcccctaaaggatccggcggcggaggatctggcggaggcggatctgggggcggaggctctttcgaacaagttcagcttcaacagcctggcgctgagctggtcaaacctggcgcttctgtgaagatgagctgcaaagccagcggctacgccttcagcagctactggatcaactggatgaagcagaaacccggccagggactcgaatggatcggccaaatctatcccggcgacggcgacaccaactacaacggcaagttcaagggcagagccacactgaccgccgatacctctagcagcacagcctacatgcagctgagcagcctgaccagcgaagatagcgccgtgtacttctgtgcccggtccatcacaacagtcgtgggctgcgctatggactattggggccagggaacaagcgtgaccgtgtctagtacgcgtcagagttttgggttgttggaccctaaattgtgctatctgttggacggaatcctgttcatttacggagtgatcctgaccgcattgttcctgcgggttaagttttccagatccgcagacgcacccgcttaccaacaagggcagaaccaactctacaatgaacttaatttggggcggagggaagagtacgacgttctggacaaaaggaggggacgagatcccgagatgggcggaaagcctcagcgaaggaagaatccgcaagaggggctttataacgaactccagaaagataaaatggcagaagcctatagtgagattgggatgaagggagaaaggaggaggggtaaaggtcacgatgggttgtaccaaggattgagcacagccactaaagatacctatgatgcgctccacatgcaggccctgccgccaagacgcgccaagagaagcggatctggcgtgaagcagaccctgaatttcgacctgctgaagctggctggcgacgtggaatccaacccaggcccttctagaggccatatgaccgagtacaagcccacggtgcgcctcgccacccgcgacgacgtccccagggccgtacgcaccctcgccgccgcgttcgccgactaccccgccacgcgccacaccgtcgatccggaccgccacatcgagcgggtcaccgagctgcaagaactcttcctcacgcgcgtcgggctcgacatcggcaaggtgtgggtcgcggacgacggcgccgcggtggcggtctggaccacgccggagagcgtcgaagcgggggcggtgttcgccgagatcggcccgcgcatggccgagttgagcggttcccggctggccgcgcagcaacagatggaaggcctcctggcgccgcaccggcccaaggagcccgcgtggttcctggccaccgtcggcgtctcgcccgaccaccagggcaagggtctgggcagcgccgtcgtgctccccggagtggaggcggccgagcgcgccggggtgcccgccttcctggagacctccgcgccccgcaacctccccttctacgagcggctcggcttcaccgtcaccgccgacgtcgaggtgcccgaaggaccgcgcacctggtgcatgacccgcaagcccggtgcctga

SEQ ID NO: 5949 - DNA, 3381 bp, Artificial Sequence
  Synthetic Polynucloetide
atggccttaccagtgaccgccttgctcctgccgctggccttgctgctccacgccgccaggccggaggtgcaactggtggaaagcggcggaggctctgtgcagacaggcggctctctgagactgacctgtgccgccagcggcagaaccagcagatcctatggcatgggctggttcagacaggcccctggcaaagaacgcgagttcgtgtccggcatctcttggagaggcgacagcaccggctacgccgatagcgtgaagggccggttcaccatcagccgggacaacgccaagaacaccgtggacctgcagatgaacagcctgaagcccgaggacaccgccatctactactgtgccgctgccgccggatctgcttggtacggcacactgtacgagtacgactactggggccagggcacccttgtgaccgtgtcatctggcggaggaagcggcggaggatctgaagtgcaactggtggaatctggaggctctctggtgcagccagggggaagcctgagactgtcttgtgccgcttccggcttcaccttcgacgactacgccatgagctgggtgcgccaggtgccaggcaaaggcctggaatgggtgtccagcatcaactggagcggcacccacaccgattacgccgactccgtgaaaggcagattcacaatcagcagaaacaacgccaacaataccctgtacctgcagatgaactccctgaagtctgaggatacagcagtgtattattgcgccaagaactggcgggacgccggcaccacttggtttgagaaaagcggctctgccggacagggaacccaagtgacagtgtcctccggtaccggcggaggcggatctggcggcggaggtagcggtggcggaggatctgaattcgacatccagatgacacagagccctagcagcctgtctgccagcgtgggagacagagtgaccatcacatgcaaggccagcgaccacatcaacaactggctggcctggtatcagcagaagcctggacaggcccctaagctgctgatctacggcgctaccacactggaaacaggcgtgcccagcagattttctggcagcggctctggcaccgactacaccctgacaatatccagcctccagcctgaggacttcgccacctactactgtcagcagagctggaacaccccttggacattcggccagggcaccaagctggaaatcaagagactcgagggacagcctaaggccaatcctaccgtgacactgttccctccaagcagcgaagaactccaggccaacaaggccacacttgtgtgcctgatctccgacttctaccctggggctgtgacagtggcttggaaggccgatggatctcctgtgaaagccggcgtggaaaccaccaagccatccaagcagagcaacaacaaatacgccgccagctcctacctgagcctgacacctgagcagtggaagtcccacagatcctacagctgccaagtgacccacgaaggcagcaccgtggaaaagacagtggcccctacagagtgcagccccatcaagaccgatgtgattacaatggaccccaaggacaactgctccaaggacgccaacgataccctgctgctccagctgaccaacaccagcgcctactacatgtacttgttgctgctgctgaagtccgtggtgtacttcgccatcatcacatgctgcctgctgcggagaaccgccttctgctgcaacggcgagaagtctagggccaagcgatctggatctggagcaacaaacttctcactactcaaacaagcaggtgacgtggaggagaatcccgggcctactagtatggactggatttggcgcatccttttccttgtcggcgctgctaccggcgcccattcccagctccagttgcaagagagcggccctggcttggtaaaaccttccgagacccttagcctcacatgcacggttagtgggggcagcatttcctcaggtgattactattggggatggattcggcaacccccgggtaaaggattggagtggattggtcatatttattatagtggagcgacgtactacaacccaagtctcaaatccagggttacaatatccgtcgatacgagcaggaaccaattcagcttgaaactttctagtgtcaccgcagcagacacagccgtctattactgtacgcgggatgactccagtaattggcggtcccgagggcaagggacactggtcacggtctcctcatctggaggcggtggaagcggtggaggaggatctgtggacaacaagttcaacaaagagcggtacagcgcctactacgagatttggcaactgcccaacctgaacgtgcggcagaaggccgccttcatcggatctctgcaggacgaccctagccagagcgccaatctgctggccgaggccaagaagctgaacgacgcccaggcccctaaaggatccggcggcggaggatctggcggaggcggatctgggggcggaggctctttcgaacaagttcagcttcaacagcctggcgctgagctggtcaaacctggcgcttctgtgaagatgagctgcaaagccagcggctacgccttcagcagctactggatcaactggatgaagcagaaacccggccagggactcgaatggatcggccaaatctatcccggcgacggcgacaccaactacaacggcaagttcaagggcagagccacactgaccgccgatacctctagcagcacagcctacatgcagctgagcagcctgaccagcgaagatagcgccgtgtacttctgtgcccggtccatcacaacagtcgtgggctgcgctatggactattggggccagggaacaagcgtgaccgtgtctagtacgcgtgcctctacaaagggaccctccgtgtttcctctggctcccagcagcaagtctacaagcggaggaacagccgctctgggctgcctggtcaaggattactttcccgagcctgtgaccgtgtcctggaatagcggagcactgacaagcggcgtgcacacctttccagccgtgctgcaaagcagcggcctgtactctctgagcagcgtggtcacagtgcctagctctagcctgggcacccagacctacatctgcaatgtgaaccacaagcctagcaacaccaaggtggacaagagagtggaacccaagagctgtgaagtgaaaaccgactccaccgaccacgtgaagcccaaagagacagagaacaccaagcagcccagcaagagctgccacaagcccaaggccatcgtgcacaccgagaaagtgaacatgatgagcctgaccgtgctgggcctgcggatgctgttcgccaaaaccgtggccgtgaacttcctgctgaccgccaagctgttcttcctc

SEQ ID NO: 5950 - DNA, 3315 bp, Artificial Sequence
  Synthetic Polynucloetide
atggccttaccagtgaccgccttgctcctgccgctggccttgctgctccacgccgccaggccggaggtgcaactggtggaaagcggcggaggctctgtgcagacaggcggctctctgagactgacctgtgccgccagcggcagaaccagcagatcctatggcatgggctggttcagacaggcccctggcaaagaacgcgagttcgtgtccggcatctcttggagaggcgacagcaccggctacgccgatagcgtgaagggccggttcaccatcagccgggacaacgccaagaacaccgtggacctgcagatgaacagcctgaagcccgaggacaccgccatctactactgtgccgctgccgccggatctgcttggtacggcacactgtacgagtacgactactggggccagggcacccttgtgaccgtgtcatctggcggaggaagcggcggaggatctgaagtgcaactggtggaatctggaggctctctggtgcagccagggggaagcctgagactgtcttgtgccgcttccggcttcaccttcgacgactacgccatgagctgggtgcgccaggtgccaggcaaaggcctggaatgggtgtccagcatcaactggagcggcacccacaccgattacgccgactccgtgaaaggcagattcacaatcagcagaaacaacgccaacaataccctgtacctgcagatgaactccctgaagtctgaggatacagcagtgtattattgcgccaagaactggcgggacgccggcaccacttggtttgagaaaagcggctctgccggacagggaacccaagtgacagtgtcctccggtaccggcggaggcggatctggcggcggaggtagcggtggcggaggatctgaattcgacatccagatgacacagagccctagcagcctgtctgccagcgtgggagacagagtgaccatcacatgcaaggccagcgaccacatcaacaactggctggcctggtatcagcagaagcctggacaggcccctaagctgctgatctacggcgctaccacactggaaacaggcgtgcccagcagattttctggcagcggctctggcaccgactacaccctgacaatatccagcctccagcctgaggacttcgccacctactactgtcagcagagctggaacaccccttggacattcggccagggcaccaagctggaaatcaagagactcgagggacagcctaaggccaatcctaccgtgacactgttccctccaagcagcgaagaactccaggccaacaaggccacacttgtgtgcctgatctccgacttctaccctggggctgtgacagtggcttggaaggccgatggatctcctgtgaaagccggcgtggaaaccaccaagccatccaagcagagcaacaacaaatacgccgccagctcctacctgagcctgacacctgagcagtggaagtcccacagatcctacagctgccaagtgacccacgaaggcagcaccgtggaaaagacagtggcccctacagagtgcagcggcagagccgattgcggcatcaccagcgccagctaccaccagggcgtgctgagcgccaccatcctgtacgagatcctgctgggcaaggccaccctgtacgccgtgctggtgtctgccctggtgctgatggctatggtcaagcggaaggacagccggggaagggccaagcgatctggatctggagcaacaaacttctcactactcaaacaagcaggtgacgtggaggagaatcccgggcctactagtatggactggatttggcgcatccttttccttgtcggcgctgctaccggcgcccattcccagctccagttgcaagagagcggccctggcttggtaaaaccttccgagacccttagcctcacatgcacggttagtgggggcagcatttcctcaggtgattactattggggatggattcggcaacccccgggtaaaggattggagtggattggtcatatttattatagtggagcgacgtactacaacccaagtctcaaatccagggttacaatatccgtcgatacgagcaggaaccaattcagcttgaaactttctagtgtcaccgcagcagacacagccgtctattactgtacgcgggatgactccagtaattggcggtcccgagggcaagggacactggtcacggtctcctcatctggaggcggtggaagcggtggaggaggatctgtggacaacaagttcaacaaagagcggtacagcgcctactacgagatttggcaactgcccaacctgaacgtgcggcagaaggccgccttcatcggatctctgcaggacgaccctagccagagcgccaatctgctggccgaggccaagaagctgaacgacgcccaggcccctaaaggatccggcggcggaggatctggcggaggcggatctgggggcggaggctctttcgaacaagttcagcttcaacagcctggcgctgagctggtcaaacctggcgcttctgtgaagatgagctgcaaagccagcggctacgccttcagcagctactggatcaactggatgaagcagaaacccggccagggactcgaatggatcggccaaatctatcccggcgacggcgacaccaactacaacggcaagttcaagggcagagccacactgaccgccgatacctctagcagcacagcctacatgcagctgagcagcctgaccagcgaagatagcgccgtgtacttctgtgcccggtccatcacaacagtcgtgggctgcgctatggactattggggccagggaacaagcgtgaccgtgtctagtacgcgtgcctctacaaagggaccctccgtgtttcctctggctcccagcagcaagtctacaagcggaggaacagccgctctgggctgcctggtcaaggattactttcccgagcctgtgaccgtgtcctggaatagcggagcactgacaagcggcgtgcacacctttccagccgtgctgcaaagcagcggcctgtactctctgagcagcgtggtcacagtgcctagctctagcctgggcacccagacctacatctgcaatgtgaaccacaagcctagcaacaccaaggtggacaagagagtggaacccaagagctgtatccccgaggacacattcttcccaagcagcgacgtgccctgcgacgtgaagctggtggaaaagagcttcgagacagacaccaacctgaacttccagaacctgagcgtgatcggcttcagaatcctgctgctgaaagtggccggctttaacctgctgatgaccctgcggctgtggtccagc

SEQ ID NO: 5951 - DNA, 3315 bp, Artificial Sequence
  Synthetic Polynucloetide
atggccttaccagtgaccgccttgctcctgccgctggccttgctgctccacgccgccaggccggaggtgcaactggtggaaagcggcggaggctctgtgcagacaggcggctctctgagactgacctgtgccgccagcggcagaaccagcagatcctatggcatgggctggttcagacaggcccctggcaaagaacgcgagttcgtgtccggcatctcttggagaggcgacagcaccggctacgccgatagcgtgaagggccggttcaccatcagccgggacaacgccaagaacaccgtggacctgcagatgaacagcctgaagcccgaggacaccgccatctactactgtgccgctgccgccggatctgcttggtacggcacactgtacgagtacgactactggggccagggcacccttgtgaccgtgtcatctggcggaggaagcggcggaggatctgaagtgcaactggtggaatctggaggctctctggtgcagccagggggaagcctgagactgtcttgtgccgcttccggcttcaccttcgacgactacgccatgagctgggtgcgccaggtgccaggcaaaggcctggaatgggtgtccagcatcaactggagcggcacccacaccgattacgccgactccgtgaaaggcagattcacaatcagcagaaacaacgccaacaataccctgtacctgcagatgaactccctgaagtctgaggatacagcagtgtattattgcgccaagaactggcgggacgccggcaccacttggtttgagaaaagcggctctgccggacagggaacccaagtgacagtgtcctccggtaccggcggaggcggatctggcggcggaggtagcggtggcggaggatctgaattcgacatccagatgacacagagccctagcagcctgtctgccagcgtgggagacagagtgaccatcacatgcaaggccagcgaccacatcaacaactggctggcctggtatcagcagaagcctggacaggcccctaagctgctgatctacggcgctaccacactggaaacaggcgtgcccagcagattttctggcagcggctctggcaccgactacaccctgacaatatccagcctccagcctgaggacttcgccacctactactgtcagcagagctggaacaccccttggacattcggccagggcaccaagctggaaatcaagagactcgagggacagcctaaggccaatcctaccgtgacactgttccctccaagcagcgaagaactccaggccaacaaggccacacttgtgtgcctgatctccgacttctaccctggggctgtgacagtggcttggaaggccgatggatctcctgtgaaagccggcgtggaaaccaccaagccatccaagcagagcaacaacaaatacgccgccagctcctacctgagcctgacacctgagcagtggaagtcccacagatcctacagctgccaagtgacccacgaaggcagcaccgtggaaaagacagtggcccctacagagtgcagcggcagagccgattgcggctttaccagcgagagctaccagcagggcgtgctgagcgccaccatcctgtacgagatcctgctgggcaaggccaccctgtacgccgtgctggtgtctgccctggtgctgatggctatggtcaagcggaaggacagccggggaagggccaagcgatctggatctggagcaacaaacttctcactactcaaacaagcaggtgacgtggaggagaatcccgggcctactagtatggactggatttggcgcatccttttccttgtcggcgctgctaccggcgcccattcccagctccagttgcaagagagcggccctggcttggtaaaaccttccgagacccttagcctcacatgcacggttagtgggggcagcatttcctcaggtgattactattggggatggattcggcaacccccgggtaaaggattggagtggattggtcatatttattatagtggagcgacgtactacaacccaagtctcaaatccagggttacaatatccgtcgatacgagcaggaaccaattcagcttgaaactttctagtgtcaccgcagcagacacagccgtctattactgtacgcgggatgactccagtaattggcggtcccgagggcaagggacactggtcacggtctcctcatctggaggcggtggaagcggtggaggaggatctgtggacaacaagttcaacaaagagcggtacagcgcctactacgagatttggcaactgcccaacctgaacgtgcggcagaaggccgccttcatcggatctctgcaggacgaccctagccagagcgccaatctgctggccgaggccaagaagctgaacgacgcccaggcccctaaaggatccggcggcggaggatctggcggaggcggatctgggggcggaggctctttcgaacaagttcagcttcaacagcctggcgctgagctggtcaaacctggcgcttctgtgaagatgagctgcaaagccagcggctacgccttcagcagctactggatcaactggatgaagcagaaacccggccagggactcgaatggatcggccaaatctatcccggcgacggcgacaccaactacaacggcaagttcaagggcagagccacactgaccgccgatacctctagcagcacagcctacatgcagctgagcagcctgaccagcgaagatagcgccgtgtacttctgtgcccggtccatcacaacagtcgtgggctgcgctatggactattggggccagggaacaagcgtgaccgtgtctagtacgcgtgcctctacaaagggaccctccgtgtttcctctggctcccagcagcaagtctacaagcggaggaacagccgctctgggctgcctggtcaaggattactttcccgagcctgtgaccgtgtcctggaatagcggagcactgacaagcggcgtgcacacctttccagccgtgctgcaaagcagcggcctgtactctctgagcagcgtggtcacagtgcctagctctagcctgggcacccagacctacatctgcaatgtgaaccacaagcctagcaacaccaaggtggacaagagagtggaacccaagagctgtatccccgaggacacattcttcccaagccccgagagcagctgcgacgtgaagctggtggaaaagagcttcgagacagacaccaacctgaacttccagaacctgagcgtgatcggcttcagaatcctgctgctgaaagtggccggctttaacctgctgatgaccctgcggctgtggtccagc

SEQ ID NO: 5952 - DNA, 3216 bp, Artificial Sequence
  Synthetic Polynucloetide
atggccttaccagtgaccgccttgctcctgccgctggccttgctgctccacgccgccaggccggaggtgcaactggtggaaagcggcggaggctctgtgcagacaggcggctctctgagactgacctgtgccgccagcggcagaaccagcagatcctatggcatgggctggttcagacaggcccctggcaaagaacgcgagttcgtgtccggcatctcttggagaggcgacagcaccggctacgccgatagcgtgaagggccggttcaccatcagccgggacaacgccaagaacaccgtggacctgcagatgaacagcctgaagcccgaggacaccgccatctactactgtgccgctgccgccggatctgcttggtacggcacactgtacgagtacgactactggggccagggcacccttgtgaccgtgtcatctggcggaggaagcggcggaggatctgaagtgcaactggtggaatctggaggctctctggtgcagccagggggaagcctgagactgtcttgtgccgcttccggcttcaccttcgacgactacgccatgagctgggtgcgccaggtgccaggcaaaggcctggaatgggtgtccagcatcaactggagcggcacccacaccgattacgccgactccgtgaaaggcagattcacaatcagcagaaacaacgccaacaataccctgtacctgcagatgaactccctgaagtctgaggatacagcagtgtattattgcgccaagaactggcgggacgccggcaccacttggtttgagaaaagcggctctgccggacagggaacccaagtgacagtgtcctccctcgagggacagcctaaggccaatcctaccgtgacactgttccctccaagcagcgaagaactccaggccaacaaggccacacttgtgtgcctgatctccgacttctaccctggggctgtgacagtggcttggaaggccgatggatctcctgtgaaagccggcgtggaaaccaccaagccatccaagcagagcaacaacaaatacgccgccagctcctacctgagcctgacacctgagcagtggaagtcccacagatcctacagctgccaagtgacccacgaaggcagcaccgtggaaaagacagtggcccctacagagtgcagcggcagagccgattgcggctttaccagcgagagctaccagcagggcgtgctgagcgccaccatcctgtacgagatcctgctgggcaaggccaccctgtacgccgtgctggtgtctgccctggtgctgatggctatggtcaagcggaaggacagccggggaagggccaagcgatctggatctggagcaacaaacttctcactactcaaacaagcaggtgacgtggaggagaatcccgggcctactagtatggactggatttggcgcatccttttccttgtcggcgctgctaccggcgcgcattcccagctccagttgcaagagagcggccctggcttggtaaaaccttccgagacccttagcctcacatgcacggttagtgggggcagcatttcctcaggtgattactattggggatggattcggcaacccccgggtaaaggattggagtggattggtcatatttattatagtggagcgacgtactacaacccaagtctcaaatccagggttacaatatccgtcgatacgagcaggaaccaattcagcttgaaactttctagtgtcaccgcagcagacacagccgtctattactgtacgcgggatgactccagtaattggcggtcccgagggcaagggacactggtcacggtctcctcatctggaggcggtggaagcggtggaggaggatctgtggacaacaagttcaacaaagagcggtacagcgcctactacgagatttggcaactgcccaacctgaacgtgcggcagaaggccgccttcatcggatctctgcaggacgaccctagccagagcgccaatctgctggccgaggccaagaagctgaacgacgcccaggcccctaaaacgcgtgcctctacaaagggaccctccgtgtttcctctggctcccagcagcaagtctacaagcggaggaacagccgctctgggctgcctggtcaaggattactttcccgagcctgtgaccgtgtcctggaatagcggagcactgacaagcggcgtgcacacctttccagccgtgctgcaaagcagcggcctgtactctctgagcagcgtggtcacagtgcctagctctagcctgggcacccagacctacatctgcaatgtgaaccacaagcctagcaacaccaaggtggacaagagagtggaacccaagagctgtatccccgaggacacattcttcccaagccccgagagcagctgcgacgtgaagctggtggaaaagagcttcgagacagacaccaacctgaacttccagaacctgagcgtgatcggcttcagaatcctgctgctgaaagtggccggctttaacctgctgatgaccctgcggctgtggtccagccgcgccaagagaagcggatctggcgtgaagcagaccctgaatttcgacctgctgaagctggctggcgacgtggaatccaacccaggcccttctagaggccatatgaccgagtacaagcccacggtgcgcctcgccacccgcgacgacgtccccagggccgtacgcaccctcgccgccgcgttcgccgactaccccgccacgcgccacaccgtcgatccggaccgccacatcgagcgggtcaccgagctgcaagaactcttcctcacgcgcgtcgggctcgacatcggcaaggtgtgggtcgcggacgacggcgccgcggtggcggtctggaccacgccggagagcgtcgaagcgggggcggtgttcgccgagatcggcccgcgcatggccgagttgagcggttcccggctggccgcgcagcaacagatggaaggcctcctggcgccgcaccggcccaaggagcccgcgtggttcctggccaccgtcggcgtctcgcccgaccaccagggcaagggtctgggcagcgccgtcgtgctccccggagtggaggcggccgagcgcgccggggtgcccgccttcctggagacctccgcgccccgcaacctccccttctacgagcggctcggcttcaccgtcaccgccgacgtcgaggtgcccgaaggaccgcgcacctggtgcatgacccgcaagcccggtgcctga

SEQ ID NO: 5953 - DNA, 2514 bp, Artificial Sequence
  Synthetic Polynucloetide
atggccttaccagtgaccgccttgctcctgccgctggccttgctgctccacgccgccaggccggaggtgcaactggtggaaagcggcggaggctctgtgcagacaggcggctctctgagactgacctgtgccgccagcggcagaaccagcagatcctatggcatgggctggttcagacaggcccctggcaaagaacgcgagttcgtgtccggcatctcttggagaggcgacagcaccggctacgccgatagcgtgaagggccggttcaccatcagccgggacaacgccaagaacaccgtggacctgcagatgaacagcctgaagcccgaggacaccgccatctactactgtgccgctgccgccggatctgcttggtacggcacactgtacgagtacgactactggggccagggcacccttgtgaccgtgtcatctggcggaggaagcggcggaggatctgaagtgcaactggtggaatctggaggctctctggtgcagccagggggaagcctgagactgtcttgtgccgcttccggcttcaccttcgacgactacgccatgagctgggtgcgccaggtgccaggcaaaggcctggaatgggtgtccagcatcaactggagcggcacccacaccgattacgccgactccgtgaaaggcagattcacaatcagcagaaacaacgccaacaataccctgtacctgcagatgaactccctgaagtctgaggatacagcagtgtattattgcgccaagaactggcgggacgccggcaccacttggtttgagaaaagcggctctgccggacagggaacccaagtgacagtgtcctccctcgagggacagcctaaggccaatcctaccgtgacactgttccctccaagcagcgaagaactccaggccaacaaggccacacttgtgtgcctgatctccgacttctaccctggggctgtgacagtggcttggaaggccgatggatctcctgtgaaagccggcgtggaaaccaccaagccatccaagcagagcaacaacaaatacgccgccagctcctacctgagcctgacacctgagcagtggaagtcccacagatcctacagctgccaagtgacccacgaaggcagcaccgtggaaaagacagtggcccctacagagtgcagcggcagagccgattgcggctttaccagcgagagctaccagcagggcgtgctgagcgccaccatcctgtacgagatcctgctgggcaaggccaccctgtacgccgtgctggtgtctgccctggtgctgatggctatggtcaagcggaaggacagccggggaagggccaagcgatctggatctggagcaacaaacttctcactactcaaacaagcaggtgacgtggaggagaatcccgggcctactagtatggactggatttggcgcatccttttccttgtcggcgctgctaccggcgcgcattcccagctccagttgcaagagagcggccctggcttggtaaaaccttccgagacccttagcctcacatgcacggttagtgggggcagcatttcctcaggtgattactattggggatggattcggcaacccccgggtaaaggattggagtggattggtcatatttattatagtggagcgacgtactacaacccaagtctcaaatccagggttacaatatccgtcgatacgagcaggaaccaattcagcttgaaactttctagtgtcaccgcagcagacacagccgtctattactgtacgcgggatgactccagtaattggcggtcccgagggcaagggacactggtcacggtctcctcatctggaggcggtggaagcggtggaggaggatctgtggacaacaagttcaacaaagagcggtacagcgcctactacgagatttggcaactgcccaacctgaacgtgcggcagaaggccgccttcatcggatctctgcaggacgaccctagccagagcgccaatctgctggccgaggccaagaagctgaacgacgcccaggcccctaaaacgcgtgcctctacaaagggaccctccgtgtttcctctggctcccagcagcaagtctacaagcggaggaacagccgctctgggctgcctggtcaaggattactttcccgagcctgtgaccgtgtcctggaatagcggagcactgacaagcggcgtgcacacctttccagccgtgctgcaaagcagcggcctgtactctctgagcagcgtggtcacagtgcctagctctagcctgggcacccagacctacatctgcaatgtgaaccacaagcctagcaacaccaaggtggacaagagagtggaacccaagagctgtatccccgaggacacattcttcccaagccccgagagcagctgcgacgtgaagctggtggaaaagagcttcgagacagacaccaacctgaacttccagaacctgagcgtgatcggcttcagaatcctgctgctgaaagtggccggctttaacctgctgatgaccctgcggctgtggtccagc

SEQ ID NO: 5954 - DNA, 2601 bp, Artificial Sequence
  Synthetic Polynucloetide
atggccttaccagtgaccgccttgctcctgccgctggccttgctgctccacgccgccaggccggaggtgcaactggtggaaagcggcggaggctctgtgcagacaggcggctctctgagactgacctgtgccgccagcggcagaaccagcagatcctatggcatgggctggttcagacaggcccctggcaaagaacgcgagttcgtgtccggcatctcttggagaggcgacagcaccggctacgccgatagcgtgaagggccggttcaccatcagccgggacaacgccaagaacaccgtggacctgcagatgaacagcctgaagcccgaggacaccgccatctactactgtgccgctgccgccggatctgcttggtacggcacactgtacgagtacgactactggggccagggcacccttgtgaccgtgtcatctggcggaggaagcggcggaggatctgaagtgcaactggtggaatctggaggctctctggtgcagccagggggaagcctgagactgtcttgtgccgcttccggcttcaccttcgacgactacgccatgagctgggtgcgccaggtgccaggcaaaggcctggaatgggtgtccagcatcaactggagcggcacccacaccgattacgccgactccgtgaaaggcagattcacaatcagcagaaacaacgccaacaataccctgtacctgcagatgaactccctgaagtctgaggatacagcagtgtattattgcgccaagaactggcgggacgccggcaccacttggtttgagaaaagcggctctgccggacagggaacccaagtgacagtgtcctccctcgagggatctggcagagccgattgcggctttaccagcgagagctaccagcagggcgtgctgagcgccaccatcctgtacgagatcctgctgggcaaggccaccctgtacgccgtgctggtgtctgccctggtgctgatggctatggtcaagcggaaggacagccggggaagggccaagcgatctggatctggagcaacaaacttctcactactcaaacaagcaggtgacgtggaggagaatcccgggcctactagtatggactggatttggcgcatccttttccttgtcggcgctgctaccggcgcgcattcccagctccagttgcaagagagcggccctggcttggtaaaaccttccgagacccttagcctcacatgcacggttagtgggggcagcatttcctcaggtgattactattggggatggattcggcaacccccgggtaaaggattggagtggattggtcatatttattatagtggagcgacgtactacaacccaagtctcaaatccagggttacaatatccgtcgatacgagcaggaaccaattcagcttgaaactttctagtgtcaccgcagcagacacagccgtctattactgtacgcgggatgactccagtaattggcggtcccgagggcaagggacactggtcacggtctcctcatctggaggcggtggaagcggtggaggaggatctgtggacaacaagttcaacaaagagcggtacagcgcctactacgagatttggcaactgcccaacctgaacgtgcggcagaaggccgccttcatcggatctctgcaggacgaccctagccagagcgccaatctgctggccgaggccaagaagctgaacgacgcccaggcccctaaaacgcgtggcagcatccccgaggacacattcttcccaagccccgagagcagctgcgacgtgaagctggtggaaaagagcttcgagacagacaccaacctgaacttccagaacctgagcgtgatcggcttcagaatcctgctgctgaaagtggccggctttaacctgctgatgaccctgcggctgtggtccagccgcgccaagagaagcggatctggcgtgaagcagaccctgaatttcgacctgctgaagctggctggcgacgtggaatccaacccaggcccttctagaggccatatgaccgagtacaagcccacggtgcgcctcgccacccgcgacgacgtccccagggccgtacgcaccctcgccgccgcgttcgccgactaccccgccacgcgccacaccgtcgatccggaccgccacatcgagcgggtcaccgagctgcaagaactcttcctcacgcgcgtcgggctcgacatcggcaaggtgtgggtcgcggacgacggcgccgcggtggcggtctggaccacgccggagagcgtcgaagcgggggcggtgttcgccgagatcggcccgcgcatggccgagttgagcggttcccggctggccgcgcagcaacagatggaaggcctcctggcgccgcaccggcccaaggagcccgcgtggttcctggccaccgtcggcgtctcgcccgaccaccagggcaagggtctgggcagcgccgtcgtgctccccggagtggaggcggccgagcgcgccggggtgcccgccttcctggagacctccgcgccccgcaacctccccttctacgagcggctcggcttcaccgtcaccgccgacgtcgaggtgcccgaaggaccgcgcacctggtgcatgacccgcaagcccggtgcctga

SEQ ID NO: 5955 - DNA, 1899 bp, Artificial Sequence
  Synthetic Polynucloetide
atggccttaccagtgaccgccttgctcctgccgctggccttgctgctccacgccgccaggccggaggtgcaactggtggaaagcggcggaggctctgtgcagacaggcggctctctgagactgacctgtgccgccagcggcagaaccagcagatcctatggcatgggctggttcagacaggcccctggcaaagaacgcgagttcgtgtccggcatctcttggagaggcgacagcaccggctacgccgatagcgtgaagggccggttcaccatcagccgggacaacgccaagaacaccgtggacctgcagatgaacagcctgaagcccgaggacaccgccatctactactgtgccgctgccgccggatctgcttggtacggcacactgtacgagtacgactactggggccagggcacccttgtgaccgtgtcatctggcggaggaagcggcggaggatctgaagtgcaactggtggaatctggaggctctctggtgcagccagggggaagcctgagactgtcttgtgccgcttccggcttcaccttcgacgactacgccatgagctgggtgcgccaggtgccaggcaaaggcctggaatgggtgtccagcatcaactggagcggcacccacaccgattacgccgactccgtgaaaggcagattcacaatcagcagaaacaacgccaacaataccctgtacctgcagatgaactccctgaagtctgaggatacagcagtgtattattgcgccaagaactggcgggacgccggcaccacttggtttgagaaaagcggctctgccggacagggaacccaagtgacagtgtcctccctcgagggatctggcagagccgattgcggctttaccagcgagagctaccagcagggcgtgctgagcgccaccatcctgtacgagatcctgctgggcaaggccaccctgtacgccgtgctggtgtctgccctggtgctgatggctatggtcaagcggaaggacagccggggaagggccaagcgatctggatctggagcaacaaacttctcactactcaaacaagcaggtgacgtggaggagaatcccgggcctactagtatggactggatttggcgcatccttttccttgtcggcgctgctaccggcgcgcattcccagctccagttgcaagagagcggccctggcttggtaaaaccttccgagacccttagcctcacatgcacggttagtgggggcagcatttcctcaggtgattactattggggatggattcggcaacccccgggtaaaggattggagtggattggtcatatttattatagtggagcgacgtactacaacccaagtctcaaatccagggttacaatatccgtcgatacgagcaggaaccaattcagcttgaaactttctagtgtcaccgcagcagacacagccgtctattactgtacgcgggatgactccagtaattggcggtcccgagggcaagggacactggtcacggtctcctcatctggaggcggtggaagcggtggaggaggatctgtggacaacaagttcaacaaagagcggtacagcgcctactacgagatttggcaactgcccaacctgaacgtgcggcagaaggccgccttcatcggatctctgcaggacgaccctagccagagcgccaatctgctggccgaggccaagaagctgaacgacgcccaggcccctaaaacgcgtggcagcatccccgaggacacattcttcccaagccccgagagcagctgcgacgtgaagctggtggaaaagagcttcgagacagacaccaacctgaacttccagaacctgagcgtgatcggcttcagaatcctgctgctgaaagtggccggctttaacctgctgatgaccctgcggctgtggtccagc

SEQ ID NO: 5956 - DNA, 2628 bp, Artificial Sequence
  Synthetic Polynucloetide
atggccttaccagtgaccgccttgctcctgccgctggccttgctgctccacgccgccaggccggaggtgcaactggtggaaagcggcggaggctctgtgcagacaggcggctctctgagactgacctgtgccgccagcggcagaaccagcagatcctatggcatgggctggttcagacaggcccctggcaaagaacgcgagttcgtgtccggcatctcttggagaggcgacagcaccggctacgccgatagcgtgaagggccggttcaccatcagccgggacaacgccaagaacaccgtggacctgcagatgaacagcctgaagcccgaggacaccgccatctactactgtgccgctgccgccggatctgcttggtacggcacactgtacgagtacgactactggggccagggcacccttgtgaccgtgtcatctggcggaggaagcggcggaggatctgaagtgcaactggtggaatctggaggctctctggtgcagccagggggaagcctgagactgtcttgtgccgcttccggcttcaccttcgacgactacgccatgagctgggtgcgccaggtgccaggcaaaggcctggaatgggtgtccagcatcaactggagcggcacccacaccgattacgccgactccgtgaaaggcagattcacaatcagcagaaacaacgccaacaataccctgtacctgcagatgaactccctgaagtctgaggatacagcagtgtattattgcgccaagaactggcgggacgccggcaccacttggtttgagaaaagcggctctgccggacagggaacccaagtgacagtgtcctccctcgaggacaaaactcacacatgcccaccgtgcccagcaggcagagccgattgcggctttaccagcgagagctaccagcagggcgtgctgagcgccaccatcctgtacgagatcctgctgggcaaggccaccctgtacgccgtgctggtgtctgccctggtgctgatggctatggtcaagcggaaggacagccggggaagggccaagcgatctggatctggagcaacaaacttctcactactcaaacaagcaggtgacgtggaggagaatcccgggcctactagtatggactggatttggcgcatccttttccttgtcggcgctgctaccggcgcgcattcccagctccagttgcaagagagcggccctggcttggtaaaaccttccgagacccttagcctcacatgcacggttagtgggggcagcatttcctcaggtgattactattggggatggattcggcaacccccgggtaaaggattggagtggattggtcatatttattatagtggagcgacgtactacaacccaagtctcaaatccagggttacaatatccgtcgatacgagcaggaaccaattcagcttgaaactttctagtgtcaccgcagcagacacagccgtctattactgtacgcgggatgactccagtaattggcggtcccgagggcaagggacactggtcacggtctcctcatctggaggcggtggaagcggtggaggaggatctgtggacaacaagttcaacaaagagcggtacagcgcctactacgagatttggcaactgcccaacctgaacgtgcggcagaaggccgccttcatcggatctctgcaggacgaccctagccagagcgccaatctgctggccgaggccaagaagctgaacgacgcccaggcccctaaaacgcgtggcagcatccccgaggacacattcttcccaagccccgagagcagctgcgacgtgaagctggtggaaaagagcttcgagacagacaccaacctgaacttccagaacctgagcgtgatcggcttcagaatcctgctgctgaaagtggccggctttaacctgctgatgaccctgcggctgtggtccagccgcgccaagagaagcggatctggcgtgaagcagaccctgaatttcgacctgctgaagctggctggcgacgtggaatccaacccaggcccttctagaggccatatgaccgagtacaagcccacggtgcgcctcgccacccgcgacgacgtccccagggccgtacgcaccctcgccgccgcgttcgccgactaccccgccacgcgccacaccgtcgatccggaccgccacatcgagcgggtcaccgagctgcaagaactcttcctcacgcgcgtcgggctcgacatcggcaaggtgtgggtcgcggacgacggcgccgcggtggcggtctggaccacgccggagagcgtcgaagcgggggcggtgttcgccgagatcggcccgcgcatggccgagttgagcggttcccggctggccgcgcagcaacagatggaaggcctcctggcgccgcaccggcccaaggagcccgcgtggttcctggccaccgtcggcgtctcgcccgaccaccagggcaagggtctgggcagcgccgtcgtgctccccggagtggaggcggccgagcgcgccggggtgcccgccttcctggagacctccgcgccccgcaacctccccttctacgagcggctcggcttcaccgtcaccgccgacgtcgaggtgcccgaaggaccgcgcacctggtgcatgacccgcaagcccggtgcctga

SEQ ID NO: 5957 - DNA, 2628 bp, Artificial Sequence
  Synthetic Polynucloetide
atggccttaccagtgaccgccttgctcctgccgctggccttgctgctccacgccgccaggccggaggtgcaactggtggaaagcggcggaggctctgtgcagacaggcggctctctgagactgacctgtgccgccagcggcagaaccagcagatcctatggcatgggctggttcagacaggcccctggcaaagaacgcgagttcgtgtccggcatctcttggagaggcgacagcaccggctacgccgatagcgtgaagggccggttcaccatcagccgggacaacgccaagaacaccgtggacctgcagatgaacagcctgaagcccgaggacaccgccatctactactgtgccgctgccgccggatctgcttggtacggcacactgtacgagtacgactactggggccagggcacccttgtgaccgtgtcatctggcggaggaagcggcggaggatctgaagtgcaactggtggaatctggaggctctctggtgcagccagggggaagcctgagactgtcttgtgccgcttccggcttcaccttcgacgactacgccatgagctgggtgcgccaggtgccaggcaaaggcctggaatgggtgtccagcatcaactggagcggcacccacaccgattacgccgactccgtgaaaggcagattcacaatcagcagaaacaacgccaacaataccctgtacctgcagatgaactccctgaagtctgaggatacagcagtgtattattgcgccaagaactggcgggacgccggcaccacttggtttgagaaaagcggctctgccggacagggaacccaagtgacagtgtcctccctcgagggatctggcagagccgattgcggctttaccagcgagagctaccagcagggcgtgctgagcgccaccatcctgtacgagatcctgctgggcaaggccaccctgtacgccgtgctggtgtctgccctggtgctgatggctatggtcaagcggaaggacagccggggaagggccaagcgatctggatctggagcaacaaacttctcactactcaaacaagcaggtgacgtggaggagaatcccgggcctactagtatggactggatttggcgcatccttttccttgtcggcgctgctaccggcgcgcattcccagctccagttgcaagagagcggccctggcttggtaaaaccttccgagacccttagcctcacatgcacggttagtgggggcagcatttcctcaggtgattactattggggatggattcggcaacccccgggtaaaggattggagtggattggtcatatttattatagtggagcgacgtactacaacccaagtctcaaatccagggttacaatatccgtcgatacgagcaggaaccaattcagcttgaaactttctagtgtcaccgcagcagacacagccgtctattactgtacgcgggatgactccagtaattggcggtcccgagggcaagggacactggtcacggtctcctcatctggaggcggtggaagcggtggaggaggatctgtggacaacaagttcaacaaagagcggtacagcgcctactacgagatttggcaactgcccaacctgaacgtgcggcagaaggccgccttcatcggatctctgcaggacgaccctagccagagcgccaatctgctggccgaggccaagaagctgaacgacgcccaggcccctaaaacgcgtgataaaactcatacctgtccgccatgcccggcaatccccgaggacacattcttcccaagccccgagagcagctgcgacgtgaagctggtggaaaagagcttcgagacagacaccaacctgaacttccagaacctgagcgtgatcggcttcagaatcctgctgctgaaagtggccggctttaacctgctgatgaccctgcggctgtggtccagccgcgccaagagaagcggatctggcgtgaagcagaccctgaatttcgacctgctgaagctggctggcgacgtggaatccaacccaggcccttctagaggccatatgaccgagtacaagcccacggtgcgcctcgccacccgcgacgacgtccccagggccgtacgcaccctcgccgccgcgttcgccgactaccccgccacgcgccacaccgtcgatccggaccgccacatcgagcgggtcaccgagctgcaagaactcttcctcacgcgcgtcgggctcgacatcggcaaggtgtgggtcgcggacgacggcgccgcggtggcggtctggaccacgccggagagcgtcgaagcgggggcggtgttcgccgagatcggcccgcgcatggccgagttgagcggttcccggctggccgcgcagcaacagatggaaggcctcctggcgccgcaccggcccaaggagcccgcgtggttcctggccaccgtcggcgtctcgcccgaccaccagggcaagggtctgggcagcgccgtcgtgctccccggagtggaggcggccgagcgcgccggggtgcccgccttcctggagacctccgcgccccgcaacctccccttctacgagcggctcggcttcaccgtcaccgccgacgtcgaggtgcccgaaggaccgcgcacctggtgcatgacccgcaagcccggtgcctga

SEQ ID NO: 5958 - DNA, 2655 bp, Artificial Sequence
  Synthetic Polynucloetide
atggccttaccagtgaccgccttgctcctgccgctggccttgctgctccacgccgccaggccggaggtgcaactggtggaaagcggcggaggctctgtgcagacaggcggctctctgagactgacctgtgccgccagcggcagaaccagcagatcctatggcatgggctggttcagacaggcccctggcaaagaacgcgagttcgtgtccggcatctcttggagaggcgacagcaccggctacgccgatagcgtgaagggccggttcaccatcagccgggacaacgccaagaacaccgtggacctgcagatgaacagcctgaagcccgaggacaccgccatctactactgtgccgctgccgccggatctgcttggtacggcacactgtacgagtacgactactggggccagggcacccttgtgaccgtgtcatctggcggaggaagcggcggaggatctgaagtgcaactggtggaatctggaggctctctggtgcagccagggggaagcctgagactgtcttgtgccgcttccggcttcaccttcgacgactacgccatgagctgggtgcgccaggtgccaggcaaaggcctggaatgggtgtccagcatcaactggagcggcacccacaccgattacgccgactccgtgaaaggcagattcacaatcagcagaaacaacgccaacaataccctgtacctgcagatgaactccctgaagtctgaggatacagcagtgtattattgcgccaagaactggcgggacgccggcaccacttggtttgagaaaagcggctctgccggacagggaacccaagtgacagtgtcctccctcgaggacaaaactcacacatgcccaccgtgcccagcaggcagagccgattgcggctttaccagcgagagctaccagcagggcgtgctgagcgccaccatcctgtacgagatcctgctgggcaaggccaccctgtacgccgtgctggtgtctgccctggtgctgatggctatggtcaagcggaaggacagccggggaagggccaagcgatctggatctggagcaacaaacttctcactactcaaacaagcaggtgacgtggaggagaatcccgggcctactagtatggactggatttggcgcatccttttccttgtcggcgctgctaccggcgcgcattcccagctccagttgcaagagagcggccctggcttggtaaaaccttccgagacccttagcctcacatgcacggttagtgggggcagcatttcctcaggtgattactattggggatggattcggcaacccccgggtaaaggattggagtggattggtcatatttattatagtggagcgacgtactacaacccaagtctcaaatccagggttacaatatccgtcgatacgagcaggaaccaattcagcttgaaactttctagtgtcaccgcagcagacacagccgtctattactgtacgcgggatgactccagtaattggcggtcccgagggcaagggacactggtcacggtctcctcatctggaggcggtggaagcggtggaggaggatctgtggacaacaagttcaacaaagagcggtacagcgcctactacgagatttggcaactgcccaacctgaacgtgcggcagaaggccgccttcatcggatctctgcaggacgaccctagccagagcgccaatctgctggccgaggccaagaagctgaacgacgcccaggcccctaaaacgcgtgataaaactcatacctgtccgccatgcccggcaatccccgaggacacattcttcccaagccccgagagcagctgcgacgtgaagctggtggaaaagagcttcgagacagacaccaacctgaacttccagaacctgagcgtgatcggcttcagaatcctgctgctgaaagtggccggctttaacctgctgatgaccctgcggctgtggtccagccgcgccaagagaagcggatctggcgtgaagcagaccctgaatttcgacctgctgaagctggctggcgacgtggaatccaacccaggcccttctagaggccatatgaccgagtacaagcccacggtgcgcctcgccacccgcgacgacgtccccagggccgtacgcaccctcgccgccgcgttcgccgactaccccgccacgcgccacaccgtcgatccggaccgccacatcgagcgggtcaccgagctgcaagaactcttcctcacgcgcgtcgggctcgacatcggcaaggtgtgggtcgcggacgacggcgccgcggtggcggtctggaccacgccggagagcgtcgaagcgggggcggtgttcgccgagatcggcccgcgcatggccgagttgagcggttcccggctggccgcgcagcaacagatggaaggcctcctggcgccgcaccggcccaaggagcccgcgtggttcctggccaccgtcggcgtctcgcccgaccaccagggcaagggtctgggcagcgccgtcgtgctccccggagtggaggcggccgagcgcgccggggtgcccgccttcctggagacctccgcgccccgcaacctccccttctacgagcggctcggcttcaccgtcaccgccgacgtcgaggtgcccgaaggaccgcgcacctggtgcatgacccgcaagcccggtgcctga

SEQ ID NO: 5959 - DNA, 1953 bp, Artificial Sequence
  Synthetic Polynucloetide
atggccttaccagtgaccgccttgctcctgccgctggccttgctgctccacgccgccaggccggaggtgcaactggtggaaagcggcggaggctctgtgcagacaggcggctctctgagactgacctgtgccgccagcggcagaaccagcagatcctatggcatgggctggttcagacaggcccctggcaaagaacgcgagttcgtgtccggcatctcttggagaggcgacagcaccggctacgccgatagcgtgaagggccggttcaccatcagccgggacaacgccaagaacaccgtggacctgcagatgaacagcctgaagcccgaggacaccgccatctactactgtgccgctgccgccggatctgcttggtacggcacactgtacgagtacgactactggggccagggcacccttgtgaccgtgtcatctggcggaggaagcggcggaggatctgaagtgcaactggtggaatctggaggctctctggtgcagccagggggaagcctgagactgtcttgtgccgcttccggcttcaccttcgacgactacgccatgagctgggtgcgccaggtgccaggcaaaggcctggaatgggtgtccagcatcaactggagcggcacccacaccgattacgccgactccgtgaaaggcagattcacaatcagcagaaacaacgccaacaataccctgtacctgcagatgaactccctgaagtctgaggatacagcagtgtattattgcgccaagaactggcgggacgccggcaccacttggtttgagaaaagcggctctgccggacagggaacccaagtgacagtgtcctccctcgaggacaaaactcacacatgcccaccgtgcccagcaggcagagccgattgcggctttaccagcgagagctaccagcagggcgtgctgagcgccaccatcctgtacgagatcctgctgggcaaggccaccctgtacgccgtgctggtgtctgccctggtgctgatggctatggtcaagcggaaggacagccggggaagggccaagcgatctggatctggagcaacaaacttctcactactcaaacaagcaggtgacgtggaggagaatcccgggcctactagtatggactggatttggcgcatccttttccttgtcggcgctgctaccggcgcgcattcccagctccagttgcaagagagcggccctggcttggtaaaaccttccgagacccttagcctcacatgcacggttagtgggggcagcatttcctcaggtgattactattggggatggattcggcaacccccgggtaaaggattggagtggattggtcatatttattatagtggagcgacgtactacaacccaagtctcaaatccagggttacaatatccgtcgatacgagcaggaaccaattcagcttgaaactttctagtgtcaccgcagcagacacagccgtctattactgtacgcgggatgactccagtaattggcggtcccgagggcaagggacactggtcacggtctcctcatctggaggcggtggaagcggtggaggaggatctgtggacaacaagttcaacaaagagcggtacagcgcctactacgagatttggcaactgcccaacctgaacgtgcggcagaaggccgccttcatcggatctctgcaggacgaccctagccagagcgccaatctgctggccgaggccaagaagctgaacgacgcccaggcccctaaaacgcgtgataaaactcatacctgtccgccatgcccggcaatccccgaggacacattcttcccaagccccgagagcagctgcgacgtgaagctggtggaaaagagcttcgagacagacaccaacctgaacttccagaacctgagcgtgatcggcttcagaatcctgctgctgaaagtggccggctttaacctgctgatgaccctgcggctgtggtccagc

SEQ ID NO: 5960 - DNA, 1926 bp, Artificial Sequence
  Synthetic Polynucloetide
atggccttaccagtgaccgccttgctcctgccgctggccttgctgctccacgccgccaggccggaggtgcaactggtggaaagcggcggaggctctgtgcagacaggcggctctctgagactgacctgtgccgccagcggcagaaccagcagatcctatggcatgggctggttcagacaggcccctggcaaagaacgcgagttcgtgtccggcatctcttggagaggcgacagcaccggctacgccgatagcgtgaagggccggttcaccatcagccgggacaacgccaagaacaccgtggacctgcagatgaacagcctgaagcccgaggacaccgccatctactactgtgccgctgccgccggatctgcttggtacggcacactgtacgagtacgactactggggccagggcacccttgtgaccgtgtcatctggcggaggaagcggcggaggatctgaagtgcaactggtggaatctggaggctctctggtgcagccagggggaagcctgagactgtcttgtgccgcttccggcttcaccttcgacgactacgccatgagctgggtgcgccaggtgccaggcaaaggcctggaatgggtgtccagcatcaactggagcggcacccacaccgattacgccgactccgtgaaaggcagattcacaatcagcagaaacaacgccaacaataccctgtacctgcagatgaactccctgaagtctgaggatacagcagtgtattattgcgccaagaactggcgggacgccggcaccacttggtttgagaaaagcggctctgccggacagggaacccaagtgacagtgtcctccctcgagggatctggcagagccgattgcggctttaccagcgagagctaccagcagggcgtgctgagcgccaccatcctgtacgagatcctgctgggcaaggccaccctgtacgccgtgctggtgtctgccctggtgctgatggctatggtcaagcggaaggacagccggggaagggccaagcgatctggatctggagcaacaaacttctcactactcaaacaagcaggtgacgtggaggagaatcccgggcctactagtatggactggatttggcgcatccttttccttgtcggcgctgctaccggcgcgcattcccagctccagttgcaagagagcggccctggcttggtaaaaccttccgagacccttagcctcacatgcacggttagtgggggcagcatttcctcaggtgattactattggggatggattcggcaacccccgggtaaaggattggagtggattggtcatatttattatagtggagcgacgtactacaacccaagtctcaaatccagggttacaatatccgtcgatacgagcaggaaccaattcagcttgaaactttctagtgtcaccgcagcagacacagccgtctattactgtacgcgggatgactccagtaattggcggtcccgagggcaagggacactggtcacggtctcctcatctggaggcggtggaagcggtggaggaggatctgtggacaacaagttcaacaaagagcggtacagcgcctactacgagatttggcaactgcccaacctgaacgtgcggcagaaggccgccttcatcggatctctgcaggacgaccctagccagagcgccaatctgctggccgaggccaagaagctgaacgacgcccaggcccctaaaacgcgtgataaaactcatacctgtccgccatgcccggcaatccccgaggacacattcttcccaagccccgagagcagctgcgacgtgaagctggtggaaaagagcttcgagacagacaccaacctgaacttccagaacctgagcgtgatcggcttcagaatcctgctgctgaaagtggccggctttaacctgctgatgaccctgcggctgtggtccagc

SEQ ID NO: 5961 - DNA, 3282 bp, Artificial Sequence
  Synthetic Polynucloetide
atggccttaccagtgaccgccttgctcctgccgctggccttgctgctccacgccgccaggccggaggtgcaactggtggaaagcggcggaggctctgtgcagacaggcggctctctgagactgacctgtgccgccagcggcagaaccagcagatcctatggcatgggctggttcagacaggcccctggcaaagaacgcgagttcgtgtccggcatctcttggagaggcgacagcaccggctacgccgatagcgtgaagggccggttcaccatcagccgggacaacgccaagaacaccgtggacctgcagatgaacagcctgaagcccgaggacaccgccatctactactgtgccgctgccgccggatctgcttggtacggcacactgtacgagtacgactactggggccagggcacccttgtgaccgtgtcatctggcggaggaagcggcggaggatctgaagtgcaactggtggaatctggaggctctctggtgcagccagggggaagcctgagactgtcttgtgccgcttccggcttcaccttcgacgactacgccatgagctgggtgcgccaggtgccaggcaaaggcctggaatgggtgtccagcatcaactggagcggcacccacaccgattacgccgactccgtgaaaggcagattcacaatcagcagaaacaacgccaacaataccctgtacctgcagatgaactccctgaagtctgaggatacagcagtgtattattgcgccaagaactggcgggacgccggcaccacttggtttgagaaaagcggctctgccggacagggaacccaagtgacagtgtcctccctcgagggacagcctaaggccaatcctaccgtgacactgttccctccaagcagcgaagaactccaggccaacaaggccacacttgtgtgcctgatctccgacttctaccctggggctgtgacagtggcttggaaggccgatggatctcctgtgaaagccggcgtggaaaccaccaagccatccaagcagagcaacaacaaatacgccgccagctcctacctgagcctgacacctgagcagtggaagtcccacagatcctacagctgccaagtgacccacgaaggcagcaccgtggaaaagacagtggcccctacagagtgcagccccatcaagaccgatgtgattacaatggaccccaaggacaactgctccaaggacgccaacgataccctgctgctccagctgaccaacaccagcgcctactacatgtacttgttgctgctgctgaagtccgtggtgtacttcgccatcatcacatgctgcctgctgcggagaaccgccttctgctgcaacggcgagaagtctagggccaagcgatctggatctggagcaacaaacttctcactactcaaacaagcaggtgacgtggaggagaatcccgggcctactagtatggactggatttggcgcatccttttccttgtcggcgctgctaccggcgcgcattcccagctccagttgcaagagagcggccctggcttggtaaaaccttccgagacccttagcctcacatgcacggttagtgggggcagcatttcctcaggtgattactattggggatggattcggcaacccccgggtaaaggattggagtggattggtcatatttattatagtggagcgacgtactacaacccaagtctcaaatccagggttacaatatccgtcgatacgagcaggaaccaattcagcttgaaactttctagtgtcaccgcagcagacacagccgtctattactgtacgcgggatgactccagtaattggcggtcccgagggcaagggacactggtcacggtctcctcatctggaggcggtggaagcggtggaggaggatctgtggacaacaagttcaacaaagagcggtacagcgcctactacgagatttggcaactgcccaacctgaacgtgcggcagaaggccgccttcatcggatctctgcaggacgaccctagccagagcgccaatctgctggccgaggccaagaagctgaacgacgcccaggcccctaaaacgcgtgcctctacaaagggaccctccgtgtttcctctggctcccagcagcaagtctacaagcggaggaacagccgctctgggctgcctggtcaaggattactttcccgagcctgtgaccgtgtcctggaatagcggagcactgacaagcggcgtgcacacctttccagccgtgctgcaaagcagcggcctgtactctctgagcagcgtggtcacagtgcctagctctagcctgggcacccagacctacatctgcaatgtgaaccacaagcctagcaacaccaaggtggacaagagagtggaacccaagagctgtgaagtgaaaaccgactccaccgaccacgtgaagcccaaagagacagagaacaccaagcagcccagcaagagctgccacaagcccaaggccatcgtgcacaccgagaaagtgaacatgatgagcctgaccgtgctgggcctgcggatgctgttcgccaaaaccgtggccgtgaacttcctgctgaccgccaagctgttcttcctccgcgccaagagaagcggatctggcgtgaagcagaccctgaatttcgacctgctgaagctggctggcgacgtggaatccaacccaggcccttctagaggccatatgaccgagtacaagcccacggtgcgcctcgccacccgcgacgacgtccccagggccgtacgcaccctcgccgccgcgttcgccgactaccccgccacgcgccacaccgtcgatccggaccgccacatcgagcgggtcaccgagctgcaagaactcttcctcacgcgcgtcgggctcgacatcggcaaggtgtgggtcgcggacgacggcgccgcggtggcggtctggaccacgccggagagcgtcgaagcgggggcggtgttcgccgagatcggcccgcgcatggccgagttgagcggttcccggctggccgcgcagcaacagatggaaggcctcctggcgccgcaccggcccaaggagcccgcgtggttcctggccaccgtcggcgtctcgcccgaccaccagggcaagggtctgggcagcgccgtcgtgctccccggagtggaggcggccgagcgcgccggggtgcccgccttcctggagacctccgcgccccgcaacctccccttctacgagcggctcggcttcaccgtcaccgccgacgtcgaggtgcccgaaggaccgcgcacctggtgcatgacccgcaagcccggtgcctga

SEQ ID NO: 5962 - DNA, 2580 bp, Artificial Sequence
  Synthetic Polynucloetide
atggccttaccagtgaccgccttgctcctgccgctggccttgctgctccacgccgccaggccggaggtgcaactggtggaaagcggcggaggctctgtgcagacaggcggctctctgagactgacctgtgccgccagcggcagaaccagcagatcctatggcatgggctggttcagacaggcccctggcaaagaacgcgagttcgtgtccggcatctcttggagaggcgacagcaccggctacgccgatagcgtgaagggccggttcaccatcagccgggacaacgccaagaacaccgtggacctgcagatgaacagcctgaagcccgaggacaccgccatctactactgtgccgctgccgccggatctgcttggtacggcacactgtacgagtacgactactggggccagggcacccttgtgaccgtgtcatctggcggaggaagcggcggaggatctgaagtgcaactggtggaatctggaggctctctggtgcagccagggggaagcctgagactgtcttgtgccgcttccggcttcaccttcgacgactacgccatgagctgggtgcgccaggtgccaggcaaaggcctggaatgggtgtccagcatcaactggagcggcacccacaccgattacgccgactccgtgaaaggcagattcacaatcagcagaaacaacgccaacaataccctgtacctgcagatgaactccctgaagtctgaggatacagcagtgtattattgcgccaagaactggcgggacgccggcaccacttggtttgagaaaagcggctctgccggacagggaacccaagtgacagtgtcctccctcgagggacagcctaaggccaatcctaccgtgacactgttccctccaagcagcgaagaactccaggccaacaaggccacacttgtgtgcctgatctccgacttctaccctggggctgtgacagtggcttggaaggccgatggatctcctgtgaaagccggcgtggaaaccaccaagccatccaagcagagcaacaacaaatacgccgccagctcctacctgagcctgacacctgagcagtggaagtcccacagatcctacagctgccaagtgacccacgaaggcagcaccgtggaaaagacagtggcccctacagagtgcagccccatcaagaccgatgtgattacaatggaccccaaggacaactgctccaaggacgccaacgataccctgctgctccagctgaccaacaccagcgcctactacatgtacttgttgctgctgctgaagtccgtggtgtacttcgccatcatcacatgctgcctgctgcggagaaccgccttctgctgcaacggcgagaagtctagggccaagcgatctggatctggagcaacaaacttctcactactcaaacaagcaggtgacgtggaggagaatcccgggcctactagtatggactggatttggcgcatccttttccttgtcggcgctgctaccggcgcgcattcccagctccagttgcaagagagcggccctggcttggtaaaaccttccgagacccttagcctcacatgcacggttagtgggggcagcatttcctcaggtgattactattggggatggattcggcaacccccgggtaaaggattggagtggattggtcatatttattatagtggagcgacgtactacaacccaagtctcaaatccagggttacaatatccgtcgatacgagcaggaaccaattcagcttgaaactttctagtgtcaccgcagcagacacagccgtctattactgtacgcgggatgactccagtaattggcggtcccgagggcaagggacactggtcacggtctcctcatctggaggcggtggaagcggtggaggaggatctgtggacaacaagttcaacaaagagcggtacagcgcctactacgagatttggcaactgcccaacctgaacgtgcggcagaaggccgccttcatcggatctctgcaggacgaccctagccagagcgccaatctgctggccgaggccaagaagctgaacgacgcccaggcccctaaaacgcgtgcctctacaaagggaccctccgtgtttcctctggctcccagcagcaagtctacaagcggaggaacagccgctctgggctgcctggtcaaggattactttcccgagcctgtgaccgtgtcctggaatagcggagcactgacaagcggcgtgcacacctttccagccgtgctgcaaagcagcggcctgtactctctgagcagcgtggtcacagtgcctagctctagcctgggcacccagacctacatctgcaatgtgaaccacaagcctagcaacaccaaggtggacaagagagtggaacccaagagctgtgaagtgaaaaccgactccaccgaccacgtgaagcccaaagagacagagaacaccaagcagcccagcaagagctgccacaagcccaaggccatcgtgcacaccgagaaagtgaacatgatgagcctgaccgtgctgggcctgcggatgctgttcgccaaaaccgtggccgtgaacttcctgctgaccgccaagctgttcttcctc

SEQ ID NO: 5963 - DNA, 2667 bp, Artificial Sequence
  Synthetic Polynucloetide
atggccttaccagtgaccgccttgctcctgccgctggccttgctgctccacgccgccaggccggaggtgcaactggtggaaagcggcggaggctctgtgcagacaggcggctctctgagactgacctgtgccgccagcggcagaaccagcagatcctatggcatgggctggttcagacaggcccctggcaaagaacgcgagttcgtgtccggcatctcttggagaggcgacagcaccggctacgccgatagcgtgaagggccggttcaccatcagccgggacaacgccaagaacaccgtggacctgcagatgaacagcctgaagcccgaggacaccgccatctactactgtgccgctgccgccggatctgcttggtacggcacactgtacgagtacgactactggggccagggcacccttgtgaccgtgtcatctggcggaggaagcggcggaggatctgaagtgcaactggtggaatctggaggctctctggtgcagccagggggaagcctgagactgtcttgtgccgcttccggcttcaccttcgacgactacgccatgagctgggtgcgccaggtgccaggcaaaggcctggaatgggtgtccagcatcaactggagcggcacccacaccgattacgccgactccgtgaaaggcagattcacaatcagcagaaacaacgccaacaataccctgtacctgcagatgaactccctgaagtctgaggatacagcagtgtattattgcgccaagaactggcgggacgccggcaccacttggtttgagaaaagcggctctgccggacagggaacccaagtgacagtgtcctccctcgagggatctcccatcaagaccgatgtgattacaatggaccccaaggacaactgctccaaggacgccaacgataccctgctgctccagctgaccaacaccagcgcctactacatgtacttgttgctgctgctgaagtccgtggtgtacttcgccatcatcacatgctgcctgctgcggagaaccgccttctgctgcaacggcgagaagtctagggccaagcgatctggatctggagcaacaaacttctcactactcaaacaagcaggtgacgtggaggagaatcccgggcctactagtatggactggatttggcgcatccttttccttgtcggcgctgctaccggcgcgcattcccagctccagttgcaagagagcggccctggcttggtaaaaccttccgagacccttagcctcacatgcacggttagtgggggcagcatttcctcaggtgattactattggggatggattcggcaacccccgggtaaaggattggagtggattggtcatatttattatagtggagcgacgtactacaacccaagtctcaaatccagggttacaatatccgtcgatacgagcaggaaccaattcagcttgaaactttctagtgtcaccgcagcagacacagccgtctattactgtacgcgggatgactccagtaattggcggtcccgagggcaagggacactggtcacggtctcctcatctggaggcggtggaagcggtggaggaggatctgtggacaacaagttcaacaaagagcggtacagcgcctactacgagatttggcaactgcccaacctgaacgtgcggcagaaggccgccttcatcggatctctgcaggacgaccctagccagagcgccaatctgctggccgaggccaagaagctgaacgacgcccaggcccctaaaacgcgtggcagcgaagtgaaaaccgactccaccgaccacgtgaagcccaaagagacagagaacaccaagcagcccagcaagagctgccacaagcccaaggccatcgtgcacaccgagaaagtgaacatgatgagcctgaccgtgctgggcctgcggatgctgttcgccaaaaccgtggccgtgaacttcctgctgaccgccaagctgttcttcctccgcgccaagagaagcggatctggcgtgaagcagaccctgaatttcgacctgctgaagctggctggcgacgtggaatccaacccaggcccttctagaggccatatgaccgagtacaagcccacggtgcgcctcgccacccgcgacgacgtccccagggccgtacgcaccctcgccgccgcgttcgccgactaccccgccacgcgccacaccgtcgatccggaccgccacatcgagcgggtcaccgagctgcaagaactcttcctcacgcgcgtcgggctcgacatcggcaaggtgtgggtcgcggacgacggcgccgcggtggcggtctggaccacgccggagagcgtcgaagcgggggcggtgttcgccgagatcggcccgcgcatggccgagttgagcggttcccggctggccgcgcagcaacagatggaaggcctcctggcgccgcaccggcccaaggagcccgcgtggttcctggccaccgtcggcgtctcgcccgaccaccagggcaagggtctgggcagcgccgtcgtgctccccggagtggaggcggccgagcgcgccggggtgcccgccttcctggagacctccgcgccccgcaacctccccttctacgagcggctcggcttcaccgtcaccgccgacgtcgaggtgcccgaaggaccgcgcacctggtgcatgacccgcaagcccggtgcctga

SEQ ID NO: 5964 - DNA, 1965 bp, Artificial Sequence
  Synthetic Polynucloetide
atggccttaccagtgaccgccttgctcctgccgctggccttgctgctccacgccgccaggccggaggtgcaactggtggaaagcggcggaggctctgtgcagacaggcggctctctgagactgacctgtgccgccagcggcagaaccagcagatcctatggcatgggctggttcagacaggcccctggcaaagaacgcgagttcgtgtccggcatctcttggagaggcgacagcaccggctacgccgatagcgtgaagggccggttcaccatcagccgggacaacgccaagaacaccgtggacctgcagatgaacagcctgaagcccgaggacaccgccatctactactgtgccgctgccgccggatctgcttggtacggcacactgtacgagtacgactactggggccagggcacccttgtgaccgtgtcatctggcggaggaagcggcggaggatctgaagtgcaactggtggaatctggaggctctctggtgcagccagggggaagcctgagactgtcttgtgccgcttccggcttcaccttcgacgactacgccatgagctgggtgcgccaggtgccaggcaaaggcctggaatgggtgtccagcatcaactggagcggcacccacaccgattacgccgactccgtgaaaggcagattcacaatcagcagaaacaacgccaacaataccctgtacctgcagatgaactccctgaagtctgaggatacagcagtgtattattgcgccaagaactggcgggacgccggcaccacttggtttgagaaaagcggctctgccggacagggaacccaagtgacagtgtcctccctcgagggatctcccatcaagaccgatgtgattacaatggaccccaaggacaactgctccaaggacgccaacgataccctgctgctccagctgaccaacaccagcgcctactacatgtacttgttgctgctgctgaagtccgtggtgtacttcgccatcatcacatgctgcctgctgcggagaaccgccttctgctgcaacggcgagaagtctagggccaagcgatctggatctggagcaacaaacttctcactactcaaacaagcaggtgacgtggaggagaatcccgggcctactagtatggactggatttggcgcatccttttccttgtcggcgctgctaccggcgcgcattcccagctccagttgcaagagagcggccctggcttggtaaaaccttccgagacccttagcctcacatgcacggttagtgggggcagcatttcctcaggtgattactattggggatggattcggcaacccccgggtaaaggattggagtggattggtcatatttattatagtggagcgacgtactacaacccaagtctcaaatccagggttacaatatccgtcgatacgagcaggaaccaattcagcttgaaactttctagtgtcaccgcagcagacacagccgtctattactgtacgcgggatgactccagtaattggcggtcccgagggcaagggacactggtcacggtctcctcatctggaggcggtggaagcggtggaggaggatctgtggacaacaagttcaacaaagagcggtacagcgcctactacgagatttggcaactgcccaacctgaacgtgcggcagaaggccgccttcatcggatctctgcaggacgaccctagccagagcgccaatctgctggccgaggccaagaagctgaacgacgcccaggcccctaaaacgcgtggcagcgaagtgaaaaccgactccaccgaccacgtgaagcccaaagagacagagaacaccaagcagcccagcaagagctgccacaagcccaaggccatcgtgcacaccgagaaagtgaacatgatgagcctgaccgtgctgggcctgcggatgctgttcgccaaaaccgtggccgtgaacttcctgctgaccgccaagctgttcttcctc

SEQ ID NO: 5965 - DNA, 2019 bp, Artificial Sequence
  Synthetic Polynucloetide
atggccttaccagtgaccgccttgctcctgccgctggccttgctgctccacgccgccaggccggaggtgcaactggtggaaagcggcggaggctctgtgcagacaggcggctctctgagactgacctgtgccgccagcggcagaaccagcagatcctatggcatgggctggttcagacaggcccctggcaaagaacgcgagttcgtgtccggcatctcttggagaggcgacagcaccggctacgccgatagcgtgaagggccggttcaccatcagccgggacaacgccaagaacaccgtggacctgcagatgaacagcctgaagcccgaggacaccgccatctactactgtgccgctgccgccggatctgcttggtacggcacactgtacgagtacgactactggggccagggcacccttgtgaccgtgtcatctggcggaggaagcggcggaggatctgaagtgcaactggtggaatctggaggctctctggtgcagccagggggaagcctgagactgtcttgtgccgcttccggcttcaccttcgacgactacgccatgagctgggtgcgccaggtgccaggcaaaggcctggaatgggtgtccagcatcaactggagcggcacccacaccgattacgccgactccgtgaaaggcagattcacaatcagcagaaacaacgccaacaataccctgtacctgcagatgaactccctgaagtctgaggatacagcagtgtattattgcgccaagaactggcgggacgccggcaccacttggtttgagaaaagcggctctgccggacagggaacccaagtgacagtgtcctccctcgaggacaaaactcacacatgcccaccgtgcccagcacccatcaagaccgatgtgattacaatggaccccaaggacaactgctccaaggacgccaacgataccctgctgctccagctgaccaacaccagcgcctactacatgtacttgttgctgctgctgaagtccgtggtgtacttcgccatcatcacatgctgcctgctgcggagaaccgccttctgctgcaacggcgagaagtctagggccaagcgatctggatctggagcaacaaacttctcactactcaaacaagcaggtgacgtggaggagaatcccgggcctactagtatggactggatttggcgcatccttttccttgtcggcgctgctaccggcgcgcattcccagctccagttgcaagagagcggccctggcttggtaaaaccttccgagacccttagcctcacatgcacggttagtgggggcagcatttcctcaggtgattactattggggatggattcggcaacccccgggtaaaggattggagtggattggtcatatttattatagtggagcgacgtactacaacccaagtctcaaatccagggttacaatatccgtcgatacgagcaggaaccaattcagcttgaaactttctagtgtcaccgcagcagacacagccgtctattactgtacgcgggatgactccagtaattggcggtcccgagggcaagggacactggtcacggtctcctcatctggaggcggtggaagcggtggaggaggatctgtggacaacaagttcaacaaagagcggtacagcgcctactacgagatttggcaactgcccaacctgaacgtgcggcagaaggccgccttcatcggatctctgcaggacgaccctagccagagcgccaatctgctggccgaggccaagaagctgaacgacgcccaggcccctaaaacgcgtgataaaactcatacctgtccgccatgcccggcagaagtgaaaaccgactccaccgaccacgtgaagcccaaagagacagagaacaccaagcagcccagcaagagctgccacaagcccaaggccatcgtgcacaccgagaaagtgaacatgatgagcctgaccgtgctgggcctgcggatgctgttcgccaaaaccgtggccgtgaacttcctgctgaccgccaagctgttcttcctc

SEQ ID NO: 5966 - DNA, 1113 bp, Artificial Sequence
  Synthetic Polynucloetide
atggactggatttggcgcatccttttccttgtcggcgctgctaccggcgcgcattcccagctccagttgcaagagagcggccctggcttggtaaaaccttccgagacccttagcctcacatgcacggttagtgggggcagcatttcctcaggtgattactattggggatggattcggcaacccccgggtaaaggattggagtggattggtcatatttattatagtggagcgacgtactacaacccaagtctcaaatccagggttacaatatccgtcgatacgagcaggaaccaattcagcttgaaactttctagtgtcaccgcagcagacacagccgtctattactgtacgcgggatgactccagtaattggcggtcccgagggcaagggacactggtcacggtctcctcatctggaggcggtggaagcggtggaggaggatctgtggacaacaagttcaacaaagagcggtacagcgcctactacgagatttggcaactgcccaacctgaacgtgcggcagaaggccgccttcatcggatctctgcaggacgaccctagccagagcgccaatctgctggccgaggccaagaagctgaacgacgcccaggcccctaaaacgcgtgcctctacaaagggaccctccgtgtttcctctggctcccagcagcaagtctacaagcggaggaacagccgctctgggctgcctggtcaaggattactttcccgagcctgtgaccgtgtcctggaatagcggagcactgacaagcggcgtgcacacctttccagccgtgctgcaaagcagcggcctgtactctctgagcagcgtggtcacagtgcctagctctagcctgggcacccagacctacatctgcaatgtgaaccacaagcctagcaacaccaaggtggacaagagagtggaacccaagagctgtatccccgaggacacattcttcccaagccccgagagcagctgcgacgtgaagctggtggaaaagagcttcgagacagacaccaacctgaacttccagaacctgagcgtgatcggcttcagaatcctgctgctgaaagtggccggctttaacctgctgatgaccctgcggctgtggtccagc

SEQ ID NO: 5967 - DNA, 1137 bp, Artificial Sequence
  Synthetic Polynucloetide
atggactggatttggcgcatccttttccttgtcggcgctgctaccggcgcgcattcccagctccagttgcaagagagcggccctggcttggtaaaaccttccgagacccttagcctcacatgcacggttagtgggggcagcatttcctcaggtgattactattggggatggattcggcaacccccgggtaaaggattggagtggattggtcatatttattatagtggagcgacgtactacaacccaagtctcaaatccagggttacaatatccgtcgatacgagcaggaaccaattcagcttgaaactttctagtgtcaccgcagcagacacagccgtctattactgtacgcgggatgactccagtaattggcggtcccgagggcaagggacactggtcacggtctcctcatctggaggcggtggaagcggtggaggaggatctgtggacaacaagttcaacaaagagcggtacagcgcctactacgagatttggcaactgcccaacctgaacgtgcggcagaaggccgccttcatcggatctctgcaggacgaccctagccagagcgccaatctgctggccgaggccaagaagctgaacgacgcccaggcccctaaaacgcgtgcctctacaaagggaccctccgtgtttcctctggctcccagcagcaagtctacaagcggaggaacagccgctctgggctgcctggtcaaggattactttcccgagcctgtgaccgtgtcctggaatagcggagcactgacaagcggcgtgcacacctttccagccgtgctgcaaagcagcggcctgtactctctgagcagcgtggtcacagtgcctagctctagcctgggcacccagacctacatctgcaatgtgaaccacaagcctagcaacaccaaggtggacaagagagtggaacccaagagctgtgaagtgaaaaccgactccaccgaccacgtgaagcccaaagagacagagaacaccaagcagcccagcaagagctgccacaagcccaaggccatcgtgcacaccgagaaagtgaacatgatgagcctgaccgtgctgggcctgcggatgctgttcgccaaaaccgtggccgtgaacttcctgctgaccgccaagctgttcttcctc

SEQ ID NO: 5968 - DNA, 1920 bp, Artificial Sequence; identical to SEQ ID NO: 5720
  Synthetic Polynucloetide

SEQ ID NO: 5969 - DNA, 1941 bp, Artificial Sequence; identical to SEQ ID NO: 5721
  Synthetic Polynucloetide

SEQ ID NO: 5970 - DNA, 3180 bp, Artificial Sequence; identical to SEQ ID NO: 5722
  Synthetic Polynucloetide

SEQ ID NO: 5971 - DNA, 3000 bp, Artificial Sequence; identical to SEQ ID NO: 5723
  Synthetic Polynucloetide

SEQ ID NO: 5972 - DNA, 2997 bp, Artificial Sequence; identical to SEQ ID NO: 5724
  Synthetic Polynucloetide

SEQ ID NO: 5973 - DNA, 2295 bp, Artificial Sequence; identical to SEQ ID NO: 5725
  Synthetic Polynucloetide

SEQ ID NO: 5974 - DNA, 2970 bp, Artificial Sequence; identical to SEQ ID NO: 5726
  Synthetic Polynucloetide

SEQ ID NO: 5975 - DNA, 2307 bp, Artificial Sequence; identical to SEQ ID NO: 5727
  Synthetic Polynucloetide

SEQ ID NO: 5976 - DNA, 2973 bp, Artificial Sequence; identical to SEQ ID NO: 5728
  Synthetic Polynucloetide

SEQ ID NO: 5977 - DNA, 3132 bp, Artificial Sequence; identical to SEQ ID NO: 5729
  Synthetic Polynucloetide

SEQ ID NO: 5978 - DNA, 3135 bp, Artificial Sequence; identical to SEQ ID NO: 5730
  Synthetic Polynucloetide

SEQ ID NO: 5979 - DNA, 2997 bp, Artificial Sequence; identical to SEQ ID NO: 5731
  Synthetic Polynucloetide

SEQ ID NO: 5980 - DNA, 3243 bp, Artificial Sequence; identical to SEQ ID NO: 5732
  Synthetic Polynucloetide

SEQ ID NO: 5981 - DNA, 3297 bp, Artificial Sequence; identical to SEQ ID NO: 5733
  Synthetic Polynucloetide

SEQ ID NO: 5982 - DNA, 3108 bp, Artificial Sequence; identical to SEQ ID NO: 5734
  Synthetic Polynucloetide

SEQ ID NO: 5983 - DNA, 2319 bp, Artificial Sequence; identical to SEQ ID NO: 5735
  Synthetic Polynucloetide

SEQ ID NO: 5984 - DNA, 3153 bp, Artificial Sequence; identical to SEQ ID NO: 5736
  Synthetic Polynucloetide

SEQ ID NO: 5985 - DNA, 3528 bp, Artificial Sequence; identical to SEQ ID NO: 5737
  Synthetic Polynucloetide

SEQ ID NO: 5986 - DNA, 2883 bp, Artificial Sequence; identical to SEQ ID NO: 5738
  Synthetic Polynucloetide

SEQ ID NO: 5987 - DNA, 2883 bp, Artificial Sequence; identical to SEQ ID NO: 5739
  Synthetic Polynucloetide

SEQ ID NO: 5988 - DNA, 3096 bp, Artificial Sequence; identical to SEQ ID NO: 5740
  Synthetic Polynucloetide

SEQ ID NO: 5989 - DNA, 3219 bp, Artificial Sequence; identical to SEQ ID NO: 5741
  Synthetic Polynucloetide

SEQ ID NO: 5990 - DNA, 3102 bp, Artificial Sequence; identical to SEQ ID NO: 5742
  Synthetic Polynucloetide

SEQ ID NO: 5991 - DNA, 3228 bp, Artificial Sequence; identical to SEQ ID NO: 5743
  Synthetic Polynucloetide

SEQ ID NO: 5992 - DNA, 2901 bp, Artificial Sequence; identical to SEQ ID NO: 5744
  Synthetic Polynucloetide

SEQ ID NO: 5993 - DNA, 2373 bp, Artificial Sequence; identical to SEQ ID NO: 5745
  Synthetic Polynucloetide

SEQ ID NO: 5994 - DNA, 2307 bp, Artificial Sequence; identical to SEQ ID NO: 5746
  Synthetic Polynucloetide

SEQ ID NO: 5995 - DNA, 2307 bp, Artificial Sequence; identical to SEQ ID NO: 5747
  Synthetic Polynucloetide

SEQ ID NO: 5996 - DNA, 1785 bp, Artificial Sequence; identical to SEQ ID NO: 5748
  Synthetic Polynucloetide

SEQ ID NO: 5997 - DNA, 1680 bp, Artificial Sequence; identical to SEQ ID NO: 5749
  Synthetic Polynucloetide

SEQ ID NO: 5998 - DNA, 1710 bp, Artificial Sequence; identical to SEQ ID NO: 5750
  Synthetic Polynucloetide

SEQ ID NO: 5999 - DNA, 1659 bp, Artificial Sequence; identical to SEQ ID NO: 5751
  Synthetic Polynucloetide

SEQ ID NO: 6000 - DNA, 2361 bp, Artificial Sequence; identical to SEQ ID NO: 5752
  Synthetic Polynucloetide

SEQ ID NO: 6001 - DNA, 2457 bp, Artificial Sequence; identical to SEQ ID NO: 5753
  Synthetic Polynucloetide

SEQ ID NO: 6002 - DNA, 2607 bp, Artificial Sequence; identical to SEQ ID NO: 5754
  Synthetic Polynucloetide

SEQ ID NO: 6003 - DNA, 2049 bp, Artificial Sequence; identical to SEQ ID NO: 5755
  Synthetic Polynucloetide

SEQ ID NO: 6004 - DNA, 1356 bp, Artificial Sequence; identical to SEQ ID NO: 5756
  Synthetic Polynucloetide

SEQ ID NO: 6005 - DNA, 2103 bp, Artificial Sequence; identical to SEQ ID NO: 5757
  Synthetic Polynucloetide

SEQ ID NO: 6006 - DNA, 1413 bp, Artificial Sequence; identical to SEQ ID NO: 5758
  Synthetic Polynucloetide

SEQ ID NO: 6007 - DNA, 2361 bp, Artificial Sequence; identical to SEQ ID NO: 5759
  Synthetic Polynucloetide

SEQ ID NO: 6008 - DNA, 2457 bp, Artificial Sequence; identical to SEQ ID NO: 5760
  Synthetic Polynucloetide

SEQ ID NO: 6009 - DNA, 1953 bp, Artificial Sequence
  Synthetic Polynucloetide
atggactggatttggcgcatccttttccttgtcggcgctgctaccggcgcccattccgggcccgaagtgcagctggttgaatctggcggaggactggttcagcctggcggatctctgagactgtcttgtgccgcctctggcttcgccagcgactactatatcatcggctggttcagacaggcccctggcaaagagagagagggcgtcagctgtatcagcagcagatacgccaacaccaactacgccgacagcgtgaagggcagattcaccatcagccgggacaacgccaagaacaccgtgtacctccagatgaacagcctgaagcctgaggacaccgccgtgtactactgtgccgccgacaccagaagatacacctgtcctgacattgccaccatgcaccggaacttcgattcttggggccagggcacactggtcaccgtttcttctggatccggcggcggaggatctggcggaggcggatctgggggcggaggctctttcgaacaagttcagcttcaacagcctggcgctgagctggtcaaacctggcgcttctgtgaagatgagctgcaaagccagcggctacgccttcagcagctactggatcaactggatgaagcagaaacccggccagggactcgaatggatcggccaaatctatcccggcgacggcgacaccaactacaacggcaagttcaagggcagagccacactgaccgccgatacctctagcagcacagcctacatgcagctgagcagcctgaccagcgaagatagcgccgtgtacttctgtgcccggtccatcacaacagtcgtgggctgcgctatggactattggggccagggaacaagcgtgaccgtgtctagtggcggaggcggaagtggaggcggaggatctggcggcggaggctctgacatccagatgacacagagccctagcagcctgtctgccagcgtgggagacagagtgaccatcacatgcaaggccagcgaccacatcaacaactggctggcctggtatcagcagaagcctggacaggcccctaagctgctgatctacggcgctaccacactggaaacaggcgtgcccagcagattttctggcagcggctctggcaccgactacaccctgacaatatccagcctccagcctgaggacttcgccacctactactgtcagcagagctggaacaccccttggacattcggccagggcaccaagctggaaatcaagagaacgcgtgagcagaaactgatctcggaagaggatctggcgaagcccaccacgacgccagcgccgcgaccaccaacaccggcgcccaccatcgcgtcgcagcccctgtccctgcgcccagaggcgtgccggccagcggcggggggcgcagtgcacacgagggggctggacttcgcctgtgacatctacatctgggcgcccttggccgggacttgtggggtccttctcctgtcactggttatcaccctttactgcaaacggggcagaaagaaactcctgtatatattcaaacaaccatttatgagaccagtacaaactactcaagaggaagatggctgtagctgccgatttccagaagaagaagaaggaggatgtgaactgagagtgaagttcagcaggagcgcagacgcccccgcgtaccagcagggccagaaccagctctataacgagctgaatctaggacgaagagaggagtacgatgttttggacaagagacgtggccgggaccctgagatggggggaaagccgagaaggaagaaccctcaggaaggcctgtacaatgaactgcagaaagataagatggcggaggcctacagtgagattgggatgaaaggcgagcgccggaggggcaaggggcacgatggcctttaccagggtctcagtacagccaccaaggacacctacgacgcccttcacatgcaggccctgccccctcgctga

SEQ ID NO: 6010 - DNA, 3012 bp, Artificial Sequence
  Synthetic Polynucloetide
atggccttaccagtgaccgccttgctcctgccgctggccttgctgctccacgccgccaggccggacatccagatgacacagagccctagcagcctgtctgccagcgtgggagacagagtgaccatcacatgcaaggccagcgaccacatcaacaactggctggcctggtatcagcagaagcctggacaggcccctaagctgctgatctacggcgctaccacactggaaacaggcgtgcccagcagattttctggcagcggctctggcaccgactacaccctgacaatatccagcctccagcctgaggacttcgccacctactactgtcagcagagctggaacaccccttggacattcggccagggcaccaagctggaaatcaagagactcgagatccagaaccctgatcctgccgtgtaccagctgcgggatagcaagagcagcgacaagagcgtgtgtctgttcaccgacttcgacagccagaccaacgtgtcccagagcaaggactccgacgtgtacatcaccgataagtgcgtgctggacatgcggagcatggacttcaagagcaactccgccgtggcctggtccaacaagtccgatttcgcctgcgccaacgccttcaacaacagcattatccccgaggacacattcttcccaagcagcgacgtgccctgcgacgtgaagctggtggaaaagagcttcgagacagacaccaacctgaacttccagaacctgagcgtgatcggcttcagaatcctgctgctgaaagtggccggctttaacctgctgatgaccctgcggctgtggtccagccgcgccaagagaagcggatctggcgtgaagcagaccctgaatttcgacctgctgaagctggctggcgacgtggaatccaacccaggccctactagtatggactggatttggcgcatccttttccttgtcggcgctgctaccggcgcccattccgggcccgaagtgcagctggttgaatctggcggaggactggttcagcctggcggatctctgagactgtcttgtgccgcctctggcttcgccagcgactactatatcatcggctggttcagacaggcccctggcaaagagagagagggcgtcagctgtatcagcagcagatacgccaacaccaactacgccgacagcgtgaagggcagattcaccatcagccgggacaacgccaagaacaccgtgtacctccagatgaacagcctgaagcctgaggacaccgccgtgtactactgtgccgccgacaccagaagatacacctgtcctgacattgccaccatgcaccggaacttcgattcttggggccagggcacactggtcaccgtttcttctggatccggcggcggaggatctggcggaggcggatctgggggcggaggctctttcgaacaagttcagcttcaacagcctggcgctgagctggtcaaacctggcgcttctgtgaagatgagctgcaaagccagcggctacgccttcagcagctactggatcaactggatgaagcagaaacccggccagggactcgaatggatcggccaaatctatcccggcgacggcgacaccaactacaacggcaagttcaagggcagagccacactgaccgccgatacctctagcagcacagcctacatgcagctgagcagcctgaccagcgaagatagcgccgtgtacttctgtgcccggtccatcacaacagtcgtgggctgcgctatggactattggggccagggaacaagcgtgaccgtgtctagtacgcgtgaggacctgaagaacgtgttcccacctgaggtggccgtgttcgagcctagcaaggccgagatcgcccacacccagaaagccaccctcgtgtgcctggctaccggcttctaccccgaccatgtggaactgtcttggtgggtcaacggcaaagaggtgcacagcggcgtgtgtaccgacccccagccactgaaagaacagcccgccctgaacgacagccggtactgcctgagcagcagactgagagtgtccgccaccttctggcagaacccccggaaccacttcagatgccaggtgcagttctacggcctgagcgagaacgacgagtggacccaggacagagccaagcccgtgacccagatcgtgtctgccgaagcctggggcagagccgattgcggcatcaccagcgccagctaccaccagggcgtgctgagcgccaccatcctgtacgagatcctgctgggcaaggccaccctgtacgccgtgctggtgtctgccctggtgctgatggctatggtcaagcggaaggacagccggggaagggccaagcgatctggatctggagcaacaaacttctcactactcaaacaagcaggtgacgtggaggagaatcccgggccttctagaggccatatgaccgagtacaagcccacggtgcgcctcgccacccgcgacgacgtccccagggccgtacgcaccctcgccgccgcgttcgccgactaccccgccacgcgccacaccgtcgatccggaccgccacatcgagcgggtcaccgagctgcaagaactcttcctcacgcgcgtcgggctcgacatcggcaaggtgtgggtcgcggacgacggcgccgcggtggcggtctggaccacgccggagagcgtcgaagcgggggcggtgttcgccgagatcggcccgcgcatggccgagttgagcggttcccggctggccgcgcagcaacagatggaaggcctcctggcgccgcaccggcccaaggagcccgcgtggttcctggccaccgtcggcgtctcgcccgaccaccagggcaagggtctgggcagcgccgtcgtgctccccggagtggaggcggccgagcgcgccggggtgcccgccttcctggagacctccgcgccccgcaacctccccttctacgagcggctcggcttcaccgtcaccgccgacgtcgaggtgcccgaaggaccgcgcacctggtgcatgacccgcaagcccggtgcctga

SEQ ID NO: 6011 - DNA, 3009 bp, Artificial Sequence
  Synthetic Polynucloetide
atggccttaccagtgaccgccttgctcctgccgctggccttgctgctccacgccgccaggccggacatccagatgacacagagccctagcagcctgtctgccagcgtgggagacagagtgaccatcacatgcaaggccagcgaccacatcaacaactggctggcctggtatcagcagaagcctggacaggcccctaagctgctgatctacggcgctaccacactggaaacaggcgtgcccagcagattttctggcagcggctctggcaccgactacaccctgacaatatccagcctccagcctgaggacttcgccacctactactgtcagcagagctggaacaccccttggacattcggccagggcaccaagctggaaatcaagagactcgaggacctgaagaacgtgttcccacctgaggtggccgtgttcgagcctagcaaggccgagatcgcccacacccagaaagccaccctcgtgtgcctggctaccggcttctaccccgaccatgtggaactgtcttggtgggtcaacggcaaagaggtgcacagcggcgtgtgtaccgacccccagccactgaaagaacagcccgccctgaacgacagccggtactgcctgagcagcagactgagagtgtccgccaccttctggcagaacccccggaaccacttcagatgccaggtgcagttctacggcctgagcgagaacgacgagtggacccaggacagagccaagcccgtgacccagatcgtgtctgccgaagcctggggcagagccgattgcggcatcaccagcgccagctaccaccagggcgtgctgagcgccaccatcctgtacgagatcctgctgggcaaggccaccctgtacgccgtgctggtgtctgccctggtgctgatggctatggtcaagcggaaggacagccggggaagggccaagcgatctggatctggagcaacaaacttctcactactcaaacaagcaggtgacgtggaggagaatcccgggcctactagtatggactggatttggcgcatccttttccttgtcggcgctgctaccggcgcccattccgggcccgaagtgcagctggttgaatctggcggaggactggttcagcctggcggatctctgagactgtcttgtgccgcctctggcttcgccagcgactactatatcatcggctggttcagacaggcccctggcaaagagagagagggcgtcagctgtatcagcagcagatacgccaacaccaactacgccgacagcgtgaagggcagattcaccatcagccgggacaacgccaagaacaccgtgtacctccagatgaacagcctgaagcctgaggacaccgccgtgtactactgtgccgccgacaccagaagatacacctgtcctgacattgccaccatgcaccggaacttcgattcttggggccagggcacactggtcaccgtttcttctggatccggcggcggaggatctggcggaggcggatctgggggcggaggctctttcgaacaagttcagcttcaacagcctggcgctgagctggtcaaacctggcgcttctgtgaagatgagctgcaaagccagcggctacgccttcagcagctactggatcaactggatgaagcagaaacccggccagggactcgaatggatcggccaaatctatcccggcgacggcgacaccaactacaacggcaagttcaagggcagagccacactgaccgccgatacctctagcagcacagcctacatgcagctgagcagcctgaccagcgaagatagcgccgtgtacttctgtgcccggtccatcacaacagtcgtgggctgcgctatggactattggggccagggaacaagcgtgaccgtgtctagtacgcgtatccagaaccctgatcctgccgtgtaccagctgcgggatagcaagagcagcgacaagagcgtgtgtctgttcaccgacttcgacagccagaccaacgtgtcccagagcaaggactccgacgtgtacatcaccgataagtgcgtgctggacatgcggagcatggacttcaagagcaactccgccgtggcctggtccaacaagtccgatttcgcctgcgccaacgccttcaacaacagcattatccccgaggacacattcttcccaagcagcgacgtgccctgcgacgtgaagctggtggaaaagagcttcgagacagacaccaacctgaacttccagaacctgagcgtgatcggcttcagaatcctgctgctgaaagtggccggctttaacctgctgatgaccctgcggctgtggtccagccgcgccaagagaagcggatctggcgtgaagcagaccctgaatttcgacctgctgaagctggctggcgacgtggaatccaacccaggcccttctagaggccatatgaccgagtacaagcccacggtgcgcctcgccacccgcgacgacgtccccagggccgtacgcaccctcgccgccgcgttcgccgactaccccgccacgcgccacaccgtcgatccggaccgccacatcgagcgggtcaccgagctgcaagaactcttcctcacgcgcgtcgggctcgacatcggcaaggtgtgggtcgcggacgacggcgccgcggtggcggtctggaccacgccggagagcgtcgaagcgggggcggtgttcgccgagatcggcccgcgcatggccgagttgagcggttcccggctggccgcgcagcaacagatggaaggcctcctggcgccgcaccggcccaaggagcccgcgtggttcctggccaccgtcggcgtctcgcccgaccaccagggcaagggtctgggcagcgccgtcgtgctccccggagtggaggcggccgagcgcgccggggtgcccgccttcctggagacctccgcgccccgcaacctccccttctacgagcggctcggcttcaccgtcaccgccgacgtcgaggtgcccgaaggaccgcgcacctggtgcatgacccgcaagcccggtgcctga

SEQ ID NO: 6012 - DNA, 3009 bp, Artificial Sequence
  Synthetic Polynucloetide
atggccttaccagtgaccgccttgctcctgccgctggccttgctgctccacgccgccaggccggacatccagatgacacagagccctagcagcctgtctgccagcgtgggagacagagtgaccatcacatgcaaggccagcgaccacatcaacaactggctggcctggtatcagcagaagcctggacaggcccctaagctgctgatctacggcgctaccacactggaaacaggcgtgcccagcagattttctggcagcggctctggcaccgactacaccctgacaatatccagcctccagcctgaggacttcgccacctactactgtcagcagagctggaacaccccttggacattcggccagggcaccaagctggaaatcaagagactcgaggacctgaagaacgtgttcccacctgaggtggccgtgttcgagcctagcgaggccgagatcagccacacccagaaagccaccctcgtgtgcctggctaccggcttctaccccgaccatgtggaactgtcttggtgggtcaacggcaaagaggtgcacagcggcgtgtgtaccgacccccagccactgaaagaacagcccgccctgaacgacagccggtactgcctgagcagcagactgagagtgtccgccaccttctggcagaacccccggaaccacttcagatgccaggtgcagttctacggcctgagcgagaacgacgagtggacccaggacagagccaagcccgtgacccagatcgtgtctgccgaagcctggggcagagccgattgcggctttaccagcgagagctaccagcagggcgtgctgagcgccaccatcctgtacgagatcctgctgggcaaggccaccctgtacgccgtgctggtgtctgccctggtgctgatggctatggtcaagcggaaggacagccggggaagggccaagcgatctggatctggagcaacaaacttctcactactcaaacaagcaggtgacgtggaggagaatcccgggcctactagtatggactggatttggcgcatccttttccttgtcggcgctgctaccggcgcccattccgggcccgaagtgcagctggttgaatctggcggaggactggttcagcctggcggatctctgagactgtcttgtgccgcctctggcttcgccagcgactactatatcatcggctggttcagacaggcccctggcaaagagagagagggcgtcagctgtatcagcagcagatacgccaacaccaactacgccgacagcgtgaagggcagattcaccatcagccgggacaacgccaagaacaccgtgtacctccagatgaacagcctgaagcctgaggacaccgccgtgtactactgtgccgccgacaccagaagatacacctgtcctgacattgccaccatgcaccggaacttcgattcttggggccagggcacactggtcaccgtttcttctggatccggcggcggaggatctggcggaggcggatctgggggcggaggctctttcgaacaagttcagcttcaacagcctggcgctgagctggtcaaacctggcgcttctgtgaagatgagctgcaaagccagcggctacgccttcagcagctactggatcaactggatgaagcagaaacccggccagggactcgaatggatcggccaaatctatcccggcgacggcgacaccaactacaacggcaagttcaagggcagagccacactgaccgccgatacctctagcagcacagcctacatgcagctgagcagcctgaccagcgaagatagcgccgtgtacttctgtgcccggtccatcacaacagtcgtgggctgcgctatggactattggggccagggaacaagcgtgaccgtgtctagtacgcgtatccagaaccctgatcctgccgtgtaccagctgcgggatagcaagagcagcgacaagagcgtgtgtctgttcaccgacttcgacagccagaccaacgtgtcccagagcaaggactccgacgtgtacatcaccgataagtgcgtgctggacatgcggagcatggacttcaagagcaactccgccgtggcctggtccaacaagtccgatttcgcctgcgccaacgccttcaacaacagcattatccccgaggacacattcttcccaagccccgagagcagctgcgacgtgaagctggtggaaaagagcttcgagacagacaccaacctgaacttccagaacctgagcgtgatcggcttcagaatcctgctgctgaaagtggccggctttaacctgctgatgaccctgcggctgtggtccagccgcgccaagagaagcggatctggcgtgaagcagaccctgaatttcgacctgctgaagctggctggcgacgtggaatccaacccaggcccttctagaggccatatgaccgagtacaagcccacggtgcgcctcgccacccgcgacgacgtccccagggccgtacgcaccctcgccgccgcgttcgccgactaccccgccacgcgccacaccgtcgatccggaccgccacatcgagcgggtcaccgagctgcaagaactcttcctcacgcgcgtcgggctcgacatcggcaaggtgtgggtcgcggacgacggcgccgcggtggcggtctggaccacgccggagagcgtcgaagcgggggcggtgttcgccgagatcggcccgcgcatggccgagttgagcggttcccggctggccgcgcagcaacagatggaaggcctcctggcgccgcaccggcccaaggagcccgcgtggttcctggccaccgtcggcgtctcgcccgaccaccagggcaagggtctgggcagcgccgtcgtgctccccggagtggaggcggccgagcgcgccggggtgcccgccttcctggagacctccgcgccccgcaacctccccttctacgagcggctcggcttcaccgtcaccgccgacgtcgaggtgcccgaaggaccgcgcacctggtgcatgacccgcaagcccggtgcctga

SEQ ID NO: 6013 - DNA, 2307 bp, Artificial Sequence
  Synthetic Polynucloetide
atggccttaccagtgaccgccttgctcctgccgctggccttgctgctccacgccgccaggccggacatccagatgacacagagccctagcagcctgtctgccagcgtgggagacagagtgaccatcacatgcaaggccagcgaccacatcaacaactggctggcctggtatcagcagaagcctggacaggcccctaagctgctgatctacggcgctaccacactggaaacaggcgtgcccagcagattttctggcagcggctctggcaccgactacaccctgacaatatccagcctccagcctgaggacttcgccacctactactgtcagcagagctggaacaccccttggacattcggccagggcaccaagctggaaatcaagagactcgaggacctgaagaacgtgttcccacctgaggtggccgtgttcgagcctagcgaggccgagatcagccacacccagaaagccaccctcgtgtgcctggctaccggcttctaccccgaccatgtggaactgtcttggtgggtcaacggcaaagaggtgcacagcggcgtgtgtaccgacccccagccactgaaagaacagcccgccctgaacgacagccggtactgcctgagcagcagactgagagtgtccgccaccttctggcagaacccccggaaccacttcagatgccaggtgcagttctacggcctgagcgagaacgacgagtggacccaggacagagccaagcccgtgacccagatcgtgtctgccgaagcctggggcagagccgattgcggctttaccagcgagagctaccagcagggcgtgctgagcgccaccatcctgtacgagatcctgctgggcaaggccaccctgtacgccgtgctggtgtctgccctggtgctgatggctatggtcaagcggaaggacagccggggaagggccaagcgatctggatctggagcaacaaacttctcactactcaaacaagcaggtgacgtggaggagaatcccgggcctactagtatggactggatttggcgcatccttttccttgtcggcgctgctaccggcgcccattccgggcccgaagtgcagctggttgaatctggcggaggactggttcagcctggcggatctctgagactgtcttgtgccgcctctggcttcgccagcgactactatatcatcggctggttcagacaggcccctggcaaagagagagagggcgtcagctgtatcagcagcagatacgccaacaccaactacgccgacagcgtgaagggcagattcaccatcagccgggacaacgccaagaacaccgtgtacctccagatgaacagcctgaagcctgaggacaccgccgtgtactactgtgccgccgacaccagaagatacacctgtcctgacattgccaccatgcaccggaacttcgattcttggggccagggcacactggtcaccgtttcttctggatccggcggcggaggatctggcggaggcggatctgggggcggaggctctttcgaacaagttcagcttcaacagcctggcgctgagctggtcaaacctggcgcttctgtgaagatgagctgcaaagccagcggctacgccttcagcagctactggatcaactggatgaagcagaaacccggccagggactcgaatggatcggccaaatctatcccggcgacggcgacaccaactacaacggcaagttcaagggcagagccacactgaccgccgatacctctagcagcacagcctacatgcagctgagcagcctgaccagcgaagatagcgccgtgtacttctgtgcccggtccatcacaacagtcgtgggctgcgctatggactattggggccagggaacaagcgtgaccgtgtctagtacgcgtatccagaaccctgatcctgccgtgtaccagctgcgggatagcaagagcagcgacaagagcgtgtgtctgttcaccgacttcgacagccagaccaacgtgtcccagagcaaggactccgacgtgtacatcaccgataagtgcgtgctggacatgcggagcatggacttcaagagcaactccgccgtggcctggtccaacaagtccgatttcgcctgcgccaacgccttcaacaacagcattatccccgaggacacattcttcccaagccccgagagcagctgcgacgtgaagctggtggaaaagagcttcgagacagacaccaacctgaacttccagaacctgagcgtgatcggcttcagaatcctgctgctgaaagtggccggctttaacctgctgatgaccctgcggctgtggtccagc

SEQ ID NO: 6014 - DNA, 2982 bp, Artificial Sequence
  Synthetic Polynucloetide
atggccttaccagtgaccgccttgctcctgccgctggccttgctgctccacgccgccaggccggacatccagatgacacagagccctagcagcctgtctgccagcgtgggagacagagtgaccatcacatgcaaggccagcgaccacatcaacaactggctggcctggtatcagcagaagcctggacaggcccctaagctgctgatctacggcgctaccacactggaaacaggcgtgcccagcagattttctggcagcggctctggcaccgactacaccctgacaatatccagcctccagcctgaggacttcgccacctactactgtcagcagagctggaacaccccttggacattcggccagggcaccaagctggaaatcaagagactcgaggacctgaagaacgtgttcccacctgaggtggccgtgttcgagcctagcgaggccgagatcagccacacccagaaagccaccctcgtgtgcctggctaccggcttctaccccgaccatgtggaactgtcttggtgggtcaacggcaaagaggtgcacagcggcgtgtgtaccgacccccagccactgaaagaacagcccgccctgaacgacagccggtactgcctgagcagcagactgagagtgtccgccaccttctggcagaacccccggaaccacttcagatgccaggtgcagttctacggcctgagcgagaacgacgagtggacccaggacagagccaagcccgtgacccagatcgtgtctgccgaagcctggggcagagccgattgcggctttaccagcgagagctaccagcagggcgtgctgagcgccaccatcctgtacgagatcctgctgggcaaggccaccctgtacgccgtgctggtgtctgccctggtgctgatggctatggtcaagcggaaggacagccggggaagggccaagcgatctggatctggagcaacaaacttctcactactcaaacaagcaggtgacgtggaggagaatcccgggcctactagtatggactggatttggcgcatccttttccttgtcggcgctgctaccggcgcccattccgggcccgaagtgcagctggttgaatctggcggaggactggttcagcctggcggatctctgagactgtcttgtgccgcctctggcttcgccagcgactactatatcatcggctggttcagacaggcccctggcaaagagagagagggcgtcagctgtatcagcagcagatacgccaacaccaactacgccgacagcgtgaagggcagattcaccatcagccgggacaacgccaagaacaccgtgtacctccagatgaacagcctgaagcctgaggacaccgccgtgtactactgtgccgccgacaccagaagatacacctgtcctgacattgccaccatgcaccggaacttcgattcttggggccagggcacactggtcaccgtttcttctggatccggcggcggaggatctggcggaggcggatctgggggcggaggctctttcgaacaagttcagcttcaacagcctggcgctgagctggtcaaacctggcgcttctgtgaagatgagctgcaaagccagcggctacgccttcagcagctactggatcaactggatgaagcagaaacccggccagggactcgaatggatcggccaaatctatcccggcgacggcgacaccaactacaacggcaagttcaagggcagagccacactgaccgccgatacctctagcagcacagcctacatgcagctgagcagcctgaccagcgaagatagcgccgtgtacttctgtgcccggtccatcacaacagtcgtgggctgcgctatggactattggggccagggaacaagcgtgaccgtgtctagtacgcgtatccagaaccctgatcctgccgtgtaccagctgcgggatagcaagagcagcgacaagagcgtgtgtctgttcaccgacttcgacagccagaccaacgtgtcccagagcaaggactccgacgtgtacatcaccgataagtgcgtgctggacatgcggagcatggacttcaagagcaactccgccgtggcctggtccaacaagtccgatttcgcctgcgccaacgccttcaacaacagcattatccccgaggacacattcttcccaagccccgagagcagctgcgacgtgaagctggtggaaaagagcttcgagacagacaccaacctgaacttccagaacctgagcgtgatcggcttcagaatcctgctgctgaaagtggccggctttaacctgctgatgaccctgcggctgtggtccagccgcgccaagagaagcggatctggcgtgaagcagaccctgaatttcgacctgctgaagctggctggcgacgtggaatccaacccaggcccttctagaggcgggatccacaccatggctacctacgaggtgctgtgcgaggtggcaagaaagctgggcaccgacgacagagaagtggtgctgttcctgctgaacgtgttcatccctcagcctacactggcccagctgatcggtgcactgagagccctgaaagaggaaggccggctgacctttcctctgctggccgaatgcctgttcagagccggaagaagggatctgctgcgggacctgctgcatctggaccccagatttctggaaagacacctggccggcaccatgagctacttcagcccttaccagctgaccgtgctgcacgttgacggcgaactgtgcgccagagatattcggagcctgatcttcctgagcaaggacaccatcggcagccggtctacccctcagacatttctgcactgggtgtactgcatggaaaacctggacctgctcggccccacagatgtggatgccctgatgtccatgctgagaagcctgagcagagtggacctccagagacaggtgcagacactgatgggactgcacctgagcggacctagccacagccagcactacagacacacccct

SEQ ID NO: 6015 - DNA, 2319 bp, Artificial Sequence
  Synthetic Polynucloetide
atggccttaccagtgaccgccttgctcctgccgctggccttgctgctccacgccgccaggccggacatccagatgacacagagccctagcagcctgtctgccagcgtgggagacagagtgaccatcacatgcaaggccagcgaccacatcaacaactggctggcctggtatcagcagaagcctggacaggcccctaagctgctgatctacggcgctaccacactggaaacaggcgtgcccagcagattttctggcagcggctctggcaccgactacaccctgacaatatccagcctccagcctgaggacttcgccacctactactgtcagcagagctggaacaccccttggacattcggccagggcaccaagctggaaatcaagagactcgagatccagaaccctgatcctgccgtgtaccagctgcgggatagcaagagcagcgacaagagcgtgtgtctgttcaccgacttcgacagccagaccaacgtgtcccagagcaaggactccgacgtgtacatcaccgataagtgcgtgctggacatgcggagcatggacttcaagagcaactccgccgtggcctggtccaacaagtccgatttcgcctgcgccaacgccttcaacaacagcattatccccgaggacacattcttcccaagccccgagagcagctgcgacgtgaagctggtggaaaagagcttcgagacagacaccaacctgaacttccagaacctgagcgtgatcggcttcagaatcctgctgctgaaagtggccggctttaacctgctgatgaccctgcggctgtggtccagccgcgccaagagaagcggatctggcgtgaagcagaccctgaatttcgacctgctgaagctggctggcgacgtggaatccaacccaggccctactagtatggactggatttggcgcatccttttccttgtcggcgctgctaccggcgcccattccgggcccgaagtgcagctggttgaatctggcggaggactggttcagcctggcggatctctgagactgtcttgtgccgcctctggcttcgccagcgactactatatcatcggctggttcagacaggcccctggcaaagagagagagggcgtcagctgtatcagcagcagatacgccaacaccaactacgccgacagcgtgaagggcagattcaccatcagccgggacaacgccaagaacaccgtgtacctccagatgaacagcctgaagcctgaggacaccgccgtgtactactgtgccgccgacaccagaagatacacctgtcctgacattgccaccatgcaccggaacttcgattcttggggccagggcacactggtcaccgtttcttctggatccggcggcggaggatctggcggaggcggatctgggggcggaggctctttcgaacaagttcagcttcaacagcctggcgctgagctggtcaaacctggcgcttctgtgaagatgagctgcaaagccagcggctacgccttcagcagctactggatcaactggatgaagcagaaacccggccagggactcgaatggatcggccaaatctatcccggcgacggcgacaccaactacaacggcaagttcaagggcagagccacactgaccgccgatacctctagcagcacagcctacatgcagctgagcagcctgaccagcgaagatagcgccgtgtacttctgtgcccggtccatcacaacagtcgtgggctgcgctatggactattggggccagggaacaagcgtgaccgtgtctagtacgcgtgaggacctgaagaacgtgttcccacctgaggtggccgtgttcgagcctagcgaggccgagatcagccacacccagaaagccaccctcgtgtgcctggctaccggcttctaccccgaccatgtggaactgtcttggtgggtcaacggcaaagaggtgcacagcggcgtgtgtaccgacccccagccactgaaagaacagcccgccctgaacgacagccggtactgcctgagcagcagactgagagtgtccgccaccttctggcagaacccccggaaccacttcagatgccaggtgcagttctacggcctgagcgagaacgacgagtggacccaggacagagccaagcccgtgacccagatcgtgtctgccgaagcctggggcagagccgattgcggctttaccagcgagagctaccagcagggcgtgctgagcgccaccatcctgtacgagatcctgctgggcaaggccaccctgtacgccgtgctggtgtctgccctggtgctgatggctatggtcaagcggaaggacagccgggga

SEQ ID NO: 6016 - DNA, 2985 bp, Artificial Sequence
  Synthetic Polynucloetide
atggccttaccagtgaccgccttgctcctgccgctggccttgctgctccacgccgccaggccggacatccagatgacacagagccctagcagcctgtctgccagcgtgggagacagagtgaccatcacatgcaaggccagcgaccacatcaacaactggctggcctggtatcagcagaagcctggacaggcccctaagctgctgatctacggcgctaccacactggaaacaggcgtgcccagcagattttctggcagcggctctggcaccgactacaccctgacaatatccagcctccagcctgaggacttcgccacctactactgtcagcagagctggaacaccccttggacattcggccagggcaccaagctggaaatcaagagactcgagatccagaaccctgatcctgccgtgtaccagctgcgggatagcaagagcagcgacaagagcgtgtgtctgttcaccgacttcgacagccagaccaacgtgtcccagagcaaggactccgacgtgtacatcaccgataagtgcgtgctggacatgcggagcatggacttcaagagcaactccgccgtggcctggtccaacaagtccgatttcgcctgcgccaacgccttcaacaacagcattatccccgaggacacattcttcccaagccccgagagcagctgcgacgtgaagctggtggaaaagagcttcgagacagacaccaacctgaacttccagaacctgagcgtgatcggcttcagaatcctgctgctgaaagtggccggctttaacctgctgatgaccctgcggctgtggtccagccgcgccaagagaagcggatctggcgtgaagcagaccctgaatttcgacctgctgaagctggctggcgacgtggaatccaacccaggccctactagtatggactggatttggcgcatccttttccttgtcggcgctgctaccggcgcccattccgggcccgaagtgcagctggttgaatctggcggaggactggttcagcctggcggatctctgagactgtcttgtgccgcctctggcttcgccagcgactactatatcatcggctggttcagacaggcccctggcaaagagagagagggcgtcagctgtatcagcagcagatacgccaacaccaactacgccgacagcgtgaagggcagattcaccatcagccgggacaacgccaagaacaccgtgtacctccagatgaacagcctgaagcctgaggacaccgccgtgtactactgtgccgccgacaccagaagatacacctgtcctgacattgccaccatgcaccggaacttcgattcttggggccagggcacactggtcaccgtttcttctggatccggcggcggaggatctggcggaggcggatctgggggcggaggctctttcgaacaagttcagcttcaacagcctggcgctgagctggtcaaacctggcgcttctgtgaagatgagctgcaaagccagcggctacgccttcagcagctactggatcaactggatgaagcagaaacccggccagggactcgaatggatcggccaaatctatcccggcgacggcgacaccaactacaacggcaagttcaagggcagagccacactgaccgccgatacctctagcagcacagcctacatgcagctgagcagcctgaccagcgaagatagcgccgtgtacttctgtgcccggtccatcacaacagtcgtgggctgcgctatggactattggggccagggaacaagcgtgaccgtgtctagtacgcgtgaggacctgaagaacgtgttcccacctgaggtggccgtgttcgagcctagcgaggccgagatcagccacacccagaaagccaccctcgtgtgcctggctaccggcttctaccccgaccatgtggaactgtcttggtgggtcaacggcaaagaggtgcacagcggcgtgtgtaccgacccccagccactgaaagaacagcccgccctgaacgacagccggtactgcctgagcagcagactgagagtgtccgccaccttctggcagaacccccggaaccacttcagatgccaggtgcagttctacggcctgagcgagaacgacgagtggacccaggacagagccaagcccgtgacccagatcgtgtctgccgaagcctggggcagagccgattgcggctttaccagcgagagctaccagcagggcgtgctgagcgccaccatcctgtacgagatcctgctgggcaaggccaccctgtacgccgtgctggtgtctgccctggtgctgatggctatggtcaagcggaaggacagccggggaagggccaagcgatctggatctggagcaacaaacttctcactactcaaacaagcaggtgacgtggaggagaatcccgggccttctagaggcgggatccacaccatggctacctacgaggtgctgtgcgaggtggcaagaaagctgggcaccgacgacagagaagtggtgctgttcctgctgaacgtgttcatccctcagcctacactggcccagctgatcggtgcactgagagccctgaaagaggaaggccggctgacctttcctctgctggccgaatgcctgttcagagccggaagaagggatctgctgcgggacctgctgcatctggaccccagatttctggaaagacacctggccggcaccatgagctacttcagcccttaccagctgaccgtgctgcacgttgacggcgaactgtgcgccagagatattcggagcctgatcttcctgagcaaggacaccatcggcagccggtctacccctcagacatttctgcactgggtgtactgcatggaaaacctggacctgctcggccccacagatgtggatgccctgatgtccatgctgagaagcctgagcagagtggacctccagagacaggtgcagacactgatgggactgcacctgagcggacctagccacagccagcactacagacacacccct

SEQ ID NO: 6017 - DNA, 3009 bp, Artificial Sequence
  Synthetic Polynucloetide
atggccttaccagtgaccgccttgctcctgccgctggccttgctgctccacgccgccaggccggacatccagatgacacagagccctagcagcctgtctgccagcgtgggagacagagtgaccatcacatgcaaggccagcgaccacatcaacaactggctggcctggtatcagcagaagcctggacaggcccctaagctgctgatctacggcgctaccacactggaaacaggcgtgcccagcagattttctggcagcggctctggcaccgactacaccctgacaatatccagcctccagcctgaggacttcgccacctactactgtcagcagagctggaacaccccttggacattcggccagggcaccaagctggaaatcaagagactcgaggacctgaagaacgtgttcccacctgaggtggccgtgttcgagcctagcgaggccgagatcagccacacccagaaagccaccctcgtgtgcctggctaccggcttctaccccgaccatgtggaactgtcttggtgggtcaacggcaaagaggtgcacagcggcgtgtctaccgacccccagccactgaaagaacagcccgccctgaacgacagccggtactgcctgagcagcagactgagagtgtccgccaccttctggcagaacccccggaaccacttcagatgccaggtgcagttctacggcctgagcgagaacgacgagtggacccaggacagagccaagcccgtgacccagatcgtgtctgccgaagcctggggcagagccgattgcggctttaccagcgagagctaccagcagggcgtgctgagcgccaccatcctgtacgagatcctgctgggcaaggccaccctgtacgccgtgctggtgtctgccctggtgctgatggctatggtcaagcggaaggacagccggggaagggccaagcgatctggatctggagcaacaaacttctcactactcaaacaagcaggtgacgtggaggagaatcccgggcctactagtatggactggatttggcgcatccttttccttgtcggcgctgctaccggcgcccattccgggcccgaagtgcagctggttgaatctggcggaggactggttcagcctggcggatctctgagactgtcttgtgccgcctctggcttcgccagcgactactatatcatcggctggttcagacaggcccctggcaaagagagagagggcgtcagctgtatcagcagcagatacgccaacaccaactacgccgacagcgtgaagggcagattcaccatcagccgggacaacgccaagaacaccgtgtacctccagatgaacagcctgaagcctgaggacaccgccgtgtactactgtgccgccgacaccagaagatacacctgtcctgacattgccaccatgcaccggaacttcgattcttggggccagggcacactggtcaccgtttcttctggatccggcggcggaggatctggcggaggcggatctgggggcggaggctctttcgaacaagttcagcttcaacagcctggcgctgagctggtcaaacctggcgcttctgtgaagatgagctgcaaagccagcggctacgccttcagcagctactggatcaactggatgaagcagaaacccggccagggactcgaatggatcggccaaatctatcccggcgacggcgacaccaactacaacggcaagttcaagggcagagccacactgaccgccgatacctctagcagcacagcctacatgcagctgagcagcctgaccagcgaagatagcgccgtgtacttctgtgcccggtccatcacaacagtcgtgggctgcgctatggactattggggccagggaacaagcgtgaccgtgtctagtacgcgtatccagaaccctgatcctgccgtgtaccagctgcgggatagcaagagcagcgacaagagcgtgtgtctgttcaccgacttcgacagccagaccaacgtgtcccagagcaaggactccgacgtgtacatcaccgataagaccgtgctggacatgcggagcatggacttcaagagcaactccgccgtggcctggtccaacaagtccgatttcgcctgcgccaacgccttcaacaacagcattatccccgaggacacattcttcccaagccccgagagcagctgcgacgtgaagctggtggaaaagagcttcgagacagacaccaacctgaacttccagaacctgagcgtgatcggcttcagaatcctgctgctgaaagtggccggctttaacctgctgatgaccctgcggctgtggtccagccgcgccaagagaagcggatctggcgtgaagcagaccctgaatttcgacctgctgaagctggctggcgacgtggaatccaacccaggcccttctagaggccatatgaccgagtacaagcccacggtgcgcctcgccacccgcgacgacgtccccagggccgtacgcaccctcgccgccgcgttcgccgactaccccgccacgcgccacaccgtcgatccggaccgccacatcgagcgggtcaccgagctgcaagaactcttcctcacgcgcgtcgggctcgacatcggcaaggtgtgggtcgcggacgacggcgccgcggtggcggtctggaccacgccggagagcgtcgaagcgggggcggtgttcgccgagatcggcccgcgcatggccgagttgagcggttcccggctggccgcgcagcaacagatggaaggcctcctggcgccgcaccggcccaaggagcccgcgtggttcctggccaccgtcggcgtctcgcccgaccaccagggcaagggtctgggcagcgccgtcgtgctccccggagtggaggcggccgagcgcgccggggtgcccgccttcctggagacctccgcgccccgcaacctccccttctacgagcggctcggcttcaccgtcaccgccgacgtcgaggtgcccgaaggaccgcgcacctggtgcatgacccgcaagcccggtgcctga

SEQ ID NO: 6018 - DNA, 3255 bp, Artificial Sequence
  Synthetic Polynucloetide
atggccttaccagtgaccgccttgctcctgccgctggccttgctgctccacgccgccaggccggacatccagatgacacagagccctagcagcctgtctgccagcgtgggagacagagtgaccatcacatgcaaggccagcgaccacatcaacaactggctggcctggtatcagcagaagcctggacaggcccctaagctgctgatctacggcgctaccacactggaaacaggcgtgcccagcagattttctggcagcggctctggcaccgactacaccctgacaatatccagcctccagcctgaggacttcgccacctactactgtcagcagagctggaacaccccttggacattcggccagggcaccaagctggaaatcaagagactcgaggacctgaagaacgtgttcccacctgaggtggccgtgttcgagcctagcgaggccgagatcagccacacccagaaagccaccctcgtgtgcctggctaccggcttctaccccgaccatgtggaactgtcttggtgggtcaacggcaaagaggtgcacagcggcgtgtctaccgacccccagccactgaaagaacagcccgccctgaacgacagccggtactgcctgagcagcagactgagagtgtccgccaccttctggcagaacccccggaaccacttcagatgccaggtgcagttctacggcctgagcgagaacgacgagtggacccaggacagagccaagcccgtgacccagatcgtgtctgccgaagcctggggcagagccgattgcggctttaccagcgagagctaccagcagggcgtgctgagcgccaccatcctgtacgagatcctgctgggcaaggccaccctgtacgccgtgctggtgtctgccctggtgctgatggctatggtcaagcggaaggacagccggggaagggccaagcgatctggatctggagcaacaaacttctcactactcaaacaagcaggtgacgtggaggagaatcccgggcctactagtatggactggatttggcgcatccttttccttgtcggcgctgctaccggcgcccattccgggcccgaagtgcagctggttgaatctggcggaggactggttcagcctggcggatctctgagactgtcttgtgccgcctctggcttcgccagcgactactatatcatcggctggttcagacaggcccctggcaaagagagagagggcgtcagctgtatcagcagcagatacgccaacaccaactacgccgacagcgtgaagggcagattcaccatcagccgggacaacgccaagaacaccgtgtacctccagatgaacagcctgaagcctgaggacaccgccgtgtactactgtgccgccgacaccagaagatacacctgtcctgacattgccaccatgcaccggaacttcgattcttggggccagggcacactggtcaccgtttcttctggatccggcggcggaggatctggcggaggcggatctgggggcggaggctctttcgaacaagttcagcttcaacagcctggcgctgagctggtcaaacctggcgcttctgtgaagatgagctgcaaagccagcggctacgccttcagcagctactggatcaactggatgaagcagaaacccggccagggactcgaatggatcggccaaatctatcccggcgacggcgacaccaactacaacggcaagttcaagggcagagccacactgaccgccgatacctctagcagcacagcctacatgcagctgagcagcctgaccagcgaagatagcgccgtgtacttctgtgcccggtccatcacaacagtcgtgggctgcgctatggactattggggccagggaacaagcgtgaccgtgtctagtacgcgtgagcagaaactgatctcggaagaggatgggagcggcaccccattcccttctctggcccctcccatcatgctgctggtggacggcaagcagcagatggtggtcgtgtgcctggtgctggatgtggccccacctggactggacagccccatctggtttagcgccggcaatggctctgccctggacgcctttacctacggcccaagccctgccaccgatggcacctggacaaatctggcccacctgagcctgcccagcgaggaactggcttcttgggagcctctcgtgtgccacacaggacctggcgctgagggacacagcagatccacccagcctatgcacctgtctggcgaggccagcaccgccagaacctgtcctcaggaacctctgagaggcacccctggcggagcactgtggctgggagtgctgagactgctgctgttcaagctgctgctgtttgacctgctgctgacctgctcctgtctgtgcgatcctgccggccctctgccttctcctgccaccaccacaagactgagagccctgggcagccacagactgcaccctgccacagagacaggcggcagagaggccacaagcagccctagaccccagcccagagacagaagatggggcgataccccccctggcagaaagcctggatctccagtccgcgccaagagaagcggatctggcgtgaagcagaccctgaatttcgacctgctgaagctggctggcgacgtggaatccaacccaggcccttctagaggccatatgaccgagtacaagcccacggtgcgcctcgccacccgcgacgacgtccccagggccgtacgcaccctcgccgccgcgttcgccgactaccccgccacgcgccacaccgtcgatccggaccgccacatcgagcgggtcaccgagctgcaagaactcttcctcacgcgcgtcgggctcgacatcggcaaggtgtgggtcgcggacgacggcgccgcggtggcggtctggaccacgccggagagcgtcgaagcgggggcggtgttcgccgagatcggcccgcgcatggccgagttgagcggttcccggctggccgcgcagcaacagatggaaggcctcctggcgccgcaccggcccaaggagcccgcgtggttcctggccaccgtcggcgtctcgcccgaccaccagggcaagggtctgggcagcgccgtcgtgctccccggagtggaggcggccgagcgcgccggggtgcccgccttcctggagacctccgcgccccgcaacctccccttctacgagcggctcggcttcaccgtcaccgccgacgtcgaggtgcccgaaggaccgcgcacctggtgcatgacccgcaagcccggtgcctga

SEQ ID NO: 6019 - DNA, 3120 bp, Artificial Sequence
  Synthetic Polynucloetide
atggccttaccagtgaccgccttgctcctgccgctggccttgctgctccacgccgccaggccggacatccagatgacacagagccctagcagcctgtctgccagcgtgggagacagagtgaccatcacatgcaaggccagcgaccacatcaacaactggctggcctggtatcagcagaagcctggacaggcccctaagctgctgatctacggcgctaccacactggaaacaggcgtgcccagcagattttctggcagcggctctggcaccgactacaccctgacaatatccagcctccagcctgaggacttcgccacctactactgtcagcagagctggaacaccccttggacattcggccagggcaccaagctggaaatcaagagactcgaggggaaaccaattcccaaccctcttctgggactggattcaaccggcagcggcgacaagcagctggacgccgacgtgtcccccaagcctaccatcttcctgccctctatcgccgagacaaagctccagaaggccggcacctacctgtgcctgctggaaaagttcttcccagatgtgattaagatccactggcaggaaaagaagtccaacaccatcctgggcagccaggaaggcaacaccatgaagaccaacgacacctacatgaagttcagctggctgaccgtgcccgagaagtccctggacaaagaacacagatgcatcgtgcggcacgaaaacaacaagaacggcgtggaccaggaaatcatcttcccacccatcaagaccgatgtgattacaatggaccccaaggacaactgctccaaggacgccaacgataccctgctgctccagctgaccaacaccagcgcctactacatgtacttgttgctgctgctgaagtccgtggtgtacttcgccatcatcacatgctgcctgctgcggagaaccgccttctgctgcaacggcgagaagtctagggccaagcgatctggatctggagcaacaaacttctcactactcaaacaagcaggtgacgtggaggagaatcccgggcctactagtatggactggatttggcgcatccttttccttgtcggcgctgctaccggcgcccattccgggcccgaagtgcagctggttgaatctggcggaggactggttcagcctggcggatctctgagactgtcttgtgccgcctctggcttcgccagcgactactatatcatcggctggttcagacaggcccctggcaaagagagagagggcgtcagctgtatcagcagcagatacgccaacaccaactacgccgacagcgtgaagggcagattcaccatcagccgggacaacgccaagaacaccgtgtacctccagatgaacagcctgaagcctgaggacaccgccgtgtactactgtgccgccgacaccagaagatacacctgtcctgacattgccaccatgcaccggaacttcgattcttggggccagggcacactggtcaccgtttcttctggatccggcggcggaggatctggcggaggcggatctgggggcggaggctctttcgaacaagttcagcttcaacagcctggcgctgagctggtcaaacctggcgcttctgtgaagatgagctgcaaagccagcggctacgccttcagcagctactggatcaactggatgaagcagaaacccggccagggactcgaatggatcggccaaatctatcccggcgacggcgacaccaactacaacggcaagttcaagggcagagccacactgaccgccgatacctctagcagcacagcctacatgcagctgagcagcctgaccagcgaagatagcgccgtgtacttctgtgcccggtccatcacaacagtcgtgggctgcgctatggactattggggccagggaacaagcgtgaccgtgtctagtacgcgtgagcagaaactgatctcggaagaggatgggagcggcagccagcctcacaccaagcccagcgtgttcgtgatgaagaacggcaccaacgtggcctgcctcgtgaaagagttctaccccaaggacatcaggatcaacctggtgtccagcaagaagatcaccgagttcgaccccgccatcgtgatctcccccagcggcaagtacaacgccgtgaagctggggaagtacgaggacagcaacagcgtgacctgctccgtgcagcacgacaacaagaccgtgcacagcaccgactttgaagtgaaaaccgactccaccgaccacgtgaagcccaaagagacagagaacaccaagcagcccagcaagagctgccacaagcccaaggccatcgtgcacaccgagaaagtgaacatgatgagcctgaccgtgctgggcctgcggatgctgttcgccaaaaccgtggccgtgaacttcctgctgaccgccaagctgttcttcctccgcgccaagagaagcggatctggcgtgaagcagaccctgaatttcgacctgctgaagctggctggcgacgtggaatccaacccaggcccttctagaggccatatgaccgagtacaagcccacggtgcgcctcgccacccgcgacgacgtccccagggccgtacgcaccctcgccgccgcgttcgccgactaccccgccacgcgccacaccgtcgatccggaccgccacatcgagcgggtcaccgagctgcaagaactcttcctcacgcgcgtcgggctcgacatcggcaaggtgtgggtcgcggacgacggcgccgcggtggcggtctggaccacgccggagagcgtcgaagcgggggcggtgttcgccgagatcggcccgcgcatggccgagttgagcggttcccggctggccgcgcagcaacagatggaaggcctcctggcgccgcaccggcccaaggagcccgcgtggttcctggccaccgtcggcgtctcgcccgaccaccagggcaagggtctgggcagcgccgtcgtgctccccggagtggaggcggccgagcgcgccggggtgcccgccttcctggagacctccgcgccccgcaacctccccttctacgagcggctcggcttcaccgtcaccgccgacgtcgaggtgcccgaaggaccgcgcacctggtgcatgacccgcaagcccggtgcctga

SEQ ID NO: 6020 - DNA, 2331 bp, Artificial Sequence
  Synthetic Polynucloetide
atggccttaccagtgaccgccttgctcctgccgctggccttgctgctccacgccgccaggccggacatccagatgacacagagccctagcagcctgtctgccagcgtgggagacagagtgaccatcacatgcaaggccagcgaccacatcaacaactggctggcctggtatcagcagaagcctggacaggcccctaagctgctgatctacggcgctaccacactggaaacaggcgtgcccagcagattttctggcagcggctctggcaccgactacaccctgacaatatccagcctccagcctgaggacttcgccacctactactgtcagcagagctggaacaccccttggacattcggccagggcaccaagctggaaatcaagagactcgagagccagcctcacaccaagcccagcgtgttcgtgatgaagaacggcaccaacgtggcctgcctcgtgaaagagttctaccccaaggacatcaggatcaacctggtgtccagcaagaagatcaccgagttcgaccccgccatcgtgatctcccccagcggcaagtacaacgccgtgaagctggggaagtacgaggacagcaacagcgtgacctgctccgtgcagcacgacaacaagaccgtgcacagcaccgactttgaagtgaaaaccgactccaccgaccacgtgaagcccaaagagacagagaacaccaagcagcccagcaagagctgccacaagcccaaggccatcgtgcacaccgagaaagtgaacatgatgagcctgaccgtgctgggcctgcggatgctgttcgccaaaaccgtggccgtgaacttcctgctgaccgccaagctgttcttcctcagggccaagcgatctggatctggagcaacaaacttctcactactcaaacaagcaggtgacgtggaggagaatcccgggcctactagtatggactggatttggcgcatccttttccttgtcggcgctgctaccggcgcccattccgggcccgaagtgcagctggttgaatctggcggaggactggttcagcctggcggatctctgagactgtcttgtgccgcctctggcttcgccagcgactactatatcatcggctggttcagacaggcccctggcaaagagagagagggcgtcagctgtatcagcagcagatacgccaacaccaactacgccgacagcgtgaagggcagattcaccatcagccgggacaacgccaagaacaccgtgtacctccagatgaacagcctgaagcctgaggacaccgccgtgtactactgtgccgccgacaccagaagatacacctgtcctgacattgccaccatgcaccggaacttcgattcttggggccagggcacactggtcaccgtttcttctggatccggcggcggaggatctggcggaggcggatctgggggcggaggctctttcgaacaagttcagcttcaacagcctggcgctgagctggtcaaacctggcgcttctgtgaagatgagctgcaaagccagcggctacgccttcagcagctactggatcaactggatgaagcagaaacccggccagggactcgaatggatcggccaaatctatcccggcgacggcgacaccaactacaacggcaagttcaagggcagagccacactgaccgccgatacctctagcagcacagcctacatgcagctgagcagcctgaccagcgaagatagcgccgtgtacttctgtgcccggtccatcacaacagtcgtgggctgcgctatggactattggggccagggaacaagcgtgaccgtgtctagtacgcgtgacaagcagctggacgccgacgtgtcccccaagcctaccatcttcctgccctctatcgccgagacaaagctccagaaggccggcacctacctgtgcctgctggaaaagttcttcccagatgtgattaagatccactggcaggaaaagaagtccaacaccatcctgggcagccaggaaggcaacaccatgaagaccaacgacacctacatgaagttcagctggctgaccgtgcccgagaagtccctggacaaagaacacagatgcatcgtgcggcacgaaaacaacaagaacggcgtggaccaggaaatcatcttcccacccatcaagaccgatgtgattacaatggaccccaaggacaactgctccaaggacgccaacgataccctgctgctccagctgaccaacaccagcgcctactacatgtacttgttgctgctgctgaagtccgtggtgtacttcgccatcatcacatgctgcctgctgcggagaaccgccttctgctgcaacggcgagaagtct

SEQ ID NO: 6021 - DNA, 3540 bp, Artificial Sequence
  Synthetic Polynucloetide
atggccttaccagtgaccgccttgctcctgccgctggccttgctgctccacgccgccaggccggacatccagatgacacagagccctagcagcctgtctgccagcgtgggagacagagtgaccatcacatgcaaggccagcgaccacatcaacaactggctggcctggtatcagcagaagcctggacaggcccctaagctgctgatctacggcgctaccacactggaaacaggcgtgcccagcagattttctggcagcggctctggcaccgactacaccctgacaatatccagcctccagcctgaggacttcgccacctactactgtcagcagagctggaacaccccttggacattcggccagggcaccaagctggaaatcaagagaggacagcctaaggccaatcctaccgtgacactgttccctccaagcagcgaagaactccaggccaacaaggccacacttgtgtgcctgatctccgacttctaccctggggctgtgacagtggcttggaaggccgatggatctcctgtgaaagccggcgtggaaaccaccaagccatccaagcagagcaacaacaaatacgccgccagctcctacctgagcctgacacctgagcagtggaagtcccacagatcctacagctgccaagtgacccacgaaggcagcaccgtggaaaagacagtggcccctacagagtgcagcggatcccagagcttcggcctgctggaccccaagctgtgctacctgctggatggcatcctgttcatctacggcgtgatcctgaccgccctgttcctgagagtgaagttcagcagaagcgccgacgcccctgcctaccagcagggacagaaccaactgtacaacgagctgaacctgggcagacgggaagagtacgacgtgctggacaagcggagaggcagggaccctgagatgggcggaaagccccagcggagaaagaacccccaggaaggactgtataacgaactccagaaagacaagatggccgaagcctacagcgagatcggcatgaagggcgagcggagaagaggcaagggccacgatggcctgtaccagggcctgagcaccgccaccaaggacacctatgacgccctgcacatgcaggccctgcctccaagaagggccaagcgatctggatctggagcaacaaacttctcactactcaaacaagcaggtgacgtggaggagaatcccgggcctactagtatggactggatttggcgcatccttttccttgtcggcgctgctaccggcgcccattccgggcccgaagtgcagctggttgaatctggcggaggactggttcagcctggcggatctctgagactgtcttgtgccgcctctggcttcgccagcgactactatatcatcggctggttcagacaggcccctggcaaagagagagagggcgtcagctgtatcagcagcagatacgccaacaccaactacgccgacagcgtgaagggcagattcaccatcagccgggacaacgccaagaacaccgtgtacctccagatgaacagcctgaagcctgaggacaccgccgtgtactactgtgccgccgacaccagaagatacacctgtcctgacattgccaccatgcaccggaacttcgattcttggggccagggcacactggtcaccgtttcttctggatccggcggcggaggatctggcggaggcggatctgggggcggaggctctttcgaacaagttcagcttcaacagcctggcgctgagctggtcaaacctggcgcttctgtgaagatgagctgcaaagccagcggctacgccttcagcagctactggatcaactggatgaagcagaaacccggccagggactcgaatggatcggccaaatctatcccggcgacggcgacaccaactacaacggcaagttcaagggcagagccacactgaccgccgatacctctagcagcacagcctacatgcagctgagcagcctgaccagcgaagatagcgccgtgtacttctgtgcccggtccatcacaacagtcgtgggctgcgctatggactattggggccagggaacaagcgtgaccgtgtctagtgcctctacaaagggaccctccgtgtttcctctggctcccagcagcaagtctacaagcggaggaacagccgctctgggctgcctggtcaaggattactttcccgagcctgtgaccgtgtcctggaatagcggagcactgacaagcggcgtgcacacctttccagccgtgctgcaaagcagcggcctgtactctctgagcagcgtggtcacagtgcctagctctagcctgggcacccagacctacatctgcaatgtgaaccacaagcctagcaacaccaaggtggacaagagagtggaacccaagagctgtggtacccagagttttgggttgttggaccctaaattgtgctatctgttggacggaatcctgttcatttacggagtgatcctgaccgcattgttcctgcgggttaagttttccagatccgcagacgcacccgcttaccaacaagggcagaaccaactctacaatgaacttaatttggggcggagggaagagtacgacgttctggacaaaaggaggggacgagatcccgagatgggcggaaagcctcagcgaaggaagaatccgcaagaggggctttataacgaactccagaaagataaaatggcagaagcctatagtgagattgggatgaagggagaaaggaggaggggtaaaggtcacgatgggttgtaccaaggattgagcacagccactaaagatacctatgatgcgctccacatgcaggccctgccgccaagacgcgccaagagaagcggatctggcgtgaagcagaccctgaatttcgacctgctgaagctggctggcgacgtggaatccaacccaggcccttctagaggccatatgaccgagtacaagcccacggtgcgcctcgccacccgcgacgacgtccccagggccgtacgcaccctcgccgccgcgttcgccgactaccccgccacgcgccacaccgtcgatccggaccgccacatcgagcgggtcaccgagctgcaagaactcttcctcacgcgcgtcgggctcgacatcggcaaggtgtgggtcgcggacgacggcgccgcggtggcggtctggaccacgccggagagcgtcgaagcgggggcggtgttcgccgagatcggcccgcgcatggccgagttgagcggttcccggctggccgcgcagcaacagatggaaggcctcctggcgccgcaccggcccaaggagcccgcgtggttcctggccaccgtcggcgtctcgcccgaccaccagggcaagggtctgggcagcgccgtcgtgctccccggagtggaggcggccgagcgcgccggggtgcccgccttcctggagacctccgcgccccgcaacctccccttctacgagcggctcggcttcaccgtcaccgccgacgtcgaggtgcccgaaggaccgcgcacctggtgcatgacccgcaagcccggtgcctga

SEQ ID NO: 6022 - DNA, 2895 bp, Artificial Sequence
  Synthetic Polynucloetide
atggccttaccagtgaccgccttgctcctgccgctggccttgctgctccacgccgccaggccggacatccagatgacacagagccctagcagcctgtctgccagcgtgggagacagagtgaccatcacatgcaaggccagcgaccacatcaacaactggctggcctggtatcagcagaagcctggacaggcccctaagctgctgatctacggcgctaccacactggaaacaggcgtgcccagcagattttctggcagcggctctggcaccgactacaccctgacaatatccagcctccagcctgaggacttcgccacctactactgtcagcagagctggaacaccccttggacattcggccagggcaccaagctggaaatcaagagactcgaggacctgaagaacgtgttcccacctgaggtggccgtgttcgagcctagcgaggccgagatcagccacacccagaaagccaccctcgtgtgcctggctaccggcttctaccccgaccatgtggaactgtcttggtgggtcaacggcaaagaggtgcacagcggcgtgtctaccgacccccagccactgaaagaacagcccgccctgaacgacagccggtactgcctgagcagcagactgagagtgtccgccaccttctggcagaacccccggaaccacttcagatgccaggtgcagttctacggcctgagcgagaacgacgagtggacccaggacagagccaagcccgtgacccagatcgtgtctgccgaagcctggggcagagccgattgcggatcccagagcttcggcctgctggaccccaagctgtgctacctgctggatggcatcctgttcatctacggcgtgatcctgaccgccctgttcctgagagtgaagttcagcagaagcgccgacgcccctgcctaccagcagggacagaaccaactgtacaacgagctgaacctgggcagacgggaagagtacgacgtgctggacaagcggagaggcagggaccctgagatgggcggaaagccccagcggagaaagaacccccaggaaggactgtataacgaactccagaaagacaagatggccgaagcctacagcgagatcggcatgaagggcgagcggagaagaggcaagggccacgatggcctgtaccagggcctgagcaccgccaccaaggacacctatgacgccctgcacatgcaggccctgcctccaagaagggccaagcgatctggatctggagcaacaaacttctcactactcaaacaagcaggtgacgtggaggagaatcccgggcctactagtatggactggatttggcgcatccttttccttgtcggcgctgctaccggcgcccattccgggcccgaagtgcagctggttgaatctggcggaggactggttcagcctggcggatctctgagactgtcttgtgccgcctctggcttcgccagcgactactatatcatcggctggttcagacaggcccctggcaaagagagagagggcgtcagctgtatcagcagcagatacgccaacaccaactacgccgacagcgtgaagggcagattcaccatcagccgggacaacgccaagaacaccgtgtacctccagatgaacagcctgaagcctgaggacaccgccgtgtactactgtgccgccgacaccagaagatacacctgtcctgacattgccaccatgcaccggaacttcgattcttggggccagggcacactggtcaccgtttcttctggatccggcggcggaggatctggcggaggcggatctgggggcggaggctctttcgaacaagttcagcttcaacagcctggcgctgagctggtcaaacctggcgcttctgtgaagatgagctgcaaagccagcggctacgccttcagcagctactggatcaactggatgaagcagaaacccggccagggactcgaatggatcggccaaatctatcccggcgacggcgacaccaactacaacggcaagttcaagggcagagccacactgaccgccgatacctctagcagcacagcctacatgcagctgagcagcctgaccagcgaagatagcgccgtgtacttctgtgcccggtccatcacaacagtcgtgggctgcgctatggactattggggccagggaacaagcgtgaccgtgtctagtacgcgtatccagaaccctgatcctgccgtgtaccagctgcgggatagcaagagcagcgacaagagcgtgtgtctgttcaccgacttcgacagccagaccaacgtgtcccagagcaaggactccgacgtgtacatcaccgataagaccgtgctggacatgcggagcatggacttcaagagcaactccgccgtggcctggtccaacaagtccgatttcgcctgcgccaacgccttcaacaacagcattatccccgaggacacattcttcccaagccccgagagcagctgcggtacccagagttttgggttgttggaccctaaattgtgctatctgttggacggaatcctgttcatttacggagtgatcctgaccgcattgttcctgcgggttaagttttccagatccgcagacgcacccgcttaccaacaagggcagaaccaactctacaatgaacttaatttggggcggagggaagagtacgacgttctggacaaaaggaggggacgagatcccgagatgggcggaaagcctcagcgaaggaagaatccgcaagaggggctttataacgaactccagaaagataaaatggcagaagcctatagtgagattgggatgaagggagaaaggaggaggggtaaaggtcacgatgggttgtaccaaggattgagcacagccactaaagatacctatgatgcgctccacatgcaggccctgccgccaaga

SEQ ID NO: 6023 - DNA, 2895 bp, Artificial Sequence
  Synthetic Polynucloetide
atggccttaccagtgaccgccttgctcctgccgctggccttgctgctccacgccgccaggccggacatccagatgacacagagccctagcagcctgtctgccagcgtgggagacagagtgaccatcacatgcaaggccagcgaccacatcaacaactggctggcctggtatcagcagaagcctggacaggcccctaagctgctgatctacggcgctaccacactggaaacaggcgtgcccagcagattttctggcagcggctctggcaccgactacaccctgacaatatccagcctccagcctgaggacttcgccacctactactgtcagcagagctggaacaccccttggacattcggccagggcaccaagctggaaatcaagagactcgaggacctgaagaacgtgttcccacctgaggtggccgtgttcgagcctagcaaggccgagatcgcccacacccagaaagccaccctcgtgtgcctggctaccggcttctaccccgaccatgtggaactgtcttggtgggtcaacggcaaagaggtgcacagcggcgtgtgtaccgacccccagccactgaaagaacagcccgccctgaacgacagccggtactgcctgagcagcagactgagagtgtccgccaccttctggcagaacccccggaaccacttcagatgccaggtgcagttctacggcctgagcgagaacgacgagtggacccaggacagagccaagcccgtgacccagatcgtgtctgccgaagcctggggcagagccgattgcggatcccagagcttcggcctgctggaccccaagctgtgctacctgctggatggcatcctgttcatctacggcgtgatcctgaccgccctgttcctgagagtgaagttcagcagaagcgccgacgcccctgcctaccagcagggacagaaccaactgtacaacgagctgaacctgggcagacgggaagagtacgacgtgctggacaagcggagaggcagggaccctgagatgggcggaaagccccagcggagaaagaacccccaggaaggactgtataacgaactccagaaagacaagatggccgaagcctacagcgagatcggcatgaagggcgagcggagaagaggcaagggccacgatggcctgtaccagggcctgagcaccgccaccaaggacacctatgacgccctgcacatgcaggccctgcctccaagaagggccaagcgatctggatctggagcaacaaacttctcactactcaaacaagcaggtgacgtggaggagaatcccgggcctactagtatggactggatttggcgcatccttttccttgtcggcgctgctaccggcgcccattccgggcccgaagtgcagctggttgaatctggcggaggactggttcagcctggcggatctctgagactgtcttgtgccgcctctggcttcgccagcgactactatatcatcggctggttcagacaggcccctggcaaagagagagagggcgtcagctgtatcagcagcagatacgccaacaccaactacgccgacagcgtgaagggcagattcaccatcagccgggacaacgccaagaacaccgtgtacctccagatgaacagcctgaagcctgaggacaccgccgtgtactactgtgccgccgacaccagaagatacacctgtcctgacattgccaccatgcaccggaacttcgattcttggggccagggcacactggtcaccgtttcttctggatccggcggcggaggatctggcggaggcggatctgggggcggaggctctttcgaacaagttcagcttcaacagcctggcgctgagctggtcaaacctggcgcttctgtgaagatgagctgcaaagccagcggctacgccttcagcagctactggatcaactggatgaagcagaaacccggccagggactcgaatggatcggccaaatctatcccggcgacggcgacaccaactacaacggcaagttcaagggcagagccacactgaccgccgatacctctagcagcacagcctacatgcagctgagcagcctgaccagcgaagatagcgccgtgtacttctgtgcccggtccatcacaacagtcgtgggctgcgctatggactattggggccagggaacaagcgtgaccgtgtctagtacgcgtatccagaaccctgatcctgccgtgtaccagctgcgggatagcaagagcagcgacaagagcgtgtgtctgttcaccgacttcgacagccagaccaacgtgtcccagagcaaggactccgacgtgtacatcaccgataagtgcgtgctggacatgcggagcatggacttcaagagcaactccgccgtggcctggtccaacaagtccgatttcgcctgcgccaacgccttcaacaacagcattatccccgaggacacattcttcccaagcagcgacgtgccctgcggtacccagagttttgggttgttggaccctaaattgtgctatctgttggacggaatcctgttcatttacggagtgatcctgaccgcattgttcctgcgggttaagttttccagatccgcagacgcacccgcttaccaacaagggcagaaccaactctacaatgaacttaatttggggcggagggaagagtacgacgttctggacaaaaggaggggacgagatcccgagatgggcggaaagcctcagcgaaggaagaatccgcaagaggggctttataacgaactccagaaagataaaatggcagaagcctatagtgagattgggatgaagggagaaaggaggaggggtaaaggtcacgatgggttgtaccaaggattgagcacagccactaaagatacctatgatgcgctccacatgcaggccctgccgccaaga

SEQ ID NO: 6024 - DNA, 3108 bp, Artificial Sequence
  Synthetic Polynucloetide
atggccttaccagtgaccgccttgctcctgccgctggccttgctgctccacgccgccaggccggacatccagatgacacagagccctagcagcctgtctgccagcgtgggagacagagtgaccatcacatgcaaggccagcgaccacatcaacaactggctggcctggtatcagcagaagcctggacaggcccctaagctgctgatctacggcgctaccacactggaaacaggcgtgcccagcagattttctggcagcggctctggcaccgactacaccctgacaatatccagcctccagcctgaggacttcgccacctactactgtcagcagagctggaacaccccttggacattcggccagggcaccaagctggaaatcaagagactcgaggggaaaccaattcccaaccctcttctgggactggattcaaccggcagcggcgaggacctgaagaacgtgttcccacctgaggtggccgtgttcgagcctagcgaggccgagatcagccacacccagaaagccaccctcgtgtgcctggctaccggcttctaccccgaccatgtggaactgtcttggtgggtcaacggcaaagaggtgcacagcggcgtgtctaccgacccccagccactgaaagaacagcccgccctgaacgacagccggtactgcctgagcagcagactgagagtgtccgccaccttctggcagaacccccggaaccacttcagatgccaggtgcagttctacggcctgagcgagaacgacgagtggacccaggacagagccaagcccgtgacccagatcgtgtctgccgaagcctggggcagagccgattgcggatcccagagcttcggcctgctggaccccaagctgtgctacctgctggatggcatcctgttcatctacggcgtgatcctgaccgccctgttcctgagagtgaagttcagcagaagcgccgacgcccctgcctaccagcagggacagaaccaactgtacaacgagctgaacctgggcagacgggaagagtacgacgtgctggacaagcggagaggcagggaccctgagatgggcggaaagccccagcggagaaagaacccccaggaaggactgtataacgaactccagaaagacaagatggccgaagcctacagcgagatcggcatgaagggcgagcggagaagaggcaagggccacgatggcctgtaccagggcctgagcaccgccaccaaggacacctatgacgccctgcacatgcaggccctgcctccaagaagggccaagcgatctggatctggagcaacaaacttctcactactcaaacaagcaggtgacgtggaggagaatcccgggcctactagtatggactggatttggcgcatccttttccttgtcggcgctgctaccggcgcccattccgggcccgaagtgcagctggttgaatctggcggaggactggttcagcctggcggatctctgagactgtcttgtgccgcctctggcttcgccagcgactactatatcatcggctggttcagacaggcccctggcaaagagagagagggcgtcagctgtatcagcagcagatacgccaacaccaactacgccgacagcgtgaagggcagattcaccatcagccgggacaacgccaagaacaccgtgtacctccagatgaacagcctgaagcctgaggacaccgccgtgtactactgtgccgccgacaccagaagatacacctgtcctgacattgccaccatgcaccggaacttcgattcttggggccagggcacactggtcaccgtttcttctggatccggcggcggaggatctggcggaggcggatctgggggcggaggctctttcgaacaagttcagcttcaacagcctggcgctgagctggtcaaacctggcgcttctgtgaagatgagctgcaaagccagcggctacgccttcagcagctactggatcaactggatgaagcagaaacccggccagggactcgaatggatcggccaaatctatcccggcgacggcgacaccaactacaacggcaagttcaagggcagagccacactgaccgccgatacctctagcagcacagcctacatgcagctgagcagcctgaccagcgaagatagcgccgtgtacttctgtgcccggtccatcacaacagtcgtgggctgcgctatggactattggggccagggaacaagcgtgaccgtgtctagtacgcgtgagcagaaactgatctcggaagaggatgggagcggcatccagaaccctgatcctgccgtgtaccagctgcgggatagcaagagcagcgacaagagcgtgtgtctgttcaccgacttcgacagccagaccaacgtgtcccagagcaaggactccgacgtgtacatcaccgataagaccgtgctggacatgcggagcatggacttcaagagcaactccgccgtggcctggtccaacaagtccgatttcgcctgcgccaacgccttcaacaacagcattatccccgaggacacattcttcccaagccccgagagcagctgcggtacccagagttttgggttgttggaccctaaattgtgctatctgttggacggaatcctgttcatttacggagtgatcctgaccgcattgttcctgaggagcaagcggtcacggctgctccacagcgattacatgaatatgacaccacgaagaccgggtcctactcgcaaacactaccaaccctacgcacctccccgcgactttgcagcgtaccgatctcgggttaagttttccagatccgcagacgcacccgcttaccaacaagggcagaaccaactctacaatgaacttaatttggggcggagggaagagtacgacgttctggacaaaaggaggggacgagatcccgagatgggcggaaagcctcagcgaaggaagaatccgcaagaggggctttataacgaactccagaaagataaaatggcagaagcctatagtgagattgggatgaagggagaaaggaggaggggtaaaggtcacgatgggttgtaccaaggattgagcacagccactaaagatacctatgatgcgctccacatgcaggccctgccgccaaga

SEQ ID NO: 6025 - DNA, 3231 bp, Artificial Sequence
  Synthetic Polynucloetide
atggccttaccagtgaccgccttgctcctgccgctggccttgctgctccacgccgccaggccggacatccagatgacacagagccctagcagcctgtctgccagcgtgggagacagagtgaccatcacatgcaaggccagcgaccacatcaacaactggctggcctggtatcagcagaagcctggacaggcccctaagctgctgatctacggcgctaccacactggaaacaggcgtgcccagcagattttctggcagcggctctggcaccgactacaccctgacaatatccagcctccagcctgaggacttcgccacctactactgtcagcagagctggaacaccccttggacattcggccagggcaccaagctggaaatcaagagactcgaggggaaaccaattcccaaccctcttctgggactggattcaaccggcagcggcgaggacctgaagaacgtgttcccacctgaggtggccgtgttcgagcctagcgaggccgagatcagccacacccagaaagccaccctcgtgtgcctggctaccggcttctaccccgaccatgtggaactgtcttggtgggtcaacggcaaagaggtgcacagcggcgtgtctaccgacccccagccactgaaagaacagcccgccctgaacgacagccggtactgcctgagcagcagactgagagtgtccgccaccttctggcagaacccccggaaccacttcagatgccaggtgcagttctacggcctgagcgagaacgacgagtggacccaggacagagccaagcccgtgacccagatcgtgtctgccgaagcctggggcagagccgattgcggatcccagagcttcggcctgctggaccccaagctgtgctacctgctggatggcatcctgttcatctacggcgtgatcctgaccgccctgttcctgaggagtaagaggagcaggctcctgcacagtgactacatgaacatgactccacgccgccccggacccacccgcaagcattaccagccctatgccccaccacgcgacttcgcagcctatcgctccagagtgaagttcagcagaagcgccgacgcccctgcctaccagcagggacagaaccaactgtacaacgagctgaacctgggcagacgggaagagtacgacgtgctggacaagcggagaggcagggaccctgagatgggcggaaagccccagcggagaaagaacccccaggaaggactgtataacgaactccagaaagacaagatggccgaagcctacagcgagatcggcatgaagggcgagcggagaagaggcaagggccacgatggcctgtaccagggcctgagcaccgccaccaaggacacctatgacgccctgcacatgcaggccctgcctccaagaagggccaagcgatctggatctggagcaacaaacttctcactactcaaacaagcaggtgacgtggaggagaatcccgggcctactagtatggactggatttggcgcatccttttccttgtcggcgctgctaccggcgcccattccgggcccgaagtgcagctggttgaatctggcggaggactggttcagcctggcggatctctgagactgtcttgtgccgcctctggcttcgccagcgactactatatcatcggctggttcagacaggcccctggcaaagagagagagggcgtcagctgtatcagcagcagatacgccaacaccaactacgccgacagcgtgaagggcagattcaccatcagccgggacaacgccaagaacaccgtgtacctccagatgaacagcctgaagcctgaggacaccgccgtgtactactgtgccgccgacaccagaagatacacctgtcctgacattgccaccatgcaccggaacttcgattcttggggccagggcacactggtcaccgtttcttctggatccggcggcggaggatctggcggaggcggatctgggggcggaggctctttcgaacaagttcagcttcaacagcctggcgctgagctggtcaaacctggcgcttctgtgaagatgagctgcaaagccagcggctacgccttcagcagctactggatcaactggatgaagcagaaacccggccagggactcgaatggatcggccaaatctatcccggcgacggcgacaccaactacaacggcaagttcaagggcagagccacactgaccgccgatacctctagcagcacagcctacatgcagctgagcagcctgaccagcgaagatagcgccgtgtacttctgtgcccggtccatcacaacagtcgtgggctgcgctatggactattggggccagggaacaagcgtgaccgtgtctagtacgcgtgagcagaaactgatctcggaagaggatgggagcggcatccagaaccctgatcctgccgtgtaccagctgcgggatagcaagagcagcgacaagagcgtgtgtctgttcaccgacttcgacagccagaccaacgtgtcccagagcaaggactccgacgtgtacatcaccgataagaccgtgctggacatgcggagcatggacttcaagagcaactccgccgtggcctggtccaacaagtccgatttcgcctgcgccaacgccttcaacaacagcattatccccgaggacacattcttcccaagccccgagagcagctgcggtacccagagttttgggttgttggaccctaaattgtgctatctgttggacggaatcctgttcatttacggagtgatcctgaccgcattgttcctgaggagcaagcggtcacggctgctccacagcgattacatgaatatgacaccacgaagaccgggtcctactcgcaaacactaccaaccctacgcacctccccgcgactttgcagcgtaccgatctcgggttaagttttccagatccgcagacgcacccgcttaccaacaagggcagaaccaactctacaatgaacttaatttggggcggagggaagagtacgacgttctggacaaaaggaggggacgagatcccgagatgggcggaaagcctcagcgaaggaagaatccgcaagaggggctttataacgaactccagaaagataaaatggcagaagcctatagtgagattgggatgaagggagaaaggaggaggggtaaaggtcacgatgggttgtaccaaggattgagcacagccactaaagatacctatgatgcgctccacatgcaggccctgccgccaaga

SEQ ID NO: 6026 - DNA, 3114 bp, Artificial Sequence
  Synthetic Polynucloetide
atggccttaccagtgaccgccttgctcctgccgctggccttgctgctccacgccgccaggccggacatccagatgacacagagccctagcagcctgtctgccagcgtgggagacagagtgaccatcacatgcaaggccagcgaccacatcaacaactggctggcctggtatcagcagaagcctggacaggcccctaagctgctgatctacggcgctaccacactggaaacaggcgtgcccagcagattttctggcagcggctctggcaccgactacaccctgacaatatccagcctccagcctgaggacttcgccacctactactgtcagcagagctggaacaccccttggacattcggccagggcaccaagctggaaatcaagagactcgaggggaaaccaattcccaaccctcttctgggactggattcaaccggcagcggcgaggacctgaagaacgtgttcccacctgaggtggccgtgttcgagcctagcgaggccgagatcagccacacccagaaagccaccctcgtgtgcctggctaccggcttctaccccgaccatgtggaactgtcttggtgggtcaacggcaaagaggtgcacagcggcgtgtctaccgacccccagccactgaaagaacagcccgccctgaacgacagccggtactgcctgagcagcagactgagagtgtccgccaccttctggcagaacccccggaaccacttcagatgccaggtgcagttctacggcctgagcgagaacgacgagtggacccaggacagagccaagcccgtgacccagatcgtgtctgccgaagcctggggcagagccgattgcggatcccagagcttcggcctgctggaccccaagctgtgctacctgctggatggcatcctgttcatctacggcgtgatcctgaccgccctgttcctgagagtgaagttcagcagaagcgccgacgcccctgcctaccagcagggacagaaccaactgtacaacgagctgaacctgggcagacgggaagagtacgacgtgctggacaagcggagaggcagggaccctgagatgggcggaaagccccagcggagaaagaacccccaggaaggactgtataacgaactccagaaagacaagatggccgaagcctacagcgagatcggcatgaagggcgagcggagaagaggcaagggccacgatggcctgtaccagggcctgagcaccgccaccaaggacacctatgacgccctgcacatgcaggccctgcctccaagaagggccaagcgatctggatctggagcaacaaacttctcactactcaaacaagcaggtgacgtggaggagaatcccgggcctactagtatggactggatttggcgcatccttttccttgtcggcgctgctaccggcgcccattccgggcccgaagtgcagctggttgaatctggcggaggactggttcagcctggcggatctctgagactgtcttgtgccgcctctggcttcgccagcgactactatatcatcggctggttcagacaggcccctggcaaagagagagagggcgtcagctgtatcagcagcagatacgccaacaccaactacgccgacagcgtgaagggcagattcaccatcagccgggacaacgccaagaacaccgtgtacctccagatgaacagcctgaagcctgaggacaccgccgtgtactactgtgccgccgacaccagaagatacacctgtcctgacattgccaccatgcaccggaacttcgattcttggggccagggcacactggtcaccgtttcttctggatccggcggcggaggatctggcggaggcggatctgggggcggaggctctttcgaacaagttcagcttcaacagcctggcgctgagctggtcaaacctggcgcttctgtgaagatgagctgcaaagccagcggctacgccttcagcagctactggatcaactggatgaagcagaaacccggccagggactcgaatggatcggccaaatctatcccggcgacggcgacaccaactacaacggcaagttcaagggcagagccacactgaccgccgatacctctagcagcacagcctacatgcagctgagcagcctgaccagcgaagatagcgccgtgtacttctgtgcccggtccatcacaacagtcgtgggctgcgctatggactattggggccagggaacaagcgtgaccgtgtctagtacgcgtgagcagaaactgatctcggaagaggatctggggagcggcatccagaaccctgatcctgccgtgtaccagctgcgggatagcaagagcagcgacaagagcgtgtgtctgttcaccgacttcgacagccagaccaacgtgtcccagagcaaggactccgacgtgtacatcaccgataagaccgtgctggacatgcggagcatggacttcaagagcaactccgccgtggcctggtccaacaagtccgatttcgcctgcgccaacgccttcaacaacagcattatccccgaggacacattcttcccaagccccgagagcagctgcggtacccagagttttgggttgttggaccctaaattgtgctatctgttggacggaatcctgttcatttacggagtgatcctgaccgcattgttcctgaagagaggccggaagaagctgctgtacatcttcaagcagcctttcatgcggcccgtgcagaccacccaggaagaggacggctgctcctgccggttccccgaggaagaagaaggcggctgcgagctgcgggttaagttttccagatccgcagacgcacccgcttaccaacaagggcagaaccaactctacaatgaacttaatttggggcggagggaagagtacgacgttctggacaaaaggaggggacgagatcccgagatgggcggaaagcctcagcgaaggaagaatccgcaagaggggctttataacgaactccagaaagataaaatggcagaagcctatagtgagattgggatgaagggagaaaggaggaggggtaaaggtcacgatgggttgtaccaaggattgagcacagccactaaagatacctatgatgcgctccacatgcaggccctgccgccaaga

SEQ ID NO: 6027 - DNA, 3240 bp, Artificial Sequence
  Synthetic Polynucloetide
atggccttaccagtgaccgccttgctcctgccgctggccttgctgctccacgccgccaggccggacatccagatgacacagagccctagcagcctgtctgccagcgtgggagacagagtgaccatcacatgcaaggccagcgaccacatcaacaactggctggcctggtatcagcagaagcctggacaggcccctaagctgctgatctacggcgctaccacactggaaacaggcgtgcccagcagattttctggcagcggctctggcaccgactacaccctgacaatatccagcctccagcctgaggacttcgccacctactactgtcagcagagctggaacaccccttggacattcggccagggcaccaagctggaaatcaagagactcgaggggaaaccaattcccaaccctcttctgggactggattcaaccggcagcggcgaggacctgaagaacgtgttcccacctgaggtggccgtgttcgagcctagcgaggccgagatcagccacacccagaaagccaccctcgtgtgcctggctaccggcttctaccccgaccatgtggaactgtcttggtgggtcaacggcaaagaggtgcacagcggcgtgtctaccgacccccagccactgaaagaacagcccgccctgaacgacagccggtactgcctgagcagcagactgagagtgtccgccaccttctggcagaacccccggaaccacttcagatgccaggtgcagttctacggcctgagcgagaacgacgagtggacccaggacagagccaagcccgtgacccagatcgtgtctgccgaagcctggggcagagccgattgcggatcccagagcttcggcctgctggaccccaagctgtgctacctgctggatggcatcctgttcatctacggcgtgatcctgaccgccctgttcctgaaacggggcagaaagaaactcctgtatatattcaaacaaccatttatgagaccagtacaaactactcaagaggaagatggctgtagctgccgatttccagaagaagaagaaggaggatgtgaactgagagtgaagttcagcagaagcgccgacgcccctgcctaccagcagggacagaaccaactgtacaacgagctgaacctgggcagacgggaagagtacgacgtgctggacaagcggagaggcagggaccctgagatgggcggaaagccccagcggagaaagaacccccaggaaggactgtataacgaactccagaaagacaagatggccgaagcctacagcgagatcggcatgaagggcgagcggagaagaggcaagggccacgatggcctgtaccagggcctgagcaccgccaccaaggacacctatgacgccctgcacatgcaggccctgcctccaagaagggccaagcgatctggatctggagcaacaaacttctcactactcaaacaagcaggtgacgtggaggagaatcccgggcctactagtatggactggatttggcgcatccttttccttgtcggcgctgctaccggcgcccattccgggcccgaagtgcagctggttgaatctggcggaggactggttcagcctggcggatctctgagactgtcttgtgccgcctctggcttcgccagcgactactatatcatcggctggttcagacaggcccctggcaaagagagagagggcgtcagctgtatcagcagcagatacgccaacaccaactacgccgacagcgtgaagggcagattcaccatcagccgggacaacgccaagaacaccgtgtacctccagatgaacagcctgaagcctgaggacaccgccgtgtactactgtgccgccgacaccagaagatacacctgtcctgacattgccaccatgcaccggaacttcgattcttggggccagggcacactggtcaccgtttcttctggatccggcggcggaggatctggcggaggcggatctgggggcggaggctctttcgaacaagttcagcttcaacagcctggcgctgagctggtcaaacctggcgcttctgtgaagatgagctgcaaagccagcggctacgccttcagcagctactggatcaactggatgaagcagaaacccggccagggactcgaatggatcggccaaatctatcccggcgacggcgacaccaactacaacggcaagttcaagggcagagccacactgaccgccgatacctctagcagcacagcctacatgcagctgagcagcctgaccagcgaagatagcgccgtgtacttctgtgcccggtccatcacaacagtcgtgggctgcgctatggactattggggccagggaacaagcgtgaccgtgtctagtacgcgtgagcagaaactgatctcggaagaggatctggggagcggcatccagaaccctgatcctgccgtgtaccagctgcgggatagcaagagcagcgacaagagcgtgtgtctgttcaccgacttcgacagccagaccaacgtgtcccagagcaaggactccgacgtgtacatcaccgataagaccgtgctggacatgcggagcatggacttcaagagcaactccgccgtggcctggtccaacaagtccgatttcgcctgcgccaacgccttcaacaacagcattatccccgaggacacattcttcccaagccccgagagcagctgcggtacccagagttttgggttgttggaccctaaattgtgctatctgttggacggaatcctgttcatttacggagtgatcctgaccgcattgttcctgaagagaggccggaagaagctgctgtacatcttcaagcagcctttcatgcggcccgtgcagaccacccaggaagaggacggctgctcctgccggttccccgaggaagaagaaggcggctgcgagctgcgggttaagttttccagatccgcagacgcacccgcttaccaacaagggcagaaccaactctacaatgaacttaatttggggcggagggaagagtacgacgttctggacaaaaggaggggacgagatcccgagatgggcggaaagcctcagcgaaggaagaatccgcaagaggggctttataacgaactccagaaagataaaatggcagaagcctatagtgagattgggatgaagggagaaaggaggaggggtaaaggtcacgatgggttgtaccaaggattgagcacagccactaaagatacctatgatgcgctccacatgcaggccctgccgccaaga

SEQ ID NO: 6028 - DNA, 2913 bp, Artificial Sequence
  Synthetic Polynucloetide
atggccttaccagtgaccgccttgctcctgccgctggccttgctgctccacgccgccaggccggacatccagatgacacagagccctagcagcctgtctgccagcgtgggagacagagtgaccatcacatgcaaggccagcgaccacatcaacaactggctggcctggtatcagcagaagcctggacaggcccctaagctgctgatctacggcgctaccacactggaaacaggcgtgcccagcagattttctggcagcggctctggcaccgactacaccctgacaatatccagcctccagcctgaggacttcgccacctactactgtcagcagagctggaacaccccttggacattcggccagggcaccaagctggaaatcaagagactcgagcagagcttcggcctgctggaccccaagctgtgctacctgctggatggcatcctgttcatctacggcgtgatcctgaccgccctgttcctgagagtgaagttcagcagaagcgccgacgcccctgcctaccagcagggacagaaccaactgtacaacgagctgaacctgggcagacgggaagagtacgacgtgctggacaagcggagaggcagggaccctgagatgggcggaaagccccagcggagaaagaacccccaggaaggactgtataacgaactccagaaagacaagatggccgaagcctacagcgagatcggcatgaagggcgagcggagaagaggcaagggccacgatggcctgtaccagggcctgagcaccgccaccaaggacacctatgacgccctgcacatgcaggccctgcctccaagaagggccaagcgatctggatctggagcaacaaacttctcactactcaaacaagcaggtgacgtggaggagaatcccgggcctactagtatggactggatttggcgcatccttttccttgtcggcgctgctaccggcgcccattccgggcccgaagtgcagctggttgaatctggcggaggactggttcagcctggcggatctctgagactgtcttgtgccgcctctggcttcgccagcgactactatatcatcggctggttcagacaggcccctggcaaagagagagagggcgtcagctgtatcagcagcagatacgccaacaccaactacgccgacagcgtgaagggcagattcaccatcagccgggacaacgccaagaacaccgtgtacctccagatgaacagcctgaagcctgaggacaccgccgtgtactactgtgccgccgacaccagaagatacacctgtcctgacattgccaccatgcaccggaacttcgattcttggggccagggcacactggtcaccgtttcttctggatccggcggcggaggatctggcggaggcggatctgggggcggaggctctttcgaacaagttcagcttcaacagcctggcgctgagctggtcaaacctggcgcttctgtgaagatgagctgcaaagccagcggctacgccttcagcagctactggatcaactggatgaagcagaaacccggccagggactcgaatggatcggccaaatctatcccggcgacggcgacaccaactacaacggcaagttcaagggcagagccacactgaccgccgatacctctagcagcacagcctacatgcagctgagcagcctgaccagcgaagatagcgccgtgtacttctgtgcccggtccatcacaacagtcgtgggctgcgctatggactattggggccagggaacaagcgtgaccgtgtctagtacgcgtcagagttttgggttgttggaccctaaattgtgctatctgttggacggaatcctgttcatttacggagtgatcctgaccgcattgttcctgcgggttaagttttccagatccgcagacgcacccgcttaccaacaagggcagaaccaactctacaatgaacttaatttggggcggagggaagagtacgacgttctggacaaaaggaggggacgagatcccgagatgggcggaaagcctcagcgaaggaagaatccgcaagaggggctttataacgaactccagaaagataaaatggcagaagcctatagtgagattgggatgaagggagaaaggaggaggggtaaaggtcacgatgggttgtaccaaggattgagcacagccactaaagatacctatgatgcgctccacatgcaggccctgccgccaagacgcgccaagagaagcggatctggcgtgaagcagaccctgaatttcgacctgctgaagctggctggcgacgtggaatccaacccaggcccttctagaggccatatgaccgagtacaagcccacggtgcgcctcgccacccgcgacgacgtccccagggccgtacgcaccctcgccgccgcgttcgccgactaccccgccacgcgccacaccgtcgatccggaccgccacatcgagcgggtcaccgagctgcaagaactcttcctcacgcgcgtcgggctcgacatcggcaaggtgtgggtcgcggacgacggcgccgcggtggcggtctggaccacgccggagagcgtcgaagcgggggcggtgttcgccgagatcggcccgcgcatggccgagttgagcggttcccggctggccgcgcagcaacagatggaaggcctcctggcgccgcaccggcccaaggagcccgcgtggttcctggccaccgtcggcgtctcgcccgaccaccagggcaagggtctgggcagcgccgtcgtgctccccggagtggaggcggccgagcgcgccggggtgcccgccttcctggagacctccgcgccccgcaacctccccttctacgagcggctcggcttcaccgtcaccgccgacgtcgaggtgcccgaaggaccgcgcacctggtgcatgacccgcaagcccggtgcctga

SEQ ID NO: 6029 - DNA, 2385 bp, Artificial Sequence
  Synthetic Polynucloetide
atggccttaccagtgaccgccttgctcctgccgctggccttgctgctccacgccgccaggccggacatccagatgacacagagccctagcagcctgtctgccagcgtgggagacagagtgaccatcacatgcaaggccagcgaccacatcaacaactggctggcctggtatcagcagaagcctggacaggcccctaagctgctgatctacggcgctaccacactggaaacaggcgtgcccagcagattttctggcagcggctctggcaccgactacaccctgacaatatccagcctccagcctgaggacttcgccacctactactgtcagcagagctggaacaccccttggacattcggccagggcaccaagctggaaatcaagagactcgagggacagcctaaggccaatcctaccgtgacactgttccctccaagcagcgaagaactccaggccaacaaggccacacttgtgtgcctgatctccgacttctaccctggggctgtgacagtggcttggaaggccgatggatctcctgtgaaagccggcgtggaaaccaccaagccatccaagcagagcaacaacaaatacgccgccagctcctacctgagcctgacacctgagcagtggaagtcccacagatcctacagctgccaagtgacccacgaaggcagcaccgtggaaaagacagtggcccctacagagtgcagccccatcaagaccgatgtgattacaatggaccccaaggacaactgctccaaggacgccaacgataccctgctgctccagctgaccaacaccagcgcctactacatgtacttgttgctgctgctgaagtccgtggtgtacttcgccatcatcacatgctgcctgctgcggagaaccgccttctgctgcaacggcgagaagtctagggccaagcgatctggatctggagcaacaaacttctcactactcaaacaagcaggtgacgtggaggagaatcccgggcctactagtatggactggatttggcgcatccttttccttgtcggcgctgctaccggcgcccattccgggcccgaagtgcagctggttgaatctggcggaggactggttcagcctggcggatctctgagactgtcttgtgccgcctctggcttcgccagcgactactatatcatcggctggttcagacaggcccctggcaaagagagagagggcgtcagctgtatcagcagcagatacgccaacaccaactacgccgacagcgtgaagggcagattcaccatcagccgggacaacgccaagaacaccgtgtacctccagatgaacagcctgaagcctgaggacaccgccgtgtactactgtgccgccgacaccagaagatacacctgtcctgacattgccaccatgcaccggaacttcgattcttggggccagggcacactggtcaccgtttcttctggatccggcggcggaggatctggcggaggcggatctgggggcggaggctctttcgaacaagttcagcttcaacagcctggcgctgagctggtcaaacctggcgcttctgtgaagatgagctgcaaagccagcggctacgccttcagcagctactggatcaactggatgaagcagaaacccggccagggactcgaatggatcggccaaatctatcccggcgacggcgacaccaactacaacggcaagttcaagggcagagccacactgaccgccgatacctctagcagcacagcctacatgcagctgagcagcctgaccagcgaagatagcgccgtgtacttctgtgcccggtccatcacaacagtcgtgggctgcgctatggactattggggccagggaacaagcgtgaccgtgtctagtacgcgtgcctctacaaagggaccctccgtgtttcctctggctcccagcagcaagtctacaagcggaggaacagccgctctgggctgcctggtcaaggattactttcccgagcctgtgaccgtgtcctggaatagcggagcactgacaagcggcgtgcacacctttccagccgtgctgcaaagcagcggcctgtactctctgagcagcgtggtcacagtgcctagctctagcctgggcacccagacctacatctgcaatgtgaaccacaagcctagcaacaccaaggtggacaagagagtggaacccaagagctgtgaagtgaaaaccgactccaccgaccacgtgaagcccaaagagacagagaacaccaagcagcccagcaagagctgccacaagcccaaggccatcgtgcacaccgagaaagtgaacatgatgagcctgaccgtgctgggcctgcggatgctgttcgccaaaaccgtggccgtgaacttcctgctgaccgccaagctgttcttcctc

SEQ ID NO: 6030 - DNA, 2319 bp, Artificial Sequence
  Synthetic Polynucloetide
atggccttaccagtgaccgccttgctcctgccgctggccttgctgctccacgccgccaggccggacatccagatgacacagagccctagcagcctgtctgccagcgtgggagacagagtgaccatcacatgcaaggccagcgaccacatcaacaactggctggcctggtatcagcagaagcctggacaggcccctaagctgctgatctacggcgctaccacactggaaacaggcgtgcccagcagattttctggcagcggctctggcaccgactacaccctgacaatatccagcctccagcctgaggacttcgccacctactactgtcagcagagctggaacaccccttggacattcggccagggcaccaagctggaaatcaagagactcgagggacagcctaaggccaatcctaccgtgacactgttccctccaagcagcgaagaactccaggccaacaaggccacacttgtgtgcctgatctccgacttctaccctggggctgtgacagtggcttggaaggccgatggatctcctgtgaaagccggcgtggaaaccaccaagccatccaagcagagcaacaacaaatacgccgccagctcctacctgagcctgacacctgagcagtggaagtcccacagatcctacagctgccaagtgacccacgaaggcagcaccgtggaaaagacagtggcccctacagagtgcagcggcagagccgattgcggcatcaccagcgccagctaccaccagggcgtgctgagcgccaccatcctgtacgagatcctgctgggcaaggccaccctgtacgccgtgctggtgtctgccctggtgctgatggctatggtcaagcggaaggacagccggggaagggccaagcgatctggatctggagcaacaaacttctcactactcaaacaagcaggtgacgtggaggagaatcccgggcctactagtatggactggatttggcgcatccttttccttgtcggcgctgctaccggcgcccattccgggcccgaagtgcagctggttgaatctggcggaggactggttcagcctggcggatctctgagactgtcttgtgccgcctctggcttcgccagcgactactatatcatcggctggttcagacaggcccctggcaaagagagagagggcgtcagctgtatcagcagcagatacgccaacaccaactacgccgacagcgtgaagggcagattcaccatcagccgggacaacgccaagaacaccgtgtacctccagatgaacagcctgaagcctgaggacaccgccgtgtactactgtgccgccgacaccagaagatacacctgtcctgacattgccaccatgcaccggaacttcgattcttggggccagggcacactggtcaccgtttcttctggatccggcggcggaggatctggcggaggcggatctgggggcggaggctctttcgaacaagttcagcttcaacagcctggcgctgagctggtcaaacctggcgcttctgtgaagatgagctgcaaagccagcggctacgccttcagcagctactggatcaactggatgaagcagaaacccggccagggactcgaatggatcggccaaatctatcccggcgacggcgacaccaactacaacggcaagttcaagggcagagccacactgaccgccgatacctctagcagcacagcctacatgcagctgagcagcctgaccagcgaagatagcgccgtgtacttctgtgcccggtccatcacaacagtcgtgggctgcgctatggactattggggccagggaacaagcgtgaccgtgtctagtacgcgtgcctctacaaagggaccctccgtgtttcctctggctcccagcagcaagtctacaagcggaggaacagccgctctgggctgcctggtcaaggattactttcccgagcctgtgaccgtgtcctggaatagcggagcactgacaagcggcgtgcacacctttccagccgtgctgcaaagcagcggcctgtactctctgagcagcgtggtcacagtgcctagctctagcctgggcacccagacctacatctgcaatgtgaaccacaagcctagcaacaccaaggtggacaagagagtggaacccaagagctgtatccccgaggacacattcttcccaagcagcgacgtgccctgcgacgtgaagctggtggaaaagagcttcgagacagacaccaacctgaacttccagaacctgagcgtgatcggcttcagaatcctgctgctgaaagtggccggctttaacctgctgatgaccctgcggctgtggtccagc

SEQ ID NO: 6031 - DNA, 2319 bp, Artificial Sequence
  Synthetic Polynucloetide
atggccttaccagtgaccgccttgctcctgccgctggccttgctgctccacgccgccaggccggacatccagatgacacagagccctagcagcctgtctgccagcgtgggagacagagtgaccatcacatgcaaggccagcgaccacatcaacaactggctggcctggtatcagcagaagcctggacaggcccctaagctgctgatctacggcgctaccacactggaaacaggcgtgcccagcagattttctggcagcggctctggcaccgactacaccctgacaatatccagcctccagcctgaggacttcgccacctactactgtcagcagagctggaacaccccttggacattcggccagggcaccaagctggaaatcaagagactcgagggacagcctaaggccaatcctaccgtgacactgttccctccaagcagcgaagaactccaggccaacaaggccacacttgtgtgcctgatctccgacttctaccctggggctgtgacagtggcttggaaggccgatggatctcctgtgaaagccggcgtggaaaccaccaagccatccaagcagagcaacaacaaatacgccgccagctcctacctgagcctgacacctgagcagtggaagtcccacagatcctacagctgccaagtgacccacgaaggcagcaccgtggaaaagacagtggcccctacagagtgcagcggcagagccgattgcggctttaccagcgagagctaccagcagggcgtgctgagcgccaccatcctgtacgagatcctgctgggcaaggccaccctgtacgccgtgctggtgtctgccctggtgctgatggctatggtcaagcggaaggacagccggggaagggccaagcgatctggatctggagcaacaaacttctcactactcaaacaagcaggtgacgtggaggagaatcccgggcctactagtatggactggatttggcgcatccttttccttgtcggcgctgctaccggcgcccattccgggcccgaagtgcagctggttgaatctggcggaggactggttcagcctggcggatctctgagactgtcttgtgccgcctctggcttcgccagcgactactatatcatcggctggttcagacaggcccctggcaaagagagagagggcgtcagctgtatcagcagcagatacgccaacaccaactacgccgacagcgtgaagggcagattcaccatcagccgggacaacgccaagaacaccgtgtacctccagatgaacagcctgaagcctgaggacaccgccgtgtactactgtgccgccgacaccagaagatacacctgtcctgacattgccaccatgcaccggaacttcgattcttggggccagggcacactggtcaccgtttcttctggatccggcggcggaggatctggcggaggcggatctgggggcggaggctctttcgaacaagttcagcttcaacagcctggcgctgagctggtcaaacctggcgcttctgtgaagatgagctgcaaagccagcggctacgccttcagcagctactggatcaactggatgaagcagaaacccggccagggactcgaatggatcggccaaatctatcccggcgacggcgacaccaactacaacggcaagttcaagggcagagccacactgaccgccgatacctctagcagcacagcctacatgcagctgagcagcctgaccagcgaagatagcgccgtgtacttctgtgcccggtccatcacaacagtcgtgggctgcgctatggactattggggccagggaacaagcgtgaccgtgtctagtacgcgtgcctctacaaagggaccctccgtgtttcctctggctcccagcagcaagtctacaagcggaggaacagccgctctgggctgcctggtcaaggattactttcccgagcctgtgaccgtgtcctggaatagcggagcactgacaagcggcgtgcacacctttccagccgtgctgcaaagcagcggcctgtactctctgagcagcgtggtcacagtgcctagctctagcctgggcacccagacctacatctgcaatgtgaaccacaagcctagcaacaccaaggtggacaagagagtggaacccaagagctgtatccccgaggacacattcttcccaagccccgagagcagctgcgacgtgaagctggtggaaaagagcttcgagacagacaccaacctgaacttccagaacctgagcgtgatcggcttcagaatcctgctgctgaaagtggccggctttaacctgctgatgaccctgcggctgtggtccagc

SEQ ID NO: 6032 - DNA, 1809 bp, Artificial Sequence
  Synthetic Polynucloetide
atggactggatttggcgcatccttttccttgtcggcgctgctaccggcgcccattccgggcccgaagtgcagctggttgaatctggcggaggactggttcagcctggcggatctctgagactgtcttgtgccgcctctggcttcgccagcgactactatatcatcggctggttcagacaggcccctggcaaagagagagagggcgtcagctgtatcagcagcagatacgccaacaccaactacgccgacagcgtgaagggcagattcaccatcagccgggacaacgccaagaacaccgtgtacctccagatgaacagcctgaagcctgaggacaccgccgtgtactactgtgccgccgacaccagaagatacacctgtcctgacattgccaccatgcaccggaacttcgattcttggggccagggcacactggtcaccgtttcttctggatccggcggcggaggatctggcggaggcggatctgggggcggaggctctttcgaacaagttcagcttcaacagcctggcgctgagctggtcaaacctggcgcttctgtgaagatgagctgcaaagccagcggctacgccttcagcagctactggatcaactggatgaagcagaaacccggccagggactcgaatggatcggccaaatctatcccggcgacggcgacaccaactacaacggcaagttcaagggcagagccacactgaccgccgatacctctagcagcacagcctacatgcagctgagcagcctgaccagcgaagatagcgccgtgtacttctgtgcccggtccatcacaacagtcgtgggctgcgctatggactattggggccagggaacaagcgtgaccgtgtctagtggcggaggcggaagtggaggcggaggatctggcggcggaggctctgacatccagatgacacagagccctagcagcctgtctgccagcgtgggagacagagtgaccatcacatgcaaggccagcgaccacatcaacaactggctggcctggtatcagcagaagcctggacaggcccctaagctgctgatctacggcgctaccacactggaaacaggcgtgcccagcagattttctggcagcggctctggcaccgactacaccctgacaatatccagcctccagcctgaggacttcgccacctactactgtcagcagagctggaacaccccttggacattcggccagggcaccaagctggaaatcaagagaacgcgtggcggaggcagcgacggtaacgaggagatgggaggaatcactcaaaccccttacaaagtctcaatttcaggaacaactgttatccttacatgtccccagtatcctggcagcgagatcctttggcagcataacgacaagaatatagggggagatgaagacgataagaatatcggatctgacgaggatcacttgagcctgaaagagttctccgagcttgaacaaagcggatattatgtgtgctatccgcgcgggtcaaagccggaagacgctaacttttacctttatctccgagccagagtgtgcgaaaattgcatggaaatggacgttatgtccgttgctacaatagttatcgtagatatatgcatcacgggtggactgcttctgctggtttattattggtccaagaatagaaaggccaaagctaaacccgtgaccagaggcgctggcgcaggcggaaggcaaaggggacaaaacaaagaacggccaccaccagtgccaaatccagattatgagcctattcggaaaggacagagggacctgtactctggcctgaatcagagaagaatc

SEQ ID NO: 6033 - DNA, 1704 bp, Artificial Sequence
  Synthetic Polynucloetide
atggactggatttggcgcatccttttccttgtcggcgctgctaccggcgcccattccgggcccgaagtgcagctggttgaatctggcggaggactggttcagcctggcggatctctgagactgtcttgtgccgcctctggcttcgccagcgactactatatcatcggctggttcagacaggcccctggcaaagagagagagggcgtcagctgtatcagcagcagatacgccaacaccaactacgccgacagcgtgaagggcagattcaccatcagccgggacaacgccaagaacaccgtgtacctccagatgaacagcctgaagcctgaggacaccgccgtgtactactgtgccgccgacaccagaagatacacctgtcctgacattgccaccatgcaccggaacttcgattcttggggccagggcacactggtcaccgtttcttctggatccggcggcggaggatctggcggaggcggatctgggggcggaggctctttcgaacaagttcagcttcaacagcctggcgctgagctggtcaaacctggcgcttctgtgaagatgagctgcaaagccagcggctacgccttcagcagctactggatcaactggatgaagcagaaacccggccagggactcgaatggatcggccaaatctatcccggcgacggcgacaccaactacaacggcaagttcaagggcagagccacactgaccgccgatacctctagcagcacagcctacatgcagctgagcagcctgaccagcgaagatagcgccgtgtacttctgtgcccggtccatcacaacagtcgtgggctgcgctatggactattggggccagggaacaagcgtgaccgtgtctagtggcggaggcggaagtggaggcggaggatctggcggcggaggctctgacatccagatgacacagagccctagcagcctgtctgccagcgtgggagacagagtgaccatcacatgcaaggccagcgaccacatcaacaactggctggcctggtatcagcagaagcctggacaggcccctaagctgctgatctacggcgctaccacactggaaacaggcgtgcccagcagattttctggcagcggctctggcaccgactacaccctgacaatatccagcctccagcctgaggacttcgccacctactactgtcagcagagctggaacaccccttggacattcggccagggcaccaagctggaaatcaagagaacgcgtggcggaggcagcttcaagatccccatcgaggaactggaagatcgggtgttcgtgaactgcaacacctctatcacctgggtggaaggcaccgtgggaacactgctgagcgacatcaccagactggacctcggcaagcggattctggaccctcggggcatctacagatgcaacggcaccgacatctacaaggacaaagaaagcaccgtgcaggtccactacagaatgtgccagtcctgcgtggaactggaccctgctacagtggccggcatcatcgtgaccgatgtgatcgctactctgctgctggctctgggagtgttctgcttcgccggacacgaaacaggcagactgtctggcgctgccgatacacaggccctgctgagaaacgaccaagtgtatcagcccctgcgcgacagagatgatgcccagtattctcacctcggcggcaactgggctagaaacaag

SEQ ID NO: 6034 - DNA, 1734 bp, Artificial Sequence
  Synthetic Polynucloetide
atggactggatttggcgcatccttttccttgtcggcgctgctaccggcgcccattccgggcccgaagtgcagctggttgaatctggcggaggactggttcagcctggcggatctctgagactgtcttgtgccgcctctggcttcgccagcgactactatatcatcggctggttcagacaggcccctggcaaagagagagagggcgtcagctgtatcagcagcagatacgccaacaccaactacgccgacagcgtgaagggcagattcaccatcagccgggacaacgccaagaacaccgtgtacctccagatgaacagcctgaagcctgaggacaccgccgtgtactactgtgccgccgacaccagaagatacacctgtcctgacattgccaccatgcaccggaacttcgattcttggggccagggcacactggtcaccgtttcttctggatccggcggcggaggatctggcggaggcggatctgggggcggaggctctttcgaacaagttcagcttcaacagcctggcgctgagctggtcaaacctggcgcttctgtgaagatgagctgcaaagccagcggctacgccttcagcagctactggatcaactggatgaagcagaaacccggccagggactcgaatggatcggccaaatctatcccggcgacggcgacaccaactacaacggcaagttcaagggcagagccacactgaccgccgatacctctagcagcacagcctacatgcagctgagcagcctgaccagcgaagatagcgccgtgtacttctgtgcccggtccatcacaacagtcgtgggctgcgctatggactattggggccagggaacaagcgtgaccgtgtctagtggcggaggcggaagtggaggcggaggatctggcggcggaggctctgacatccagatgacacagagccctagcagcctgtctgccagcgtgggagacagagtgaccatcacatgcaaggccagcgaccacatcaacaactggctggcctggtatcagcagaagcctggacaggcccctaagctgctgatctacggcgctaccacactggaaacaggcgtgcccagcagattttctggcagcggctctggcaccgactacaccctgacaatatccagcctccagcctgaggacttcgccacctactactgtcagcagagctggaacaccccttggacattcggccagggcaccaagctggaaatcaagagaacgcgtggcggaggcagccagagcatcaagggcaaccacctggtcaaggtgtacgactaccaagaggacggcagcgtgctgctgacatgtgatgccgaggccaagaacatcacctggtttaaggacggcaagatgatcggcttcctgaccgaggacaagaagaagtggaacctgggcagcaacgctaaggaccccagaggcatgtatcagtgcaagggcagccagaacaagagcaagcccctccaggtgtactaccggatgtgccagaactgcatcgagctgaacgccgctaccatcagcggctttctgttcgccgagatcgtgtccatcttcgtgctggccgtgggcgtgtactttatcgctggacaggatggcgtgcggcagagcagagcttccgataagcaaaccctgctgcctaacgaccagctgtaccagcctctgaaggacagagaggacgaccagtacagccacctccagggcaatcagctgagaagaaac

SEQ ID NO: 6035 - DNA, 1683 bp, Artificial Sequence
  Synthetic Polynucloetide
atggactggatttggcgcatccttttccttgtcggcgctgctaccggcgcccattccgggcccgaagtgcagctggttgaatctggcggaggactggttcagcctggcggatctctgagactgtcttgtgccgcctctggcttcgccagcgactactatatcatcggctggttcagacaggcccctggcaaagagagagagggcgtcagctgtatcagcagcagatacgccaacaccaactacgccgacagcgtgaagggcagattcaccatcagccgggacaacgccaagaacaccgtgtacctccagatgaacagcctgaagcctgaggacaccgccgtgtactactgtgccgccgacaccagaagatacacctgtcctgacattgccaccatgcaccggaacttcgattcttggggccagggcacactggtcaccgtttcttctggatccggcggcggaggatctggcggaggcggatctgggggcggaggctctttcgaacaagttcagcttcaacagcctggcgctgagctggtcaaacctggcgcttctgtgaagatgagctgcaaagccagcggctacgccttcagcagctactggatcaactggatgaagcagaaacccggccagggactcgaatggatcggccaaatctatcccggcgacggcgacaccaactacaacggcaagttcaagggcagagccacactgaccgccgatacctctagcagcacagcctacatgcagctgagcagcctgaccagcgaagatagcgccgtgtacttctgtgcccggtccatcacaacagtcgtgggctgcgctatggactattggggccagggaacaagcgtgaccgtgtctagtggcggaggcggaagtggaggcggaggatctggcggcggaggctctgacatccagatgacacagagccctagcagcctgtctgccagcgtgggagacagagtgaccatcacatgcaaggccagcgaccacatcaacaactggctggcctggtatcagcagaagcctggacaggcccctaagctgctgatctacggcgctaccacactggaaacaggcgtgcccagcagattttctggcagcggctctggcaccgactacaccctgacaatatccagcctccagcctgaggacttcgccacctactactgtcagcagagctggaacaccccttggacattcggccagggcaccaagctggaaatcaagagaacgcgtggcggaggcagccagagttttgggttgttggaccctaaattgtgctatctgttggacggaatcctgttcatttacggagtgatcctgaccgcattgttcctgcgggttaagttttccagatccgcagacgcacccgcttaccaacaagggcagaaccaactctacaatgaacttaatttggggcggagggaagagtacgacgttctggacaaaaggaggggacgagatcccgagatgggcggaaagcctcagcgaaggaagaatccgcaagaggggctttataacgaactccagaaagataaaatggcagaagcctatagtgagattgggatgaagggagaaaggaggaggggtaaaggtcacgatgggttgtaccaaggattgagcacagccactaaagatacctatgatgcgctccacatgcaggccctgccgccaaga

SEQ ID NO: 6036 - DNA, 1794 bp, Artificial Sequence
  Synthetic Polynucloetide
atggactggatttggcgcatccttttccttgtcggcgctgctaccggcgcccattccgggcccgaagtgcagctggttgaatctggcggaggactggttcagcctggcggatctctgagactgtcttgtgccgcctctggcttcgccagcgactactatatcatcggctggttcagacaggcccctggcaaagagagagagggcgtcagctgtatcagcagcagatacgccaacaccaactacgccgacagcgtgaagggcagattcaccatcagccgggacaacgccaagaacaccgtgtacctccagatgaacagcctgaagcctgaggacaccgccgtgtactactgtgccgccgacaccagaagatacacctgtcctgacattgccaccatgcaccggaacttcgattcttggggccagggcacactggtcaccgtttcttctggatccggcggcggaggatctggcggaggcggatctgggggcggaggctctttcgaacaagttcagcttcaacagcctggcgctgagctggtcaaacctggcgcttctgtgaagatgagctgcaaagccagcggctacgccttcagcagctactggatcaactggatgaagcagaaacccggccagggactcgaatggatcggccaaatctatcccggcgacggcgacaccaactacaacggcaagttcaagggcagagccacactgaccgccgatacctctagcagcacagcctacatgcagctgagcagcctgaccagcgaagatagcgccgtgtacttctgtgcccggtccatcacaacagtcgtgggctgcgctatggactattggggccagggaacaagcgtgaccgtgtctagtacgcgtatccagaaccctgatcctgccgtgtaccagctgcgggatagcaagagcagcgacaagagcgtgtgtctgttcaccgacttcgacagccagaccaacgtgtcccagagcaaggactccgacgtgtacatcaccgataagaccgtgctggacatgcggagcatggacttcaagagcaactccgccgtggcctggtccaacaagtccgatttcgcctgcgccaacgccttcaacaacagcattatccccgaggacacattcttcccaagccccgagagcagctgcgacgtgaagctggtggaaaagagcttcgagacagacaccaacctgaacttccagaacctgagcgtgatcggcttcagaatcctgctgctgaaagtggccggctttaacctgctgatgaccctgcggctgtggtccagccgcgccaagagaagcggatctggcgtgaagcagaccctgaatttcgacctgctgaagctggctggcgacgtggaatccaacccaggcccttctagaggccatatggccaagcctttgtctcaagaagaatccaccctcattgaaagagcaacggctacaatcaacagcatccccatctctgaagactacagcgtcgccagcgcagctctctctagcgacggccgcatcttcactggtgtcaatgtatatcattttactgggggaccttgtgcagaactcgtggtgctgggcactgctgctgctgcggcagctggcaacctgacttgtatcgtcgcgatcggaaatgagaacaggggcatcttgagcccctgcggacggtgccgacaggtgcttctcgatctgcatcctgggatcaaagccatagtgaaggacagtgatggacagccgacggcagttgggattcgtgaattgctgccctctggttatgtgtgggagggctga

SEQ ID NO: 6037 - DNA, 1293 bp, Artificial Sequence
  Synthetic Polynucloetide
atggactggatttggcgcatccttttccttgtcggcgctgctaccggcgcccattccgggcccgaagtgcagctggttgaatctggcggaggactggttcagcctggcggatctctgagactgtcttgtgccgcctctggcttcgccagcgactactatatcatcggctggttcagacaggcccctggcaaagagagagagggcgtcagctgtatcagcagcagatacgccaacaccaactacgccgacagcgtgaagggcagattcaccatcagccgggacaacgccaagaacaccgtgtacctccagatgaacagcctgaagcctgaggacaccgccgtgtactactgtgccgccgacaccagaagatacacctgtcctgacattgccaccatgcaccggaacttcgattcttggggccagggcacactggtcaccgtttcttctggatccggcggcggaggatctggcggaggcggatctgggggcggaggctctttcgaacaagttcagcttcaacagcctggcgctgagctggtcaaacctggcgcttctgtgaagatgagctgcaaagccagcggctacgccttcagcagctactggatcaactggatgaagcagaaacccggccagggactcgaatggatcggccaaatctatcccggcgacggcgacaccaactacaacggcaagttcaagggcagagccacactgaccgccgatacctctagcagcacagcctacatgcagctgagcagcctgaccagcgaagatagcgccgtgtacttctgtgcccggtccatcacaacagtcgtgggctgcgctatggactattggggccagggaacaagcgtgaccgtgtctagtacgcgtatccagaaccctgatcctgccgtgtaccagctgcgggatagcaagagcagcgacaagagcgtgtgtctgttcaccgacttcgacagccagaccaacgtgtcccagagcaaggactccgacgtgtacatcaccgataagaccgtgctggacatgcggagcatggacttcaagagcaactccgccgtggcctggtccaacaagtccgatttcgcctgcgccaacgccttcaacaacagcattatccccgaggacacattcttcccaagccccgagagcagctgcgacgtgaagctggtggaaaagagcttcgagacagacaccaacctgaacttccagaacctgagcgtgatcggcttcagaatcctgctgctgaaagtggccggctttaacctgctgatgaccctgcggctgtggtccagc

SEQ ID NO: 6038 - DNA, 1830 bp, Artificial Sequence
  Synthetic Polynucloetide
atggactggatttggcgcatccttttccttgtcggcgctgctaccggcgcccattccgggcccgaagtgcagctggttgaatctggcggaggactggttcagcctggcggatctctgagactgtcttgtgccgcctctggcttcgccagcgactactatatcatcggctggttcagacaggcccctggcaaagagagagagggcgtcagctgtatcagcagcagatacgccaacaccaactacgccgacagcgtgaagggcagattcaccatcagccgggacaacgccaagaacaccgtgtacctccagatgaacagcctgaagcctgaggacaccgccgtgtactactgtgccgccgacaccagaagatacacctgtcctgacattgccaccatgcaccggaacttcgattcttggggccagggcacactggtcaccgtttcttctggatccggcggcggaggatctggcggaggcggatctgggggcggaggctctttcgaacaagttcagcttcaacagcctggcgctgagctggtcaaacctggcgcttctgtgaagatgagctgcaaagccagcggctacgccttcagcagctactggatcaactggatgaagcagaaacccggccagggactcgaatggatcggccaaatctatcccggcgacggcgacaccaactacaacggcaagttcaagggcagagccacactgaccgccgatacctctagcagcacagcctacatgcagctgagcagcctgaccagcgaagatagcgccgtgtacttctgtgcccggtccatcacaacagtcgtgggctgcgctatggactattggggccagggaacaagcgtgaccgtgtctagtacgcgtgagcagaaactgatctcggaagaggatgggagcggcatccagaaccctgatcctgccgtgtaccagctgcgggatagcaagagcagcgacaagagcgtgtgtctgttcaccgacttcgacagccagaccaacgtgtcccagagcaaggactccgacgtgtacatcaccgataagtgcgtgctggacatgcggagcatggacttcaagagcaactccgccgtggcctggtccaacaagtccgatttcgcctgcgccaacgccttcaacaacagcattatccccgaggacacattcttcccaagccccgagagcagctgcgacgtgaagctggtggaaaagagcttcgagacagacaccaacctgaacttccagaacctgagcgtgatcggcttcagaatcctgctgctgaaagtggccggctttaacctgctgatgaccctgcggctgtggtccagccgcgccaagagaagcggatctggcgtgaagcagaccctgaatttcgacctgctgaagctggctggcgacgtggaatccaacccaggcccttctagaggccatatggccaagcctttgtctcaagaagaatccaccctcattgaaagagcaacggctacaatcaacagcatccccatctctgaagactacagcgtcgccagcgcagctctctctagcgacggccgcatcttcactggtgtcaatgtatatcattttactgggggaccttgtgcagaactcgtggtgctgggcactgctgctgctgcggcagctggcaacctgacttgtatcgtcgcgatcggaaatgagaacaggggcatcttgagcccctgcggacggtgccgacaggtgcttctcgatctgcatcctgggatcaaagccatagtgaaggacagtgatggacagccgacggcagttgggattcgtgaattgctgccctctggttatgtgtgggagggctga

SEQ ID NO: 6039 - DNA, 1332 bp, Artificial Sequence
  Synthetic Polynucloetide
atggactggatttggcgcatccttttccttgtcggcgctgctaccggcgcccattccgggcccgaagtgcagctggttgaatctggcggaggactggttcagcctggcggatctctgagactgtcttgtgccgcctctggcttcgccagcgactactatatcatcggctggttcagacaggcccctggcaaagagagagagggcgtcagctgtatcagcagcagatacgccaacaccaactacgccgacagcgtgaagggcagattcaccatcagccgggacaacgccaagaacaccgtgtacctccagatgaacagcctgaagcctgaggacaccgccgtgtactactgtgccgccgacaccagaagatacacctgtcctgacattgccaccatgcaccggaacttcgattcttggggccagggcacactggtcaccgtttcttctggatccggcggcggaggatctggcggaggcggatctgggggcggaggctctttcgaacaagttcagcttcaacagcctggcgctgagctggtcaaacctggcgcttctgtgaagatgagctgcaaagccagcggctacgccttcagcagctactggatcaactggatgaagcagaaacccggccagggactcgaatggatcggccaaatctatcccggcgacggcgacaccaactacaacggcaagttcaagggcagagccacactgaccgccgatacctctagcagcacagcctacatgcagctgagcagcctgaccagcgaagatagcgccgtgtacttctgtgcccggtccatcacaacagtcgtgggctgcgctatggactattggggccagggaacaagcgtgaccgtgtctagtacgcgtgagcagaaactgatctcggaagaggatgggagcggcatccagaaccctgatcctgccgtgtaccagctgcgggatagcaagagcagcgacaagagcgtgtgtctgttcaccgacttcgacagccagaccaacgtgtcccagagcaaggactccgacgtgtacatcaccgataagtgcgtgctggacatgcggagcatggacttcaagagcaactccgccgtggcctggtccaacaagtccgatttcgcctgcgccaacgccttcaacaacagcattatccccgaggacacattcttcccaagccccgagagcagctgcgacgtgaagctggtggaaaagagcttcgagacagacaccaacctgaacttccagaacctgagcgtgatcggcttcagaatcctgctgctgaaagtggccggctttaacctgctgatgaccctgcggctgtggtccagctga

SEQ ID NO: 6040 - DNA, 3441 bp, Artificial Sequence
  Synthetic Polynucloetide
atggccttaccagtgaccgccttgctcctgccgctggccttgctgctccacgccgccaggccggaagtgcaactggtggaatctggaggctctctggtgcagccagggggaagcctgagactgtcttgtgccgcttccggcttcaccttcgacgactacgccatgagctgggtgcgccaggtgccaggcaaaggcctggaatgggtgtccagcatcaactggagcggcacccacaccgattacgccgactccgtgaaaggcagattcacaatcagcagaaacaacgccaacaataccctgtacctgcagatgaactccctgaagtctgaggatacagcagtgtattattgcgccaagaactggcgggacgccggcaccacttggtttgagaaaagcggctctgccggacagggaacccaagtgacagtgtcctccggtaccggcggaggcggatctggcggcggaggtagcggtggcggaggatctgaattcgacatccagatgacacagagccctagcagcctgtctgccagcgtgggagacagagtgaccatcacatgcaaggccagcgaccacatcaacaactggctggcctggtatcagcagaagcctggacaggcccctaagctgctgatctacggcgctaccacactggaaacaggcgtgcccagcagattttctggcagcggctctggcaccgactacaccctgacaatatccagcctccagcctgaggacttcgccacctactactgtcagcagagctggaacaccccttggacattcggccagggcaccaagctggaaatcaagagactcgagatccagaaccctgatcctgccgtgtaccagctgcgggatagcaagagcagcgacaagagcgtgtgtctgttcaccgacttcgacagccagaccaacgtgtcccagagcaaggactccgacgtgtacatcaccgataagtgcgtgctggacatgcggagcatggacttcaagagcaactccgccgtggcctggtccaacaagtccgatttcgcctgcgccaacgccttcaacaacagcattatccccgaggacacattcttcccaagcagcgacgtgccctgcgacgtgaagctggtggaaaagagcttcgagacagacaccaacctgaacttccagaacctgagcgtgatcggcttcagaatcctgctgctgaaagtggccggctttaacctgctgatgaccctgcggctgtggtccagccgcgccaagagaagcggatctggcgtgaagcagaccctgaatttcgacctgctgaagctggctggcgacgtggaatccaacccaggccctactagtatggactggatttggcgcatccttttccttgtcggcgctgctaccggcgcccattccgggcccgaagtgcagctggttgaatctggcggaggactggttcagcctggcggatctctgagactgtcttgtgccgcctctggcttcgccagcgactactatatcatcggctggttcagacaggcccctggcaaagagagagagggcgtcagctgtatcagcagcagatacgccaacaccaactacgccgacagcgtgaagggcagattcaccatcagccgggacaacgccaagaacaccgtgtacctccagatgaacagcctgaagcctgaggacaccgccgtgtactactgtgccgccgacaccagaagatacacctgtcctgacattgccaccatgcaccggaacttcgattcttggggccagggcacactggtcaccgtttcttctggatccggcggcggaggatctggcggaggcggatctgggggcggaggctctttcgaacaagttcagcttcaacagcctggcgctgagctggtcaaacctggcgcttctgtgaagatgagctgcaaagccagcggctacgccttcagcagctactggatcaactggatgaagcagaaacccggccagggactcgaatggatcggccaaatctatcccggcgacggcgacaccaactacaacggcaagttcaagggcagagccacactgaccgccgatacctctagcagcacagcctacatgcagctgagcagcctgaccagcgaagatagcgccgtgtacttctgtgcccggtccatcacaacagtcgtgggctgcgctatggactattggggccagggaacaagcgtgaccgtgtctagtacgcgtgaggacctgaagaacgtgttcccacctgaggtggccgtgttcgagcctagcaaggccgagatcgcccacacccagaaagccaccctcgtgtgcctggctaccggcttctaccccgaccatgtggaactgtcttggtgggtcaacggcaaagaggtgcacagcggcgtgtgtaccgacccccagccactgaaagaacagcccgccctgaacgacagccggtactgcctgagcagcagactgagagtgtccgccaccttctggcagaacccccggaaccacttcagatgccaggtgcagttctacggcctgagcgagaacgacgagtggacccaggacagagccaagcccgtgacccagatcgtgtctgccgaagcctggggcagagccgattgcggcatcaccagcgccagctaccaccagggcgtgctgagcgccaccatcctgtacgagatcctgctgggcaaggccaccctgtacgccgtgctggtgtctgccctggtgctgatggctatggtcaagcggaaggacagccggggaagggccaagcgatctggatctggagcaacaaacttctcactactcaaacaagcaggtgacgtggaggagaatcccgggccttctagaggccatatgaccgagtacaagcccacggtgcgcctcgccacccgcgacgacgtccccagggccgtacgcaccctcgccgccgcgttcgccgactaccccgccacgcgccacaccgtcgatccggaccgccacatcgagcgggtcaccgagctgcaagaactcttcctcacgcgcgtcgggctcgacatcggcaaggtgtgggtcgcggacgacggcgccgcggtggcggtctggaccacgccggagagcgtcgaagcgggggcggtgttcgccgagatcggcccgcgcatggccgagttgagcggttcccggctggccgcgcagcaacagatggaaggcctcctggcgccgcaccggcccaaggagcccgcgtggttcctggccaccgtcggcgtctcgcccgaccaccagggcaagggtctgggcagcgccgtcgtgctccccggagtggaggcggccgagcgcgccggggtgcccgccttcctggagacctccgcgccccgcaacctccccttctacgagcggctcggcttcaccgtcaccgccgacgtcgaggtgcccgaaggaccgcgcacctggtgcatgacccgcaagcccggtgcctga

SEQ ID NO: 6041 - DNA, 3438 bp, Artificial Sequence
  Synthetic Polynucloetide
atggccttaccagtgaccgccttgctcctgccgctggccttgctgctccacgccgccaggccggaagtgcaactggtggaatctggaggctctctggtgcagccagggggaagcctgagactgtcttgtgccgcttccggcttcaccttcgacgactacgccatgagctgggtgcgccaggtgccaggcaaaggcctggaatgggtgtccagcatcaactggagcggcacccacaccgattacgccgactccgtgaaaggcagattcacaatcagcagaaacaacgccaacaataccctgtacctgcagatgaactccctgaagtctgaggatacagcagtgtattattgcgccaagaactggcgggacgccggcaccacttggtttgagaaaagcggctctgccggacagggaacccaagtgacagtgtcctccggtaccggcggaggcggatctggcggcggaggtagcggtggcggaggatctgaattcgacatccagatgacacagagccctagcagcctgtctgccagcgtgggagacagagtgaccatcacatgcaaggccagcgaccacatcaacaactggctggcctggtatcagcagaagcctggacaggcccctaagctgctgatctacggcgctaccacactggaaacaggcgtgcccagcagattttctggcagcggctctggcaccgactacaccctgacaatatccagcctccagcctgaggacttcgccacctactactgtcagcagagctggaacaccccttggacattcggccagggcaccaagctggaaatcaagagactcgaggacctgaagaacgtgttcccacctgaggtggccgtgttcgagcctagcaaggccgagatcgcccacacccagaaagccaccctcgtgtgcctggctaccggcttctaccccgaccatgtggaactgtcttggtgggtcaacggcaaagaggtgcacagcggcgtgtgtaccgacccccagccactgaaagaacagcccgccctgaacgacagccggtactgcctgagcagcagactgagagtgtccgccaccttctggcagaacccccggaaccacttcagatgccaggtgcagttctacggcctgagcgagaacgacgagtggacccaggacagagccaagcccgtgacccagatcgtgtctgccgaagcctggggcagagccgattgcggcatcaccagcgccagctaccaccagggcgtgctgagcgccaccatcctgtacgagatcctgctgggcaaggccaccctgtacgccgtgctggtgtctgccctggtgctgatggctatggtcaagcggaaggacagccggggaagggccaagcgatctggatctggagcaacaaacttctcactactcaaacaagcaggtgacgtggaggagaatcccgggcctactagtatggactggatttggcgcatccttttccttgtcggcgctgctaccggcgcccattccgggcccgaagtgcagctggttgaatctggcggaggactggttcagcctggcggatctctgagactgtcttgtgccgcctctggcttcgccagcgactactatatcatcggctggttcagacaggcccctggcaaagagagagagggcgtcagctgtatcagcagcagatacgccaacaccaactacgccgacagcgtgaagggcagattcaccatcagccgggacaacgccaagaacaccgtgtacctccagatgaacagcctgaagcctgaggacaccgccgtgtactactgtgccgccgacaccagaagatacacctgtcctgacattgccaccatgcaccggaacttcgattcttggggccagggcacactggtcaccgtttcttctggatccggcggcggaggatctggcggaggcggatctgggggcggaggctctttcgaacaagttcagcttcaacagcctggcgctgagctggtcaaacctggcgcttctgtgaagatgagctgcaaagccagcggctacgccttcagcagctactggatcaactggatgaagcagaaacccggccagggactcgaatggatcggccaaatctatcccggcgacggcgacaccaactacaacggcaagttcaagggcagagccacactgaccgccgatacctctagcagcacagcctacatgcagctgagcagcctgaccagcgaagatagcgccgtgtacttctgtgcccggtccatcacaacagtcgtgggctgcgctatggactattggggccagggaacaagcgtgaccgtgtctagtacgcgtatccagaaccctgatcctgccgtgtaccagctgcgggatagcaagagcagcgacaagagcgtgtgtctgttcaccgacttcgacagccagaccaacgtgtcccagagcaaggactccgacgtgtacatcaccgataagtgcgtgctggacatgcggagcatggacttcaagagcaactccgccgtggcctggtccaacaagtccgatttcgcctgcgccaacgccttcaacaacagcattatccccgaggacacattcttcccaagcagcgacgtgccctgcgacgtgaagctggtggaaaagagcttcgagacagacaccaacctgaacttccagaacctgagcgtgatcggcttcagaatcctgctgctgaaagtggccggctttaacctgctgatgaccctgcggctgtggtccagccgcgccaagagaagcggatctggcgtgaagcagaccctgaatttcgacctgctgaagctggctggcgacgtggaatccaacccaggcccttctagaggccatatgaccgagtacaagcccacggtgcgcctcgccacccgcgacgacgtccccagggccgtacgcaccctcgccgccgcgttcgccgactaccccgccacgcgccacaccgtcgatccggaccgccacatcgagcgggtcaccgagctgcaagaactcttcctcacgcgcgtcgggctcgacatcggcaaggtgtgggtcgcggacgacggcgccgcggtggcggtctggaccacgccggagagcgtcgaagcgggggcggtgttcgccgagatcggcccgcgcatggccgagttgagcggttcccggctggccgcgcagcaacagatggaaggcctcctggcgccgcaccggcccaaggagcccgcgtggttcctggccaccgtcggcgtctcgcccgaccaccagggcaagggtctgggcagcgccgtcgtgctccccggagtggaggcggccgagcgcgccggggtgcccgccttcctggagacctccgcgccccgcaacctccccttctacgagcggctcggcttcaccgtcaccgccgacgtcgaggtgcccgaaggaccgcgcacctggtgcatgacccgcaagcccggtgcctga
